United States Patent Application Publication US 2011/0183924 A1 - sequence listing, part 162

SEQ ID NO: 418878 - DNA, 2804 bp, Homo sapiens
acaggatccaaaatggcagcgctgtcgccttagctgggagagcgagccgttgtggctgtttgggagacttatggtcaccctgaagtactgcctgcctctagtgtcgcgtccctccagtatccgatgggagcgccgtccgcagggaatgtgtctctctgatcatggtgcctcgtgtccagctctggggaagaccgagacgaaatcgagtcagctggcgttgggagagggcttatttccgcttccgcttgcccactttcaggaatttgattctgagagcagggctgcggttccaggcagggtttgtacacatatttgcgttggaaggagagaggagcctaggacacatatgtattaactgtgcagctggtccgactcccgacagcttcagcgcacaccagccagccttggagttgctggaacggccctggctgcaagctggaatcacccggagagctttcgacattgatgcctgaggcccagctgtggagcgacagtttgaaaagagctgcaggtgactctaatgtgcagctaaagctaggaaccactgagctacatctcagggaagactgaaaattacaaagaatatgataaaatcttacttcaggaacaaagctacgtttttccagcttccccttctcagaatcctgctcttcctccagagagattcccaggagaagagggaacaaccaattcattcctgaaagccaggcctcgggacctgatgacatttgaagatgtggctgtggaattcagccagtgggagtgggggcagctgaaccctgctcagaaggacctctacagggaggtgatgctggagaacttcaggaacttggccattctgggccttctagtatccaaaccatatgtgatctgccagttggaggaagggggtgagcccttcatggtggagagagaaatctcaacaggagcccactcagactggaagagaaggtctaaatccaaggaatcaatgccaagttggggaatttccaaagaagaattattccaggtagtatcagtggaaaaacacattcaagatgtgctgcagttctcgaagttgaaagcagcctgcggttgtgatggccagttagagatgcagcagataaaacaggagagacacctgaaacaaatgtcaaccattcacaaatctgccaccacccttagcagagattataaatggaatggatttgggagaagcttaggtttaagatcagtccttgttaaccaacacagcattctcatgggagaaggatcttataaatgtgatacagaattcaggcagactttagggggaaacaactctcagagaacccacccagaaaagaaatcttgtaaatgtaatgagtgtgggaagtcctttcacttccagtcagaacttaggcgccatcagcgatgtcacactggagaaaagccgtatgaatgcagtgactgtggaagagcctttggtcatatttcatcccttattaaacatcaaagaactcatactggagaaaagccctatgaatgcagtgaatgtgggagagccttcagccagagttcgtctcttgttctgcactatagatttcacactggagagaaaccctacaaatgtaatgaatgtggacgagcctttggtcacacttcatcccttattaagcatcagaggactcatactggagaaaagccctatgaatgccgggaatgtgggagaaccttcagccagagctcatcactcattgtgcattacagatttcatactggagagaaaccttacaaatgtaataaatgtgggagagccttcagccagagttcatctctcactcaacattacagatttcacactggagagaaaccctacaaatgtaatgagtgtggaagggcctttgctcatactgcatcccttattaaacatcagagaagtcatgctggaaaaaaaaccctataaattcagtgaatatagaagggctttcagctggagtgcagacatcactggaacttaaagaattcatatcagagagagatcctaaaggtgtaatgtatgtgggaagaccacatcttgttccacatcaggcaataattactaaagagaatccctgtcaatgtcaagagggggtgggcttcccctctcttaccaaacatgggagaatccatactagtgagaaaccacgtgaatgtaatgaatgtgggaacgctttgatcagaggatgcatattattcagcatcagacagccgacactggggaggagccttatcaatgcagtgagtgtggcaagccttcagttacatactgattctttaagaaaatcagataacttgtactggagagaaatcctacaagtgtggtaagtatggaaaaatcttcagttgtatctcttcctttactaagcatcaagaacacatactagagagaggccctatgaaagcaggaaatagaggaaggccttcagtcagggctcatcccttattaagcatcagaaaattcatacctgagaaaaacctgtgaatgtgggtaatgtgggagagccttcagccaaacctcattgctttataaaccccttagaactctccctactagctggaaactctggtgacgtgatgaatgtgggaagggctttggtggatgttccaccaaaacacgttagagaatttgtacattagagaatttgtgctagagcaactcttcaaatttagtgaaactgggaaaacccattagtagagttcaagcttcagtattcatctcaaagagaaaccttgggaacatgatgaatgtgaggaaagttcctttccaacttgaggtcgacgcggccgcgaatttagtagtagta

SEQ ID NO: 418879 - DNA, 870 bp, Homo sapiens
acaggatccaaaatggcagcgctgtcgccttagctgggagagcgagccgttgtggctgtttgggagacttatggtcaccctgaagtactgcctgcctctagtgtcgcgtccctccagtatccgatgggagcgccgtccgcagggaatgtgtctctctgatcatggtgcctcgtgtccagctctggggaagaccgagacgaaatcgagtcagctggcgttgggagagggcttatttccgcttccgcttgcccactttcaggaatttgattctgagagcagggctgcggttccaggcagggtttgtacacatatttgcgttggaaggagagaggagcctaggacacatatgtattaactgtgcagctggtccgactcccgacagcttcagcgcacaccagccagccttggagttgctggaacggccctggctgcaagctggaatcacccggagagctttcgacattgatgcctgaggcccagctgtggagcgacagtttgaaaagagctgcaggtgactctaatgtgcagctaaagctaggaaccactgagctacatctcagggaagactgaaaattacaaagaatatgataaaatcttacttcaggaacaaagctacgtttttccagcctccccttctcagaatcctgctcttcctccaactggcagatcacatatggtttggatactagagggcccagaatggccaagttcctgaagtactccagcatcacctccctgtagaggtccttctgagcagggttcagctgcccccactcccactggctgaattccacagccacatcttcaaatgtcatcaggtcccgaggcctggctttcaggaatgaattggttgttccctctttcctggga

SEQ ID NO: 418880 - DNA, 4123 bp, Homo sapiens
acagagctgggtgtgtccctccgagtgccccccgctagggactgtgcaggccggagctaggcagggacagcggggcgaaccgggctgatagagtcggtccctgctcctgtgaggctctcaccgaatccctgctgtttccgggcagctgaagagcgctgggccctcgcgtcgcgggcgtggctgtggccgtgtctcctggtagtctgagcccactgtgcgtgtggatccacgtgggagctgggttccagagcctggtcctgaggaggagccgagccggggcttccccttctcagaatcctgctcttcctccagagagattcccaggagaagagggaacaaccaattcattcctgaaagccaggcctcgggacctgatgacatttgaagatgtggctgtggaattcagccagtgggagtgggggcagctgaaccctgctcagaaggacctctacagggaggtgatgctggagaacttcaggaacttggccattctgggccttctagtatccaaaccatatgtgatctgccagttggaggaagggggtgagcccttcatggtggagagagaaatctcaacaggagcccactcagactggaagagaaggtctaaatccaaggaatcaatgccaagttggggaatttccaaagaagaattattccaggtagtatcagtggaaaaacacattcaagatgtgctgcagttctcgaagttgaaagcagcctgcggttgtgatggccagttagagatgcagcagataaaacaggagagacacctgaaacaaatgtcaaccattcacaaatctgccaccacccttagcagagattataaatggaatggatttgggagaagcttaggtttaagatcagtccttgttaaccaacacagcattctcatgggagaaggatcttataaatgtgatacagaattcaggcagactttagggggaaacaactctcagagaacccacccagaaaagaaatcttgtaaatgtaatgagtgtgggaagtcctttcacttccagtcagaacttaggcgccatcagcgatgtcacactggagaaaagccgtatgaatgcagtgactgtggaagagcctttggtcatatttcatcccttattaaacatcaaagaactcatactggagaaaagccctatgaatgcagtgaatgtgggagagccttcagccagagttcgtctcttgttctgcactatagatttcacactggagagaaaccctacaaatgtaatgaatgtggacgagcctttggtcacacttcatcccttattaagcatcagaggactcatactggagaaaagccctatgaatgccgggaatgtgggagaaccttcagccagagctcatcactcattgtgcattacagatttcatactggagagaaaccttacaaatgtaataaatgtgggagagccttcagccagagttcatctctcactcaacattacagatttcacactggagagaaaccctacaaatgtaatgagtgtggaagggcctttgctcatactgcatcccttattaaacatcagagaagtcatgctggaaaaaaaaccctataaattcagtgaatatagaagggctttcagctggagtgcagacatcactggaacttaaagaattcatatcagagagagatcctaaaggtgtaatgtatgtgggaagaccacatcttgttccacatcaggcaataattactaaagagaatccctgtcaatgtcaagagggggtgggcttcccctctcttaccaaacatgggagaatccatactagtgagaaaccacgtgaatgtaatgaatgtgggaacgctttgatcagaggatgcatattattcagcatcagacagccgacactggggaggagccttatcaatgcagtgagtgtggcaagccttcagttacatactgattctttaagaaaatcagataacttgtactggagagaaatcctacaagtgtggtaagtatggaaaaatcttcagttgtatctcttcctttactaagcatcaagaacacatactagagagaggccctatgaaagcaggaaatagaggaaggccttcagtcagggctcatcccttattaagcatcagaaaattcatacctgagaaaaacctgtgaatgtgggtaatgtgggagagccttcagccaaacctcattgctttataaaccccttagaactctccctactagctggaaactctggtgacgtgatgaatgtgggaagggctttggtggatgttccaccaaaacacgttagagaatttgtacattagagaatttgtgctagagcaactcttcaaatttagtgaaactgggaaaacccattagtagagttcaagcttcagtattcatctcaaagagaaaccttgggaacatgatgaatgtgaggaaagttcctttccaacttgagatgtataaaactagagctgaaaagaagctgagaaatcaccttgtctggtgattttctgcctggtggggccatttgtataacgacacttgtgcattgcctcctcatgctgttactgacggggcagggtgtcatgcatgggtgcagaggatggaggctgagaaaggtagacagctacccatgatctagcccagtcgtattttagagctaataaaactgatgttcagaaagtgacatgccttggcctatagtcctaactgggctgggcctctttcctgtggttcacagctgtagtatggagattaatagactggatctttgcagtacaacacctctatgcacttctttctctgtagcacatgttacctttctttgtgaggcaatggagtggtctaggattgagcaaaaagcaatttttgttacatctttatgctaatagatttggaatttttgaaatgaaatgaaaccttgtttaaacattaaaattactaaaataggctgggcgcggtggctcacgcctgtaacctcagcactttgggaggccgaggcggacagatcacgaggtcaggagttcgagaccatcctggctaacacagtgaaaccctgtctctcctaaaaatacaaaaaaattagccaggcatggtggcgggcgcctgtagtcccagctacttggaaggctgagacaggagaatggcgtgaatcggggaggcagagcttgcagtcagccgagatcacgccactgcactccagcctgggagacagagtgagactccgtctcagaaaaaaaaaaaaaaaacaactaaaatatgggtattatgcacaatccagatctcaaaaacgtgattctaagtgaaagaaggcagatgccagagaccaggtattttctagtaccattttaggaaatgtccagaaatggcagatcttcagaaacaaagtaactgcaaatgttacaaggaatctttttagggtgacgaaaatgttctaaaactagatggtggtgatggttgaacgatttggtaacttcactaaaaatcattgaattgttcactttatatgggcagattttatggtaaatatacctcaataaaatcatttttcaaaatcaaatttacacatataccaaccattgctaaacaagtattcctgttttgtttgttacttcaagccatctatgcatttttggtatcactttttattttctgtaacagttacccctacatttactgggtctcagaaccttgtcaggctctgctttaaagttcctaccatgttggctctgtaactcaggtggagaagcctagaccaggagctggcgtagaccaaaggatacttgcctaataaggattagcttatactgaggaaaatactttaagcatttaaagtccagatgaggaagttgagcccagaattcagggaaccagctcaaagtgggcccatgcagacaggctgggtctaagagtccacaaggttggccagggcaggtaggatgcacaggaggcatctggatctggaagtacttggacagctgaggtcaagatcacacagaaatttattcctggacagccaaggtttacaggagcagaaatagcaaatattttcttgctccgtctctcccttttttcccagtgcccttttctgtacctacccagatcactttatacctagacatctgtcacaattttgtaactggtcttcgtcc

SEQ ID NO: 418881 - DNA, 3277 bp, Homo sapiens
acaggatccaaaatggcagcgctgtcgccttagctgggagagcgagccgttgtggctgtttgggagacttatggtcaccctgaagtactgcctgcctctagtgtcgcgtccctccagtatccgatgggagcgccgtccgcagggaatgtgtctctctgatcatggtgcctcgtgtccagctctggggaagaccgagacgaaatcgagtcagctggcgttgggagagggcttatttccgcttccgcttgcccactttcaggaatttgattctgagagcagggctgcggttccaggcagggtttgtacacatatttgcgttggaaggagagaggagcctaggacacatatgtattaactgtgcagctggtccgactcccgacagcttcagcgcacaccagccagccttggagttgctggaacggccctggctgcaagctggaatcacccggagagctttcgacattgatgcctgaggcccagctgtggagcgacagtttgaaaagagctgcaggtgactctaatgtgcagctaaagctaggaaccactgagctacatctcagggaagactgaaaattacaaagaatatgataaaatcttacttcaggaacaaagctacgtttttccagcttccccttctcagaatcctgctcttcctccagagagattcccaggagaagagggaacaaccaattcattcctgaaagccaggcctcgggacctgatgacatttgaagatgtggctgtggaattcagccagtgggagtgggggcagctgaaccctgctcagaaggacctctacagggaggtgatgctggagaacttcaggaacttggccattctgggccttctagtatccaaaccatatgtgatctgccagttggaggaagggggtgagcccttcatggtggagagagaaatctcaacaggagcccactcagactggaagagaaggtctaaatccaaggaatcaatgccaagttggggaatttccaaagaagaattattccaggtagtatcagtggaaaaacacattcaagatgtgctgcagttctcgaagttgaaagcagcctgcggttgtgatggccagttagagatgcagcagataaaacaggagagacacctgaaacaaatgtcaaccattcacaaatctgccaccacccttagcagagattataaatggaatggatttgggagaagcttaggtttaagatcagtccttgttaaccaacacagcattctcatgggagaaggatcttataaatgtgatacagaattcaggcagactttagggggaaacaactctcagagaacccacccagaaaagaaatcttgtaaatgtaatgagtgtgggaagtcctttcacttccagtcagaacttaggcgccatcagcgatgtcacactggagaaaagccgtatgaatgcagtgactgtggaagagcctttggtcatatttcatcccttattaaacatcaaagaactcatactggagaaaagccctatgaatgcagtgaatgtgggagagccttcagccagagttcgtctcttgttctgcactatagatttcacactggagagaaaccctacaaatgtaatgaatgtggacgagcctttggtcacacttcatcccttattaagcatcagaggactcatactggagaaaagccctatgaatgccgggaatgtgggagaaccttcagccagagctcatcactcattgtgcattacagatttcatactggagagaaaccttacaaatgtaataaatgtgggagagccttcagccagagttcatctctcactcaacattacagatttcacactggagagaaaccctacaaatgtaatgagtgtggaagggcctttgctcatactgcatcccttattaaacatcagagaagtcatgctggaaaaaaaaccctataaattcagtgaatatagaagggctttcagctggagtgcagacatcactggaacttaaagaattcatatcagagagagatcctaaaggtgtaatgtatgtgggaagaccacatcttgttccacatcaggcaataattactaaagagaatccctgtcaatgtcaagagggggtgggcttcccctctcttaccaaacatgggagaatccatactagtgagaaaccacgtgaatgtaatgaatgtgggaacgctttgatcagaggatgcatattattcagcatcagacagccgacactggggaggagccttatcaatgcagtgagtgtggcaagccttcagttacatactgattctttaagaaaatcagataacttgtactggagagaaatcctacaagtgtggtaagtatggaaaaatcttcagttgtatctcttcctttactaagcatcaagaacacatactagagagaggccctatgaaagcaggaaatagaggaaggccttcagtcagggctcatcccttattaagcatcagaaaattcatacctgagaaaaacctgtgaatgtgggtaatgtgggagagccttcagccaaacctcattgctttataaaccccttagaactctccctactagctggaaactctggtgacgtgatgaatgtgggaagggctttggtggatgttccaccaaaacacgttagagaatttgtacattagagaatttgtgctagagcaactcttcaaatttagtgaaactgggaaaacccattagtagagttcaagcttcagtattcatctcaaagagaaaccttgggaacatgatgaatgtgaggaaagttcctttccaacttgagatgtataaaactagagctgaaaagaagctgagaaatcaccttgtctggtgattttctgcctggtggggccatttgtataacgacacttgtgcattgcctcctcatgctgttactgacggggcagggtgtcatgcatgggtgcagaggatggaggctgagaaaggtagacagctacccatgatctagcccagtcgtattttagagctaataaaactgatgttcagaaagtgacatgccttggcctatagtcctaactgggctgggcctctttcctgtggttcacagctgtagtatggagattaatagactggatctttgcagtacaacacctctatgcacttctttctctgtagcacatgttacctttctttgtgaggcaatggagtggtctaggattgagcaaaaagcaatttttgttacatctttatgctaatagatttggaatttttgaaatgaaatgaaaccttgtttcattttactgaggcggacagatcacgaggtcg

SEQ ID NO: 418882 - DNA, 2361 bp, Homo sapiens
acaggatccaaaatggcagcgctgtcgccttagctgggagagcgagccgttgtggctgtttgggagacttatggtcaccctgaagtactgcctgcctctagtgtcgcgtccctccagtatccgatgggagcgccgtccgcagggaatgtgtctctctgatcatggtgcctcgtgtccagctctggggaagaccgagacgaaatcgagtcagctggcgttgggagagggcttatttccgcttccgcttgcccactttcaggaatttgattctgagagcagggctgcggttccaggcagggtttgtacacatatttgcgttggaaggagagaggagcctaggacacatatgtattaactgtgcagctggtccgactcccgacagcttcagcgcacaccagccagccttggagttgctggaacggccctggctgcaagctggaatcacccggagagctttcgacattgatgcctgaggcccagctgtggagcgacagtttgaaaagagctgcaggtgactctaatgtgcagctaaagctaggaaccactgagctacatctcagggaagactgaaaattacaaagaatatgataaaatcttacttcaggaacaaagctacgtttttccagcttccccttctcagaatcctgctcttcctccagagagattcccaggagaagagggaacaaccaattcattcctgaaagccaggcctcgggacctgatgacatttgaagatgtggctgtggaattcagccagtgggagtgggggcagctgaaccctgctcagaaggacctctacagggaggtgatgctggagaacttcaggaacttggccattctgggccttctagtatccaaaccatatgtgatctgccagttggaggaagggggtgagcccttcatggtggagagagaaatctcaacaggagcccactcagactggaagagaaggtctaaatccaaggaatcaatgccaagttggggaatttccaaagaagaattattccaggtagtatcagtggaaaaacacattcaagatgtgctgcagttctcgaagttgaaagcagcctgcggttgtgatggccagttagagatgcagcagataaaacaggagagacacctgaaacaaatgtcaaccattcacaaatctgccaccacccttagcagagattataaatggaatggatttgggagaagcttaggtttaagatcagtccttgttaaccaacacagcattctcatgggagaaggatcttataaatgtgatacagaattcaggcagactttagggggaaacaactctcagagaacccacccagaaaagaaatcttgtaaatgtaatgagtgtgggaagtcctttcacttccagtcagaacttaggcgccatcagcgatgtcacactggagaaaagccgtatgaatgcagtgactgtggaagagcctttggtcatatttcatcccttattaaacatcaaagaactcatactggagaaaagccctatgaatgcagtgaatgtgggagagccttcagccagagttcgtctcttgttctgcactatagatttcacactggagagaaaccctacaaatgtaatgaatgtggacgagcctttggtcacacttcatcccttattaagcatcagaggactcatactggagaaaagccctatgaatgccgggaatgtgggagaaccttcagccagagctcatcactcattgtgcattacagatttcatactggagagaaaccttacaaatgtaataaatgtgggagagccttcagccagagttcatctctcactcaacattacagatttcacactggagagaaaccctacaaatgtaatgagtgtggaagggcctttgctcatactgcatcccttattaaacatcagagaagtcatgctggaaaaaaaaccctataaattcagtgaatatagaagggctttcagctggagtgcagacatcactggaacttaaagaattcatatcagagagagatcctaaaggtgtaatgtatgtgggaagaccacatcttgttccacatcaggcaataattactaaagagaatccctgtcaatgtcaagagggggtgggcttcccctctcttaccaaacatgggagaatccatactagtgagaaaccacgtgaatgtaatgaatgtgggaacgctttgatcagaggatgcatattattcagcatcagacagccgacactggggaggagccttatcaatgcagtgagtgtggcaagccttcagttacatactgattctttaagaaaatcagataacttgtactggagagaaatcctacaagtgtgagtctggaggcttgaccatagaccagcaaagaccccaaaa

SEQ ID NO: 418883 - DNA, 861 bp, Homo sapiens
ggctctgcctctgcaggatgaggcctggcccagtagagcaatgcttgagacagggtaaatctgtccagttctagagttcagtgataagaagcttactggccttaagatgaaacccatattctcttgctgagcacagtggcacacatctatagtcctagctgcttgggaggctgcggcagcaggattgcttgagccaaggagttcatcaaggctaaagtgtaccatgatcatacctataaatagtcactgcactccagcctggcaacacatgagaccctgtctcctaaaaaaaaacttctccaatagttttatcagcaaataaaggtgttttttaggcctctatattagtttattcattcttcatcttagttatattcacaacccagaatggaaaggaggtatgccatttattggaccttctcaagccccaacaaataaatatacttattcccaggttatacagccactaaatattaaatagatctgcgttctttctcattgtaggggtttagcaaacaaagtgctttgtatccaataacagaagaatagaaatatgcataccataccctgtccccattacttttagatcctatatcctttccatgaaacttcattttgatggtggttctggggttcaggtaaatttttgtttcagtgatggaaatatatgaaataaggatgagaggattgtgtttctatatgccttaaaactatacctctattccagcacttgcacttcactatgaaacagcaattatacgtatctttttcctacactaaactacaagttctcagaaggcctctagacacatgtgaggtacttgttaaacgcctgtggaataaatgatactcataaatctc

SEQ ID NO: 418884 - DNA, 147 bp, Homo sapiens
  misc_feature (1)..(1): n is a, c, g, or t
  misc_feature (3)..(3): n is a, c, g, or t
  misc_feature (5)..(7): n is a, c, g, or t
  misc_feature (10)..(10): n is a, c, g, or t
  misc_feature (13)..(13): n is a, c, g, or t
  misc_feature (15)..(16): n is a, c, g, or t
  misc_feature (140)..(141): n is a, c, g, or t
  misc_feature (143)..(143): n is a, c, g, or t
  misc_feature (145)..(145): n is a, c, g, or t
ncntnnnaantanannagacttggaactggagatgagaacagaatattatcttcctcatttttgtgtttttgttcaactctaatgtctgcaaagcacttgcgtatgtaatgatgctcagtgtcataggagcaggcagganntntnaa

SEQ ID NO: 418885 - DNA, 2475 bp, Homo sapiens
gcgtggcgaaggtcgctgctttcctgctacaacgggcctactttagctaaaacagaaacgtaaggccaggacgggtcaccctttgtgggcccctgaaaaatacaaaacgaagtttggagagagttgaaaggcgtttgggctgaccatggagatttttgtttcccaccctcctgcgaaagcgttcgcgctgccattggctctggctgagggcgagtccggaacctgtgcgccgcggaactttcggctctgaaatccaacttgcgctgggcgcatctttgccgcgcggtttccgggcggctcccttcccttgcatgctgcattgtgtcgggagttgctgacagccatggcgccgcaggtctggcgtcgacggaccctggagcggtgtctgacggaagtcggcaaagccacgggtcggcccgagtgcttcctcacgattcaagagggattggcatcaaagttcacttctttaacaaaagtgctttatgactttaataaaatattagagaatggtaggatccatggaagccccttgcaaaaacttgtgatagcaaattttgatgatgagcagatttggcaacaactggaattgcaaaatgaaccaattttacaatactttcagaatgcagttagtgaaacaattaatgatgaagatatcagtcttctcccagagagtgaagaacaggaacgtgaagaggatggttcagagatagaggctgatgacaaggaggacctagaagatttagaggaggaggaagtgtccgacatgggtaatgatgatcctgaaatgggtgagagagctgaaaactcaagcaaatctgatctgaggaaaagccccgttttcagtgatgaggattctgaccttgactttgatatcagcaaattggaacagcagagcaaggtgcaaaacaaaggacagggaaaaccaagagaaaagtccatagtagatgataaattcttcaaactctctgaaatggaggcctatttagaaaacatagaaaaagaagaggaacgaaaagatgataatgatgaggaggaggaagatattgatttttttgaagatattgattctgatgaagatgaagggggactgtttggaagtaaaaaacttaagtcaggtaaaagttccagaaatctgaaatacaaagatttttttgatccagttgaaagtgatgaagacataacaaatgttcatgatgatgagctggattcaaacaaagaagatgatgaaattgctgaagaagaagcagaagaactaagtatttcggaaacggatgaagatgatgaccttcaagaaaatgaagacaataaacaacataaagaaagcttgaaaagagtgacctttgctttaccagatgatgcggaaactgaagatacaggtgttttaaatgtaaagaaaaattctgatgaagttaaatcctcctttgaaaaaagacaggaaaagatgaatgaaaaaattgcatctttagaaaaagagttgttagaaaaaaagccgtggcagcttcagggggaagtgacagcacagaagaggccagagaacagcctcctggaggagaccctacactttgaccatgctgtccggatggcacctgtgattacagaggaaaccacccttcaactggaagatatcattaaacagaggataagagatcaggcttgggatgatgtagtacgtaaagaaaaacctaaagaggatgcatatgaatataaaaagcgtttaaccttagaccatgagaagagtaaattgagccttgctgaaatttatgaacaggagtacatcaaactcaaccagcaaaaaacagcagaagaagaaaatccagaacatgtagaaattcagaagatgatggattccctcttcttaaaattggatgccctctcaaacttccactttatccctaaaccgcctgtaccagagattaaagttgtgtcaaatctgccagccataaccatggaggaagtagccccagtgagtgttagtgatgcagctctcctggccccagaggagatcaaggagaaaaataaagctggagatataaaaacagctgctgaaaaaacagctacagacaagaaacgagagcgaaggaaaaagaaatatcaaaagcgtatgaaaataaaagagaaggagaagcggagaaaactgcttgaaaagagcagtgtagatcaagcagggaaatacagcaaaacagtagcttcggagaagttaaaacagctgaccaaaactggcaaagcttccttcataaaggatgaaggtaaagacaaggccttaaagtcctctcaagcattcttttctaaattacaagatcaagtaaaaatgcaaatcaatgatgcaaagaaaacagaaaagaaaaagaagaaaagacaggatatttctgttcataaattaaagctgtaatatattttgaatataatgtaaatattaatgtgtaagcttatattgtgtcattgttctgttttataataaaattcttgagaaccttc

SEQ ID NO: 418886 - DNA, 2329 bp, Homo sapiens
gcgtggcgaaggtcgctgctttcctgctacaacgggcctactttagctaaaacagaaacgtaaggccaggacgggtcaccctttgtgggcccctgaaaaatacaaaacgaagtttggagagagttgaaaggcgtttgggctgaccatggagatttttgtttcccaccctcctgcgaaagcgttcgcgctgccattggctctggctgagggcgagtccggaacctgtgcgccgcggaactttcggctctgaaatccaacttgcgctgggcgcatctttgccgcgcggtttccgggcggctcccttcccttgcatgctgcattgtgtcgggagttgctgacagccatggcgccgcaggtctggcgtcgacggaccctggagcggtgtctgacggaagtcggcaaagccacgggtcggcccgagtgcttcctcacgattcaagagggattggcatcaaagttcacttctttaacaaaagtgctttatgactttaataaaatattagagaatggtaggatccatggaagccccttgcaaaaacttgtgatagcaaattttgatgatgagcagatttggcaacaactggaattgcaaaatgaaccaattttacaatactttcagaatgcagttagtgaaacaattaatgatgaagatatcagtcttctcccagagagtgaagaacaggaacgtgaagaggatggttcagagatagaggctgatgacaaggaggacctagaagatttagaggaggaggaagtgtccgacatgggtaatgatgatcctgaaatgggtgagagagctgaaaactcaagcaaatctgatctgaggaaaagccccgttttcagtgatgaggattctgaccttgactttgatatcagcaaattggaacagcagagcaaggtgcaaaacaaaggacagggaaaaccaagagaaaagtccatagtagatgataaattcttcaaactctctgaaatggaggcctatttagaaaacatagaaaaagaagaggaacgaaaagatgataatgatgaggaggaggaagatattgatttttttgaagatattgattctgatgaagatgaagggggactgtttggaagtaaaaaacttaagtcaggtaaaagttccagaaatctgaaatacaaagatttttttgatccagttgaaagtgatgaagacataacaaatgttcatgatgatgagctggattcaaacaaagaagatgatgaaattgctgaagaagaagcagaagaactaagtatttcggaaacggatgaagatgatgaccttcaagaaaatgaagacaataaacaacataaagaaagcttgaaaagagtgacctttgctttaccagatgatgcggaaactgaagatacaggtgttttaaatgtaaagaaaaattctgatgaagttaaatcctcctttgaaaaaagacaggaaaagatgaatgaaaaaattgcatctttagaaaaagagttgttagaaaaaaagccgtggcagcttcagggggaagtgacagcacagaagaggccagagaacagcctcctggaggagaccctacactttgaccatgctgtccggatggcacctgtgattacagaggaaaccacccttcaactggaagatatcattaaacagaggataagagatcaggcttgggatgatgtagtacgtaaagaaaaacctaaagaggatgcatatgaatataaaaagcgtttaaccttagaccatgagaagagtaaattgagccttgctgaaatttatgaacaggagtacatcaaactcaaccagcaaaaaacagcagaagaagaaaatccagaacatgtagaaattcagaagatgatggattccctcttcttaaaattggatgccctctcaaacttccactttatccctaaaccgcctgtaccagagattaaagttgtgtcaaatctgccagccataaccatggaggaagtagccccagtgagtgttagtgatgcagctctcctggccccagaggagatcaaggagaaaaataaagctggagatataaaaacagctgctgaaaaaacagctacagacaagaaacgagagcgaaggaaaaagaaatatcaaaagcgtatgaaaataaaagagaaggagaagcggagaaaactgcttgaaaagagcagtgtagatcaagcagggaaatacagcaaaacagtagcttcggagaagttaaaacagctgaccaaaactggcaaagcttccttcataaaggatgaaggtaaagacaaggccttaaagtcctctcaagcattcttttctaaattacaagatcaagtaaaaatgcaaatcaatgatgcaaag

SEQ ID NO: 418887 - DNA, 946 bp, Homo sapiens
gtaaataccaaggtaattaaatttttaagttctgagtattagaggtaatggttactgtagctcctaaaatgcacatcacatctctggtaggtgctggaaccctcatggtactgctgcttttaattttgcttttggaatgtttctttgtagctgaagctttagtgatgagaagttagaaatactctcattgacctttagtgttttgtcctgtgatatatatcaagtcgcttagtttgacattgttgaacttatttcctaagcaaaaaacagcagaagaagaaaatccagaacatgtagaaattcagaagatgatggattccctcttcttaaaattggatgccctctcaaacttccactttatccctaaaccgcctgtaccagagattaaagttgtgtcaaatctgccagccataaccatggaggaagtagccccagtgagtgttagtgatgcagctctcctggccccagaggagatcaaggagaaaaataaagctggagatataaaaacagctgctgaaaaaacagctacagacaagaaacgagagcgaaggaaaaagaaatatcaaaagcgtatgaaaataaaagagaaggagaagcggagaaaactgcttgaaaagagcagtgtagatcaagcagggaaatacagcaaaacagtagcttcggagaagttaaaacagctgaccaaaactggcaaagcttccttcataaaggatgaaggtaaagacaaggccttaaagtcctctcaagcattcttttctaaattacaagatcaagtaaaaatgcaaatcaatgatgcaaagaaaacagaaaagaaaaagaagaaaagacaggatatttctgttcataaattaaagctgtaatatattttgaatataatgtaaatattaatgtgtaagcttatattgtgtcattgttctgttttataataaaattcttgagaaccttc

SEQ ID NO: 418888 - DNA, 2741 bp, Homo sapiens
gcgtggcgaaggtcgctgctttcctgctacaacgggcctactttagctaaaacagaaacgtaaggccaggacgggtcaccctttgtgggcccctgaaaaatacaaaacgaagtttggagagagttgaaaggcgtttgggctgaccatggagatttttgtttcccaccctcctgcgaaagcgttcgcgctgccattggctctggctgagggcgagtccggaacctgtgcgccgcggaactttcggctctgaaatccaacttgcgctgggcgcatctttgccgcgcggtttccgggcggctcccttcccttgcatgctgcattgtgtcgggagttgctgacagccatggcgccgcaggtctggcgtcgacggaccctggagcggtgtctgacggaagtcggcaaagccacgggtcggcccgagtgcttcctcacgattcaagagggattggcatcaaagttcacttctttaacaaaagtgctttatgactttaataaaatattagagaatggtaggatccatggaagccccttgcaaaaacttgtgatagcaaattttgatgatgagcagatttggcaacaactggaattgcaaaatgaaccaattttacaatactttcagaatgcagttagtgaaacaattaatgatgaagatatcagtcttctcccagagagtgaagaacaggaacgtgaagaggatggttcagagatagaggctgatgacaaggaggacctagaagatttagaggaggaggaagtgtccgacatgggtaatgatgatcctgaaatgggtgagagagctgaaaactcaagcaaatctgatctgaggaaaagccccgttttcagtgatgaggattctgaccttgactttgatatcagcaaattggaacagcagagcaaggtgcaaaacaaaggacagggaaaaccaagagaaaagtccatagtagatgataaattcttcaaactctctgaaatggaggcctatttagaaaacatagaaaaagaagaggaacgaaaagatgataatgatgaggaggaggaagatattgatttttttgaagatattgattctgatgaagatgaagggggactgtttggaagtaaaaaacttaagtcaggtaaaagttccagaaatctgaaatacaaagatttttttgatccagttgaaagtgatgaagacataacaaatgttcatgatgatgagctggattcaaacaaagaagatgatgaaattgctgaagaagaagcagaagaactaagtatttcggaaacggatgaagatgatgaccttcaagaaaatgaagacaataaacaacataaagaaagcttgaaaagagtgacctttgctttaccagatgatgcggaaactgaagatacaggtgttttaaatgtaaagaaaaattctgatgaagttaaatcctcctttgaaaaaagacaggaaaagatgaatgaaaaaattgcatctttagaaaaagagttgttagaaaaaaagccgtggcagcttcagggggaagtgacagcacagaagaggccagagaacagcctcctggaggagaccctacactttgaccatgctgtccggatggcacctgtgattacagaggaaaccacccttcaactggaagatatcattaaacagaggataagagatcaggcttgggatgatgtagtacgtaaagaaaaacctaaagaggatgcatatgaatataaaaagcgtttaaccttagaccatgagaagagtaaattgagccttgctgaaatttatgaacaggagtacatcaaactcaaccagcaaaaaacagcagaagaagaaaatccagaacatgtagaaattcagaagatgatggattccctcttcttaaaattggatgccctctcaaacttccactttatccctaaaccgcctgtaccagagattaaagttgtgtcaaatctgccagccataaccatggaggaagtagccccagtgagtgttagtgatgcagctctcctggccccagaggagatcaaggagaaaaataaagctggagatataaaaacagctgctgaaaaaacagctacagacaagaaacgagagcgaaggaaaaagaaatatcaaaagcgtatgaaaataaaagagaaggagaagcggagaaaactgcttgaaaagagcagtgtagatcaagcagggaaatacagcaaaacagtagcttcggagaagttaaaacagctgaccaaaactggcaaagcttccttcataaaggtaaggacaagggaaagaaaactgctcaaggggacctttgtgggggaagtggatagcaagtgctgggtgactggaatgtctgagccagctgacagcccacctgcgggatagagatgcatgatgctgactggctggaatcgcaacctttaatgttctagaatttttcatgtagggtcctcacaataacctgggtcctggcagcagcttgtcttccactcctttctctcttagattataagaacattgtagcagtgcagaatacctctatgctaactgattcagttttctgtaattctagtcctttttcatatttatggttgcatacattgttgtaatggtgatgtactatttttggcttttttcacttataagtacattttacagcataagcatgtggtgtttttaattgcaggatgaaggtaaagacaaggccttaaagtcctctcaagcattcttttctaaattacaagatcaagtaaaaatgcaaatcaatgatgcaaag

SEQ ID NO: 418889 - DNA, 1880 bp, Homo sapiens
gcgtggcgaaggtcgctgctttcctgctacaacgggcctactttagctaaaacagaaacgtaaggccaggacgggtcaccctttgtgggcccctgaaaaatacaaaacgaagtttggagagagttgaaaggcgtttgggctgaccatggagatttttgtttcccaccctcctgcgaaagcgttcgcgctgccattggctctggctgagggcgagtccggaacctgtgcgccgcggaactttcggctctgaaatccaacttgcgctgggcgcatctttgccgcgcggtttccgggcggctcccttcccttgcatgctgcattgtgtcgggagttgctgacagccatggcgccgcaggtctggcgtcgacggaccctggagcggtgtctgacggaagtcggcaaagccacgggtcggcccgagtgcttcctcacgattcaagagggattggcatcaaagttcacttctttaacaaaagtgctttatgactttaataaaatattagagaatggtaggatccatggaagccccttgcaaaaacttgtgatagcaaattttgatgatgagcagatttggcaacaactggaattgcaaaatgaaccaattttacaatactttcagaatgcagttagtgaaacaattaatgatgaagatatcagtcttctcccagagagtgaagaacaggaacgtgaagaggatggttcagagatagaggctgatgacaaggaggacctagaagatttagaggaggaggaagtgtccgacatgggtaatgatgatcctgaaatgggtgagagagctgaaaactcaagcaaatctgatctgaggaaaagccccgttttcagtgatgaggattctgaccttgactttgatatcagcaaattggaacagcagagcaaggtgcaaaacaaaggacagggaaaaccaagagaaaagtccatagtagatgataaattcttcaaactctctgaaatggaggcctatttagaaaacatagaaaaagaagaggaacgaaaagatgataatgatgaggaggaggaagatattgatttttttgaagatattgattctgatgaagatgaagggggactgtttggaagtaaaaaacttaagtcaggtaaaagttccagaaatctgaaatacaaagatttttttgatccagttgaaagtgatgaagacataacaaatgttcatgatgatgagctggattcaaacaaagaagatgatgaaattgctgaagaagaagcagaagaactaagtatttcggaaacggatgaagatgatgaccttcaagaaaatgaagacaataaacaacataaagaaagcttgaaaagagtgacctttgctttaccagatgatgcggaaactgaagatacaggtgttttaaatgtaaagaaaaattctgatgaagttaaatcctcctttgaaaaaagacaggaaaagatgaatgaaaaaattgcatctttagaaaaagagttgttagaaaaaaagccgtggcagcttcagggggaagtgacagcacagaagaggccagagaacagcctcctggaggagaccctacactttgaccatgctgtccggatggcacctgtgatactcacattccttgaagctatgagcatttaaaaactgtttacagccaccatagggattcaaaagaatttggaataaactttgaagttttggattttacttatttttatccccaaattgttgctattttttaggatctgaaacaaaatctttctaaaacattgttttagttgtcaaagcaccaacaggacattttgggatgtgaaatgtaatttcttggaatctgtaatttgtacttaatatttcaggcttgtatttaatataataaataggtgtttgtaattgtgtc

SEQ ID NO: 418890 - DNA, 204 bp, Homo sapiens
ggaagtcatcgacagaataaaaagatggcaagaacagaatcgtagaacagtacgtttcttgctttcccactttttaaattattttttgcttttacacaaatataagattttattttctaaatgtatactagttattttatctctttcttagatgaatgaatgaaaaaattgcatctttagaaaaagagttgttagaaaaaaagc

SEQ ID NO: 418891 - DNA, 955 bp, Homo sapiens
taagcttgatatcgaattcggcacgagaggagaccctacactttgaccatgctgtccggatggcacctgtgattacagaggaaaccacccttcaactggaagatatcattaaacagaggataagagatcaggcttgggatgatgtagtacgtaaagaaaaacctaaagaggatgcatatgaatataaaaagcgtttaaccttagaccatgagaagagtaaattgagccttgctgaaatttatgaacaggagtacatcaaactcaaccagcaaaaaacagcagaagaagaaaatccagaacatgtagaaattcagaagatgatggattccctcttcttaaaattggatgccctctcaaacttccactttatccctaaaccgcctgtaccagagattaaagttgtgtcaaatctgccagccataaccatggaggaagtagccccagtgagtgttagtgatgcagctctcctggccccagaggagatcaaggagaaaaataaagctggagatataaaaacagctgctgaaaaaacagctacagacaagaaacgagagcgaaggaaaaagaaatatcaaaagcgtatgaaaataaaagagaaggagaagcggagaaaactgcttgaaaagagcagtgtagatcaagcagggaaatacagcaaaacagtagcttcggagaagttaaaacagctgaccaaaactggcaaagcttccttcataaaggatgaaggtaaagacaaggccttaaagtcctctcaagcattcttttctaaattacaagatcaagtaaaaatgcaaatcaatgatgcaaagaaaacagaaaagaaaaagaagaaaagacaggatatttctgttcataaattaaagctgtaatatattttgaatataatgtaaatattaatgtgtaagcttatattgtgtcattgttctgttttataataaaattcttgagaaccttc

SEQ ID NO: 418892 - DNA, 1209 bp, Homo sapiens
  misc_feature (295)..(295): n is a, c, g, or t
tcgaattcgacggtttctcgacagggggtgattctgtcccccagggaacacgttttagtctcacgactggtggagggtgctcctggcatctagtgagtacaggacagagatgctgctaaacatcctgcagtgtccagaacagccccctacaataaagaattatttgttccaatagggtcaatgtccacagtgctgaacaaagtggagaaaccctggtctaatctaacttttagtacatacaatggaggaagtggttgtcccaagaaggaaagtggcttccctgaggtcacacagngagtcagaggtagattgtgcaagttaaggccatgctttctcttagttcattgaaagaccattgtgccctgggctttatcatgcagcaggagcttgggatgatgtagtacgtaaagaaaaacctaaagaggatgcatatgaatataaaaagcgtttaaccttagaccatgagaagagtaaattgagccttgctgaaatttatgaacaggagtacatcaaactcaaccagcaaaaaacagcagaagaagaaaatccagaacatgtagaaattcagaagatgatggattccctcttcttaaaattggatgccctctcaaacttccactttatccctaaaccgcctgtaccagagattaaagttgtgtcaaatctgccagccataaccatggaggaagtagccccagtgagtgttagtgatgcagctctcctggccccagaggagatcaaggagaaaaataaagctggagatataaaaacagctgctgaaaaaacagctacagacaagaaacgagagcgaaggaaaaagaaatatcaaaagcgtatgaaaataaaagagaaggagaagcggagaaaactgcttgaaaagagcagtgtagatcaagcagggaaatacagcaaaacagtagcttcggagaagttaaaacagctgaccaaaactggcaaagcttccttcataaaggatgaaggtaaagacaaggccttaaagtcctctcaagcattcttttctaaattacaagatcaagtaaaaatgcaaatcaatgatgcaaagaaaacagaaaagaaaaagaagaaaagacaggatatttctgttcataaattaaagctgtaatatattttgaatataatgtaaatattaatgtgtaagcttatattgtgtcattgttctgttttataataaaattcttgagaaccttc

SEQ ID NO: 418893 - DNA, 2436 bp, Homo sapiens
gcgtggcgaaggtcgctgctttcctgctacaacgggcctactttagctaaaacagaaacgtaaggccaggacgggtcaccctttgtgggcccctgaaaaatacaaaacgaagtttggagagagttgaaaggcgtttgggctgaccatggagatttttgtttcccaccctcctgcgaaagcgttcgcgctgccattggctctggctgagggcgagtccggaacctgtgcgccgcggaactttcggctctgaaatccaacttgcgctgggcgcatctttgccgcgcggtttccgggcggctcccttcccttgcatgctgcattgtgtcgggagttgctgacagccatggcgccgcaggtctggcgtcgacggaccctggagcggtgtctgacggaagtcggcaaagccacgggtcggcccgagtgcttcctcacgattcaagagggattggcatcaaagttcacttctttaacaaaagtgctttatgactttaataaaatattagagaatggtaggatccatggaagccccttgcaaaaacttgtgatagcaaattttgatgatgagcagatttggcaacaactggaattgcaaaatgaaccaattttacaatactttcagaatgcagttagtgaaacaattaatgatgaagatatcagtcttctcccagagagtgaagaacaggaacgtgaagaggatggttcagagatagaggctgatgacaaggaggacctagaagatttagaggaggaggaagtgtccgacatgggtaatgatgatcctgaaatgggtgagagagctgaaaactcaagcaaatctgatctgaggaaaagccccgttttcagtgatgaggattctgaccttgactttgatatcagcaaattggaacagcagagcaaggtgcaaaacaaaggacagggaaaaccaagagaaaagtccatagtagatgataaattcttcaaactctctgaaatggaggcctatttagaaaacatagaaaaagaagaggaacgaaaagatgataatgatgaggaggaggaagatattgatttttttgaagatattgattctgatgaagatgaagggggactgtttggaagtaaaaaacttaagtcaggtaaaagttccagaaatctgaaatacaaagatttttttgatccagttgaaagtgatgaagacataacaaatgttcatgatgatgagctggattcaaacaaagaagatgatgaaattgctgaagaagaagcagaagaactaagtatttcggaaacggatgaagatgatgaccttcaagaaaatgaagacaataaacaacataaagaaagcttgaaaagagtgacctttgctttaccagatgatgcggaaactgaagatacaggtgttttaaatgtaaagaaaaattctgatgaagttaaatcctcctttgaaaaaagacaggaaaagatgaatgaaaaaattgcatctttagaaaaagagttgttagaaaaaaagccgtggcagcttcagggggaagtgacagcacagaagaggccagagaacagcctcctggaggagaccctacactttgaccatgctgtccggatggcacctgtgattacagaggaaaccacccttcaactggaagatatcattaaacagaggataagagatcaggcttgggatgatgtagtacgtaaagaaaaacctaaagaggatgcatatgaatataaaaagcgtttaaccttagaccatgagaagagtaaattgagccttgctgaaatttatgaacaggagtacatcaaactcaaccagcaaaaaacagcagaagaagaaaatccagaacatgtagaaattcagaagatgatggattccctcttcttaaaattggatgccctctcaaacttccactttatccctaaaccgcctgtaccagagattaaagttgtgtcaaatctgccagccataaccatggaggaagtagccccagtgagtgagaaaaataaagctggagatataaaaacagctgctgaaaaaacagctacagacaagaaacgagagcgaaggaaaaagaaatatcaaaagcgtatgaaaataaaagagaaggagaagcggagaaaactgcttgaaaagagcagtgtagatcaagcagggaaatacagcaaaacagtagcttcggagaagttaaaacagctgaccaaaactggcaaagcttccttcataaaggatgaaggtaaagacaaggccttaaagtcctctcaagcattcttttctaaattacaagatcaagtaaaaatgcaaatcaatgatgcaaagaaaacagaaaagaaaaagaagaaaagacaggatatttctgttcataaattaaagctgtaatatattttgaatataatgtaaatattaatgtgtaagcttatattgtgtcattgttctgttttataataaaattcttgagaaccttc

SEQ ID NO: 418894 - DNA, 2887 bp, Homo sapiens
gcgtggcgaaggtcgctgctttcctgctacaacgggcctactttagctaaaacagaaacgtaaggccaggacgggtcaccctttgtgggcccctgaaaaatacaaaacgaagtttggagagagttgaaaggcgtttgggctgaccatggagatttttgtttcccaccctcctgcgaaagcgttcgcgctgccattggctctggctgagggcgagtccggaacctgtgcgccgcggaactttcggctctgaaatccaacttgcgctgggcgcatctttgccgcgcggtttccgggcggctcccttcccttgcatgctgcattgtgtcgggagttgctgacagccatggcgccgcaggtctggcgtcgacggaccctggagcggtgtctgacggaagtcggcaaagccacgggtcggcccgagtgcttcctcacgattcaagagggattggcatcaaagttcacttctttaacaaaagtgctttatgactttaataaaatattagagaatggtaggatccatggaagccccttgcaaaaacttgtgatagcaaattttgatgatgagcagatttggcaacaactggaattgcaaaatgaaccaattttacaatactttcagaatgcagttagtgaaacaattaatgatgaagatatcagtcttctcccagagagtgaagaacaggaacgtgaagaggatggttcagagatagaggctgatgacaaggaggacctagaagatttagaggaggaggaagtgtccgacatgggtaatgatgatcctgaaatgggtgagagagctgaaaactcaagcaaatctgatctgaggaaaagccccgttttcagtgatgaggattctgaccttgactttgatatcagcaaattggaacagcagagcaaggtgcaaaacaaaggacagggaaaaccaagagaaaagtccatagtagatgataaattcttcaaactctctgaaatggaggcctatttagaaaacatagaaaaagaagaggaacgaaaagatgataatgatgaggaggaggaagatattgatttttttgaagatattgattctgatgaagatgaagggggactgtttggaagtaaaaaacttaagtcaggtaaaagttccagaaatctgaaatacaaagatttttttgatccagttgaaagtgatgaagacataacaaatgttcatgatgatgagctggattcaaacaaagaagatgatgaaattgctgaagaagaagcagaagaactaagtatttcggaaacggatgaagatgatgaccttcaagaaaatgaagacaataaacaacataaagaaagcttgaaaagagtgacctttgctttaccagatgatgcggaaactgaagatacaggtgttttaaatgtaaagaaaaattctgatgaagttaaatcctcctttgaaaaaagacaggaaaagatgaatgaaaaaattgcatctttagaaaaagagttgttagaaaaaaagccgtggcagcttcagggggaagtgacagcacagaagaggccagagaacagcctcctggaggagaccctacactttgaccatgctgtccggatggcacctgtgattacagaggaaaccacccttcaactggaagatatcattaaacagaggataagagatcaggcttgggatgatgtagtacgtaaagaaaaacctaaagaggatgcatatgaatataaaaagcgtttaaccttagaccatgagaagagtaaattgagccttgctgaaatttatgaacaggagtacatcaaactcaaccagcaaaaaacagcagaagaagaaaatccagaacatgtagaaattcagaagatgatggattccctcttcttaaaattggatgccctctcaaacttccactttatccctaaaccgcctgtaccagagattaaagttgtgtcaaatctgccagccataaccatggaggaagtagccccagtgagtgttagtgatgcagctctcctggccccagaggagatcaaggagaaaaataaagctggagatataaaaacagctgctgaaaaaacagctacagacaagaaacgagagcgaaggaaaaagaaatatcaaaagcgtatgaaaataaaagagaaggagaagcggagaaaactgcttgaaaagagcagtgtagatcaagcagggaaatacagcaaaacagtagcttcggagaagttaaaacagctgaccaaaactggcaaagcttccttcataaaggtaaggacaagggaaagaaaactgctcaaggggacctttgtgggggaagtggatagcaagtgctgggtgactggaatgtctgagccagctgacagcccacctgcgggatagagatgcatgatgctgactggctggaatcgcaacctttaatgttctagaatttttcatgtagggtcctcacaataacctgggtcctggcagcagcttgtcttccactcctttctctcttagattataagaacattgtagcagtgcagaatacctctatgctaactgattcagttttctgtaattctagtcctttttcatatttatggttgcatacattgttgtaatggtgatgtactatttttggcttttttcacttataagtacattttacagcataagcatgtggtgtttttaattgcaggatgaaggtaaagacaaggccttaaagtcctctcaagcattcttttctaaattacaagatcaagtaaaaatgcaaatcaatgatgcaaagaaaacagaaaagaaaaagaagaaaagacaggatatttctgttcataaattaaagctgtaatatattttgaatataatgtaaatattaatgtgtaagcttatattgtgtcattgttctgttttataataaaattcttgagaaccttc

SEQ ID NO: 418895 - DNA, 867 bp, Homo sapiens
tagttatttcactttcttccgcagcaaggatgcatggtaaatgcctagcacataacaggttctccattaatgagagttgttagtgttattgagtgcaaaactcagcttggagcttctagcagccaagaccaaaagggaggagttggtcacatcttggccccctcctccaccccccagtccagcattcttttccttgcctgctgctcaatctttggctgcttcatgagtaccccatccccaccatgtacaagctcttctgtgggctaagctgcctggggtgggcctgactataatccccctctgctcctccaccaggagtcctggagatggagcgcttacactacatccaccacaacgagaccgtgtcccagcagattggggaggtcctgtacaacgcggcaccactgtccatctggtggcagatccctcagtacctgctcattgggatcagtgagatctttgccagcatcccaggtaccctggatcccctcccctgctcctgcaccagtgatgggctctgcccggtggcacctcaaagtcaggtaccccagggatgcagcctccagggcccatctgcatggaggaaggcagtgttttctgaccagggctcattcacccaacgggggtctataattagcacctggttcaagtcagcccctatgtgacaggcactggggatttggaggcgagcaagaaacttcccacaccagctctccacgtattcccctggtgccaggttctccaccctctgtgtctttgaagttgctgttccctctaccttagactgaaggtgaactccaatatccccttcaattctgagcctaaataccaaggtccttgggcagaaggggtcctcccttcccgccc

SEQ ID NO: 418896 - DNA, 1463 bp, Homo sapiens
acccaagaagtgtctctgtaggagggaggggtatgggtacagagagtgccccggacccctttggccctcactgtcaccccttcctgaatggcaggtgatggatctcggccgcgacgccacccgccgcttcttcaactggttttactggagcatcaacctgggtgctgtgctgtcgctgctggtggtggcgtttattcagcagattggggaggtcctgtacaacgcggcaccactgtccatctggtggcagatccctcagtacctgctcattgggatcagtgagatctttgccagcatcccaggcctggagtttgcctactcagaggccccgcgctccatgcaagcccccgatgggcagccaagtgtcctctatgcttaagctcgctctccaaaactgctgcccccagctgtggcaacgacactcggccagagaccgtcaatgtgcccgcgtgctggccgacgagaggtctccccagccaggggcttccccgcaagaggacatcgccaacttccaggtgctggtgaagatcttgcccgtcatggtgaccctggtgccctactggatggtctacttccagatgcagtccacctatgtcctgcagggtcttcacctccacatcccaaacattttcccagccaacccggccaacatctctgtggccctgagagcccagggcagcagctacacgatcccggaagcctggctcctcctggccaatgttgtggtggtgctgattctggtccctctgaaggaccgcttgatcgaccctttactgctgcggtgcaagctgcttccctctgctctgcagaagatggcgctggggatgttctttggttttacctccgtcattgtggcaggagtcctggagatggagcgcttacactacatccaccacaacgagaccgtgtcccagcagattggggaggtcctgtacaacgcggcaccactgtccatctggtggcagatccctcagtacctgctcattgggatcagtgagatctttgccagcatcccaggcctggagtttgcctactcagaggccccgcgctccatgcagggcgccatcatgggcatcttcttctgcctgtcgggggtgggctcactgttgggctccagcctagtggcactgctgtccttgcccgggggctggctgcactgccccaaggactttgggaacatcaacaattgccggatggacctctacttcttcctgctggctggcattcaggccgtcacggctctcctatttgtctggatcgctggacgctatgagagggcgtcccagggcccagcctcccacagccgtttcagcagggacaggggctgaacaggccctattccagcccccttgcttcactctaccggacagacggcagcagtcccagctctggtttccttctcggtttattctgttagaatgaaatggttcccataaataaggggcatgagcccttcctcacga

SEQ ID NO: 418897 - DNA, 2695 bp, Homo sapiens
ggagttgagaattagggaggaggtggtagagtccgggtagtgagcggagggacaggaagggtagggcaagaaagggagaggggacaggagggaagggtgggccaaagcggtgagaaaggagggccagccagttgggtgggggagagggccgaggcccgggggcaggagtgcagggctctgaggcggggagaggagaggagagaagagccgcggggggcccagcccggagccaggatgcccgcgccgcgcgcccgggagcagccccgcgtgcccggggagcgccagccgctgctgcctcgcggtgcgcggggccctcgacggtggcggcgggcggcgggcgcggccgtgctgctggtggagatgctggagcgcgccgccttcttcggcgtcaccgccaacctcgtgctgtacctcaacagcaccaacttcaactggaccggcgagcaggcgacgcgcgccgcgctggtattcctgggcgcctcctacctgctggcgcccgtgggcggctggctggccgacgtgtacctgggccgctaccgcgcggtcgcgctcagcctgctgctctacctggccgcctcgggcctgctgcccgccaccgccttccccgacggccgcagctccttctgcggagagatgcccgcgtcgccgctgggacctgcctgcccctcggccggctgcccgcgctcctcgcccagcccctactgcgcgcccgtcctctacgcgggcctgctgctactcggcctggccgccagctccgtccggagcaacctcacctccttcggtgccgaccaggtgatggatctcggccgcgacgccacccgccgcttcttcaactggttttactggagcatcaacctgggtgctgtgctgtcgctgctggtggtggcgtttattcagcagaacatcagcttcctgctgggctacagcatccctgtgggctgtgtgggcctggcatttttcatcttcctctttgccacccccgtcttcatcaccaagcccccgatgggcagccaagtgtcctctatgcttaagctcgctctccaaaactgctgcccccagctgtggcaacgacactcggccagagaccgtcaatgtgcccgcgtgctggccgacgagaggtctccccagccaggggcttccccgcaagaggacatcgccaacttccaggtgctggtgaagatcttgcccgtcatggtgaccctggtgccctactggatggtctacttccagatgcagtccacctatgtcctgcagggtcttcacctccacatcccaaacattttcccagccaacccggccaacatctctgtggccctgagagcccagggcagcagctacacgatcccggaagcctggctcctcctggccaatgttgtggtggtgctgattctggtccctctgaaggaccgcttgatcgaccctttactgctgcggtgcaagctgcttccctctgctctgcagaagatggcgctggggatgttctttggttttacctccgtcattgtggcaggagtcctggagatggagcgcttacactacatccaccacaacgagaccgtgtcccagcagattggggaggtcctgtacaacgcggcaccactgtccatctggtggcagatccctcagtacctgctcattgggatcagtgagatctttgccagcatcccaggcctggagtttgcctactcagaggccccgcgctccatgcagggcgccatcatgggcatcttcttctgcctgtcgggggtgggctcactgttgggctccagcctagtggcactgctgtccttgcccgggggctggctgcactgccccaaggactttgggaacatcaacaattgccggatggacctctacttcttcctgctggctggcattcaggccgtcacggctctcctatttgtctggatcgctggacgctatgagagggcgtcccagggcccagcctcccacagccgtttcagcagggacaggggctgaacaggccctattccagcccccttgcttcactctaccggacagacggcagcagtcccagctctggtttccttctcggtttattctgttagaatgaaatggttcccataaataaggggcatgagcccttcctcacgaccatggtccatgacaaggggcagggcagagggggcctggatgggagtccttgtgggggaccaggcaggggacttggatcaacaagcaccagacgagtggcgggggcaggcgagaggctcagtgggacctccaccctcgttgccccagctggtggctgaccaggtggctgtggagggtcaggagctgccccggatcctctccatgtagttgcgaagctcctcagggtccttcagccccatgtcctcacacacccagcggatgtcctcctcgcctgccacaaggatggactgcacagcaggggcccctacaggctcctcaggtgactgggctggaggggctggcacaaatgtcacaaactctactcgcttccgccgccccccagcctcctttcgggccagggtgcttgaggagctggtggtgcccccaggagggccaggggccaggtaggggcctcccctctctcccccatctcacaggggcagttcccctcccccttgggcgggccaggggactgccggtccagctggcggctcagttcctcctggtcagtgcccagccagacccagttgtggggctgggg

SEQ ID NO: 418898 - DNA, 2166 bp, Homo sapiens
ggagttgagaattagggaggaggtggtagagtccgggtagtgagcggagggacaggaagggtagggcaagaaagggagaggggacaggagggaagggtgggccaaagcggtgagaaaggagggccagccagttgggtgggggagagggccgaggcccgggggcaggagtgcagggctctgaggcggggagaggagaggagagaagagccgcggggggcccagcccggagccaggatgcccgcgccgcgcgcccgggagcagccccgcgtgcccggggagcgccagccgctgctgcctcgcggtgcgcggggccctcgacggtggcggcgggcggcgggcgcggccgtgctgctggtggagatgctggagcgcgccgccttcttcggcgtcaccgccaacctcgtgctgtacctcaacagcaccaacttcaactggaccggcgagcaggcgacgcgcgccgcgctggtattcctgggcgcctcctacctgctggcgcccgtgggcggctggctggccgacgtgtacctgggccgctaccgcgcggtcgcgctcagcctgctgctctacctggccgcctcgggcctgctgcccgccaccgccttccccgacggccgcagctccttctgcggagagatgcccgcgtcgccgctgggacctgcctgcccctcggccggctgcccgcgctcctcgcccagcccctactgcgcgcccgtcctctacgcgggcctgctgctactcggcctggccgccagctccgtccggagcaacctcacctccttcggtgccgaccaggtgatggatctcggccgcgacgccacccgccgcttcttcaactggttttactggagcatcaacctgggtgctgtgctgtcgctgctggtggtggcgtttattcagcagaacatcagcttcctgctgggctacagcatccctgtgggctgtgtgggcctggcatttttcatcttcctctttgccacccccgtcttcatcaccaagcccccgatgggcagccaagtgtcctctatgcttaagctcgctctccaaaactgctgcccccagctgtggcaacgacactcggccagagaccgtcaatgtgcccgcgtgctggccgacgagaggtctccccagccaggggcttccccgcaagaggacatcgccaacttccaggtgctggtgaagatcttgcccgtcatggtgaccctggtgccctactggatggtctacttccagatgcagtccacctatgtcctgcagggtcttcacctccacatcccaaacattttcccagccaacccggccaacatctctgtggccctgagagcccagggcagcagctacacgatcccggaagcctggctcctcctggccaatgttgtggtggtgctgattctggtccctctgaaggaccgcttgatcgaccctttactgctgcggtgcaagctgcttccctctgctctgcagaagatggcgctggggatgttctttggttttacctccgtcattgtggcaggagtcctggagatggagcgcttacactacatccaccacaacgagaccgtgtcccagcagattggggaggtcctgtacaacgcggcaccactgtccatctggtggcagatccctcagtacctgctcattgggatcagtgagatctttgccagcatcccaggcctggagtttgcctactcagaggccccgcgctccatgcagggcgccatcatgggcatcttcttctgcctgtcgggggtgggctcactgttgggctccagcctagtggcactgctgtccttgcccgggggctggctgcactgccccaaggactttgctgaagaggaattgtagacacccctggagatcttcaggaagtcaaacattaggaacatcaacaattgccggatggacctctacttcttcctgctggctggcattcaggccgtcacggctctcctatttgtctggatcgctggacgctatgagagggcgtcccagggcccagcctcccacagccgtttcagcagggacaggggctgaacaggccctattccagcccccttgcttcactctaccggacagacggcagcagtcccagctctggtttccttctcggtttattctgttagaatgaaatggttcccataaataaggggcatgagcccttcctcacga

SEQ ID NO: 418899 - DNA, 600 bp, Homo sapiens
ggggcagggtcaggggcagcaagcaggggcctgggcctgttctctgcgcctgcaccagcccctgagatcgtctctgctccccctctgcaggcctggagtttgcctactcagaggccccgcgctccatgcagggcgccatcatgggcatcttcttctgcctgtcgggggtgggctcactgttgggctccagcctagtggcactgctgtccttgcccgggggctggctgcactgccccaaggactttggtgagtatggggcctccccaggagtgggacatggatggagggaggcttggaaaggaggtggcaactgctaaagtgctttgactctggggagaagcaagtagagggctagacttgggagaatggggttctagcccgggcttggccagtcacccacagcgtggcctccctccttgggcctttctttccccaagtgttgaacttagtggacctccaaggctcctttctgcttctggaactctgccatctctggctgaagggttacctttctcatggtgtttatatttcacgcccccttctgaatagctgaagaggaattgtagacacccctggagatcttcaggaagtcaaacatta

SEQ ID NO: 418900 - DNA, 2115 bp, Homo sapiens
ggagttgagaattagggaggaggtggtagagtccgggtagtgagcggagggacaggaagggtagggcaagaaagggagaggggacaggagggaagggtgggccaaagcggtgagaaaggagggccagccagttgggtgggggagagggccgaggcccgggggcaggagtgcagggctctgaggcggggagaggagaggagagaagagccgcggggggcccagcccggagccaggatgcccgcgccgcgcgcccgggagcagccccgcgtgcccggggagcgccagccgctgctgcctcgcggtgcgcggggccctcgacggtggcggcgggcggcgggcgcggccgtgctgctggtggagatgctggagcgcgccgccttcttcggcgtcaccgccaacctcgtgctgtacctcaacagcaccaacttcaactggaccggcgagcaggcgacgcgcgccgcgctggtattcctgggcgcctcctacctgctggcgcccgtgggcggctggctggccgacgtgtacctgggccgctaccgcgcggtcgcgctcagcctgctgctctacctggccgcctcgggcctgctgcccgccaccgccttccccgacggccgcagctccttctgcggagagatgcccgcgtcgccgctgggacctgcctgcccctcggccggctgcccgcgctcctcgcccagcccctactgcgcgcccgtcctctacgcgggcctgctgctactcggcctggccgccagctccgtccggagcaacctcacctccttcggtgccgaccaggtgatggatctcggccgcgacgccacccgccgcttcttcaactggttttactggagcatcaacctgggtgctgtgctgtcgctgctggtggtggcgtttattcagcagaacatcagcttcctgctgggctacagcatccctgtgggctgtgtgggcctggcatttttcatcttcctctttgccacccccgtcttcatcaccaagcccccgatgggcagccaagtgtcctctatgcttaagctcgctctccaaaactgctgcccccagctgtggcaacgacactcggccagagaccgtcaatgtgcccgcgtgctggccgacgagaggtctccccagccaggggcttccccgcaagaggacatcgccaacttccaggtgctggtgaagatcttgcccgtcatggtgaccctggtgccctactggatggtctacttccagatgcagtccacctatgtcctgcagggtcttcacctccacatcccaaacattttcccagccaacccggccaacatctctgtggccctgagagcccagggcagcagctacacgatcccggaagcctggctcctcctggccaatgttgtggtggtgctgattctggtccctctgaaggaccgcttgatcgaccctttactgctgcggtgcaagctgcttccctctgctctgcagaagatggcgctggggatgttctttggttttacctccgtcattgtggcaggagtcctggagatggagcgcttacactacatccaccacaacgagaccgtgtcccagcagattggggaggtcctgtacaacgcggcaccactgtccatctggtggcagatccctcagtacctgctcattgggatcagtgagatctttgccagcatcccaggcctggagtttgcctactcagaggccccgcgctccatgcagggcgccatcatgggcatcttcttctgcctgtcgggggtgggctcactgttgggctccagcctagtggcactgctgtccttgcccgggggctggctgcactgccccaaggactttgggaacatcaacaattgccggatggacctctacttcttcctgctggctggcattcaggccgtcacggctctcctatttgtctggatcgctggacgctatgagagggcgtcccagggcccagcctcccacagccgtttcagcagggacaggggctgaacaggccctattccagcccccttgcttcactctaccggacagacggcagcagtcccagctctggtttccttctcggtttattctgttagaatgaaatggttcccataaataaggggcatgagcccttcctcacga

SEQ ID NO: 418901 - DNA, 1946 bp, Homo sapiens
ggagttgagaattagggaggaggtggtagagtccgggtagtgagcggagggacaggaagggtagggcaagaaagggagaggggacaggagggaagggtgggccaaagcggtgagaaaggagggccagccagttgggtgggggagagggccgaggcccgggggcaggagtgcagggctctgaggcggggagaggagaggagagaagagccgcggggggcccagcccggagccaggatgcccgcgccgcgcgcccgggagcagccccgcgtgcccggggagcgccagccgctgctgcctcgcggtgcgcggggccctcgacggtggcggcgggcggcgggcgcggccgtgctgctggtggagatgctggagcgcgccgccttcttcggcgtcaccgccaacctcgtgctgtacctcaacagcaccaacttcaactggaccggcgagcaggcgacgcgcgccgcgctggtattcctgggcgcctcctacctgctggcgcccgtgggcggctggctggccgacgtgtacctgggccgctaccgcgcggtcgcgctcagcctgctgctctacctggccgcctcgggcctgctgcccgccaccgccttccccgacggccgcagctccttctgcggagagatgcccgcgtcgccgctgggacctgcctgcccctcggccggctgcccgcgctcctcgcccagcccctactgcgcgcccgtcctctacgcgggcctgctgctactcggcctggccgccagctccgtccggagcaacctcacctccttcggtgccgaccaggtgatggatctcggccgcgacgccacccgccgcttcttcaactggttttactggagcatcaacctgggtgctgtgctgtcgctgctggtggtggcgtttattcagcagaacatcagcttcctgctgggctacagcatccctgtgggctgtgtgggcctggcatttttcatcttcctctttgccacccccgtcttcatcaccaagcccccgatgggcagccaagtgtcctctatgcttaagctcgctctccaaaactgctgcccccagctgtggcaacgacactcggccagagaccgtcaatgtgcccgcgtgctggccgacgagaggtctccccagccaggggcttccccgcaagaggacatcgccaacttccaggtgctggtgaagatcttgcccgtcatggtgaccctggtgccctactggatggtctacttccagatgcagtccacctatgtcctgcagggtcttcacctccacatcccaaacattttcccagccaacccggccaacatctctgtggccctgagagcccagggcagcagctacacggagtcctggagatggagcgcttacactacatccaccacaacgagaccgtgtcccagcagattggggaggtcctgtacaacgcggcaccactgtccatctggtggcagatccctcagtacctgctcattgggatcagtgagatctttgccagcatcccaggcctggagtttgcctactcagaggccccgcgctccatgcagggcgccatcatgggcatcttcttctgcctgtcgggggtgggctcactgttgggctccagcctagtggcactgctgtccttgcccgggggctggctgcactgccccaaggactttgggaacatcaacaattgccggatggacctctacttcttcctgctggctggcattcaggccgtcacggctctcctatttgtctggatcgctggacgctatgagagggcgtcccagggcccagcctcccacagccgtttcagcagggacaggggctgaacaggccctattccagcccccttgcttcactctaccggacagacggcagcagtcccagctctggtttccttctcggtttattctgttagaatgaaatggttcccataaataaggggcatgagcccttcctcacga

SEQ ID NO: 418902 - DNA, 994 bp, Homo sapiens
tgagcctggggggagggctgcaggggactgagaggggagtgtaggcagtgggggtgagggggacagggaggaggtggagaagacggcaaggggcagcagggtgactgggatgcagtccacctatgtcctgcagggtcttcacctccacatcccaaacattttcccagccaacccggccaacatctctgtggccctgagagcccagggcagcagctacacgatcccggaagcctggctcctcctggccaatgttgtggtggtgctgattctggtccctctgaaggaccgcttgatcgaccctttactgctgcggtgcaagctgcttccctctgctctgcagaagatggcgctggggatgttctttggttttacctccgtcattgtggcaggagtcctggagatggagcgcttacactacatccaccacaacgagaccgtgtcccagcagattggggaggtcctgtacaacgcggcaccactgtccatctggtggcagatccctcagtacctgctcattgggatcagtgagatctttgccagcatcccaggcctggagtttgcctactcagaggccccgcgctccatgcagggcgccatcatgggcatcttcttctgcctgtcgggggtgggctcactgttgggctccagcctagtggcactgctgtccttgcccgggggctggctgcactgccccaaggactttgggaacatcaacaattgccggatggacctctacttcttcctgctggctggcattcaggccgtcacggctctcctatttgtctggatcgctggacgctatgagagggcgtcccagggcccagcctcccacagccgtttcagcagggacaggggctgaacaggccctattccagcccccttgcttcactctaccggacagacggcagcagtcccagctctggtttccttctcggtttattctgttagaatgaaatggttcccataaataaggggcatgagcccttcctcacga

SEQ ID NO: 418903 - DNA, 2775 bp, Homo sapiens
ggcacgaggctacgagctgcccgatggccaggtcatcaccattggcaatgagcggttccggtgtccggaggcgctgttccagccttccttcctgggtatggaatcttgcggcatccacgagaccaccttcaactccatcatgaagtgtgacgtggacatccgcaaagacctgtacgccaacacggtgctgtcgggcggcaccaccatgtatccgggcattgccgacaggatgcagaaggagatcaccgccctggcgcccagcaccatgaagatcaagatcatcgcacccccacatctgctggaaggtggacccttggcgctgttggtggcggcggagacagctgtgaagtgtgaggttctttgtctgctggcagctaggggcgacgaggcgggacgtcatggaagtgaaggatgccaattctgcgcttctcagtaactacgaggtatttcagttactaactgatctgaaagagcagcgtaaagaaagtggaaagaataaacacagctctgggcaacagaacttgaacactatcacctatgaaacgttaaaatacatatcaaaaacaccatgcaggcaccagagtcctgaaattgtcagagaatttctcacagcattgaaaagccacaagttgaccaaagctgagaagctccagctgctgaaccaccggcctgtgactgctgtggagatccagctgatggtggaagagagtgaagagcggctcacggaggagcagattgaagctcttctccacaccgtcaccagcattctgcctgcagagccagaggctgagcagaagaagaatacaaacagcaatgtggcaatggacgaagaggacccagcatagaagagcacagctggccccggcgtttcatgaagtcagaaggcctggcagccatttcctggacgttgagaggattgtttatttgatttttatcctcatcccagcaggcctggctttgtggttagttgggtacatcacaaaaataagttaaaaagaaatatttgtgccttggggagaagaaacatggtgaaaacaggctgaggttgtcagggcagagagctgaaggtggggacagtgaccgcggacccctctgtgcttgaaagatttcctccacggcctttgccccagttgtggggaggtctctgtgcacagcggggaaaatgcttgtgtcgcctttggtgggccatgtcctaattagtttcatctgcttccctgggaacttactaaggggcccagagcactgttggaagtctggttagagtccccagagagttactctaagttaaaatgagccactgaccttggctcaccttagaggaatttcctcgagaacaacagagataagaaaagaaccggcctggccaatccttcaacagctctagagccccttttctctgctggcaggggctttgtttaccagctcactgtttaggctaaatgttagggaccagatcactgcagttgaaaacaggcactccaggcttagtgacagtggcagcagaaacagtgttggctgcctttctgaccaccccactttcctgccctgagacagcagcccagggcaggtgcttcatattcagaccaggtaagcctcatttgcacaacagtcaaattgtttgttcctttaaaaaggacacaattagcctggcacggtgactcatgcttgtaatcccagcactttgggagggcaaggcaggcggatcacctgaggtcaggagtttgagaccagcctcaccaacatggaaaaaccccatctctactaaaaaaatacaaaattaaccaggggtgatggcacattcctgtaatcccagctactcgggaggccgaggcaggagaatcgcttgaacccgggaggcagaggttgaggtgagccaagattgcaccattgcactccagcctgggcaacaagagcaaaacttcatctaaaaaacagaaaatattaagatgattaccatgtgaaaacctttttaatattcaggatttggaaagtatagttgccccaggcatgtggttgttgccttaggtcctgcgaatattgctgaaaatcggattttccacattcactttcttccctgttttagggaagaaaatgatcatagacattcgattttccaaattggcgctcttattttcaatgctaattggattacttctcttccaaccctcctgcccatccatccatcccagtccccaggcatcttaaccttaccatctgagcttcagctgaaatctgtttataggcaacattgaaagtaccagattggggccaggtgtagcggcccacacctgtaatcccagcactttgggaggcggaggctagcggatcatgaggtcaggagttcaagaccagcctggccaacatggtgaaacccccatctctactaaagatataaaaaactagccgagcgtggtgttgcatgcctgtgatcccagctactcgggaggctgaggcgggggaatcgcttgaacctctgcctcccagattcaagcgattctggtgccttagcctcctgagtagctgggacttacaggcacgtaccactataccctgctaaaatttgtatttttagtagagacagggttttgccatattggccaggctagtcgtaatgtctctttttaacactgaatatgttaggtggtttttcttgatggatttagggttaacctagttaataataaattgtttccaggtaattatcaagttttgtcattttataaatctgaagagttaatattgtcatcgatacaaataaagtgaaatctgactgag

SEQ ID NO: 418904 - DNA, 2542 bp, Homo sapiens
cgcgaggttccgggtccgccaagctcccggcatgcagcgcggcgatcccggcgagcaccttggcgcgcggagctggcaccttggcgctgttggtggcggcggagacagctgtgaagtgtgaggttctttgtctgctggcagctaggggcgacgaggcgggacgtcatggaagtgaaggatgccaattctgcgcttctcagtaactacgaggtatttcagttactaactgatctgaaagagcagcgtaaagaaagtggaaagaataaacacagctctgggcaacagaacttgaacactatcacctatgaaacgttaaaatacatatcaaaaacaccatgcaggcaccagagtcctgaaattgtcagagaatttctcacagcattgaaaagccacaagttgaccaaagctgagaagctccagctgctgaaccaccggcctgtgactgctgtggagatccagctgatggtggaagagagtgaagagcggctcacggaggagcagattgaagctcttctccacaccgtcaccagcattctgcctgcagagccagaggctgagcagaagaagaatacaaacagcaatgtggcaatggacgaagaggacccagcatagaagagcacagctggccccggcgtttcatgaagtcagaaggcctggcagccatttcctggacgttgagaggattgtttatttgatttttatcctcatcccagcaggcctggctttgtggttagttgggtacatcacaaaaataagttaaaaagaaatatttgtgccttggggagaagaaacatggtgaaaacaggctgaggttgtcagggcagagagctgaaggtggggacagtgaccgcggacccctctgtgcttgaaagatttcctccacggcctttgccccagttgtggggaggtctctgtgcacagcggggaaaatgcttgtgtcgcctttggtgggccatgtcctaattagtttcatctgcttccctgggaacttactaaggggcccagagcactgttggaagtctggttagagtccccagagagttactctaagttaaaatgagccactgaccttggctcaccttagaggaatttcctcgagaacaacagagataagaaaagaaccggcctggccaatccttcaacagctctagagccccttttctctgctggcaggggctttgtttaccagctcactgtttaggctaaatgttagggaccagatcactgcagttgaaaacaggcactccaggcttagtgacagtggcagcagaaacagtgttggctgcctttctgaccaccccactttcctgccctgagacagcagcccagggcaggtgcttcatattcagaccaggtaagcctcatttgcacaacagtcaaattgtttgttcctttaaaaaggacacaattagcctggcacggtgactcatgcttgtaatcccagcactttgggagggcaaggcaggcggatcacctgaggtcaggagtttgagaccagcctcaccaacatggaaaaaccccatctctactaaaaaaatacaaaattaaccaggggtgatggcacattcctgtaatcccagctactcgggaggccgaggcaggagaatcgcttgaacccgggaggcagaggttgaggtgagccaagattgcaccattgcactccagcctgggcaacaagagcaaaacttcatctaaaaaacagaaaatattaagatgattaccatgtgaaaacctttttaatattcaggatttggaaagtatagttgccccaggcatgtggttgttgccttaggtcctgcgaatattgctgaaaatcggattttccacattcactttcttccctgttttagggaagaaaatgatcatagacattcgattttccaaattggcgctcttattttcaatgctaattggattacttctcttccaaccctcctgcccatccatccatcccagtccccaggcatcttaaccttaccatctgagcttcagctgaaatctgtttataggcaacattgaaagtaccagattggggccaggtgtagcggcccacacctgtaatcccagcactttgggaggcggaggctagcggatcatgaggtcaggagttcaagaccagcctggccaacatggtgaaacccccatctctactaaagatataaaaaactagccgagcgtggtgttgcatgcctgtgatcccagctactcgggaggctgaggcgggggaatcgcttgaacctctgcctcccagattcaagcgattctggtgccttagcctcctgagtagctgggacttacaggcacgtaccactataccctgctaaaatttgtatttttagtagagacagggttttgccatattggccaggctagtcgtaatgtctctttttaacactgaatatgttaggtggtttttcttgatggatttagggttaacctagttaataataaattgtttccaggtaattatcaagttttgtcattttataaatctgaagagttaatattgtcatcgatacaaataaagtgaaatctgactgag

SEQ ID NO: 418905 - DNA, 2663 bp, Homo sapiens
ggcacgaggctacgagctgcccgatggccaggtcatcaccattggcaatgagcggttccggtgtccggaggcgctgttccagccttccttcctgggtatggaatcttgcggcatccacgagaccaccttcaactccatcatgaagtgtgacgtggacatccgcaaagacctgtacgccaacacggtgctgtcgggcggcaccaccatgtatccgggcattgccgacaggatgcagaaggagatcaccgccctggcgcccagcaccatgaagatcaagatcatcgcacccccacatctgctggaaggtggacccttggcgctgttggtggcggcggagacagctgtgaagtgtgaggttctttgtctgctggcagctaggggcgacgaggcgggacgtcatggaagtgaaggatgccaattctgcgcttctcagtaactacgaggtatttcagttactaactgatctgaaagagcagcgtaaagaaagtggaaagaataaacacagctctgggcaacagaacttgaacactatcacctatgaaacgttaaaatacatatcaaaaacaccatgcaggcaccagagtcctgaaattgtcagagaatttctcacagcattgaaaagccacaagttgaccaaagctgagaagctccagctgctgaaccaccggcctgtgactgctgtggagatccagctgatggtggaagagagtgaagagcggctcacggaggagcagattgaagctcttctccacaccgtcaccagcattctgcctgcagagccagaggctgagcagaagaagaatacaaacagcaatgtggcaatggacgaagaggacccagcatagaagagcacagctggccccggcgtttcatgaagtcagaaggcctggcagccatttcctggacgttgagaggattgtttatttgatttttatcctcatcccagcaggcctggctttgtggttagttgggtacatcacaaaaataagttaaaaagaaatatttgtgccttggggagaagaaacatggtgaaaacaggctgaggttgtcagggcagagagctgaaggtggggacagtgaccgcggacccctctgtgcttgaaagatttcctccacggcctttgccccagttgtggggaggtctctgtgcacagcggggaaaatgcttgtgtcgcctttggtgggccatgtcctaattagtttcatctgcttccctgggaacttactaaggggcccagagcactgttggaagtctggttagagtccccagagagttactctaagttaaaatgagccactgaccttggctcaccttagaggaatttcctcgagaacaacagagataagaaaagaaccggcctggccaatccttcaacagctctagagccccttttctctgctggcaggggctttgtttaccagctcactgtttaggctaaatgttagggaccagatcactgcagttgaaaacaggcactccaggcttagtgacagtggcagcagaaacagtgttggctgcctttctgaccaccccactttcctgccctgagacagcagcccagggcaggtgcttcatattcagaccaggtaagcctcatttgcacaacagtcaaattgtttgttcctttaaaaaggacacaattagcctggcacggtgactcatgcttgtaatcccagcactttgggagggcaaggcaggcggatcacctgaggtcaggagtttgagaccagcctcaccaacatggaaaaaccccatctctactaaaaaaatacaaaattaaccaggggtgatggcacattcctgtaatcccagctactcgggaggccgaggcaggagaatcgcttgaacccgggaggcagaggttgaggtgagccaagattgcaccattgcactccagcctgggcaacaagagcaaaacttcatctaaaaaacagaaaatattaagatgattaccatgtgaaaacctttttaatattcaggatttggaaagtatagttgccccaggcatgtggttgttgccttaggtcctgcgaatattgctgaaaatcggattttccacattcactttcttccctgttttagggaagaaaatgatcatagacattcgattttccaaattggcgctcttattttcaatgctaattggattacttctcttccaaccctcctgcccatccatccatcccagtccccaggcatcttaaccttaccatctgagcttcagctgaaatctgtttataggcaacattgaaagtaccagattggggccaggtgtagcggcccacacctgtaatcccagcactttgggaggcggaggctagcggatcatgaggtcaggagttcaagaccagcctggccaacatggtgaaacccccatctctactaaagatataaaaaacctgagtagctgggacttacaggcacgtaccactataccctgctaaaatttgtatttttagtagagacagggttttgccatattggccaggctagtcgtaatgtctctttttaacactgaatatgttaggtggtttttcttgatggatttagggttaacctagttaataataaattgtttccaggtaattatcaagttttgtcattttataaatctgaagagttaatattgtcatcgatacaaataaagtgaaatctgactgag

SEQ ID NO: 418906 - DNA, 2065 bp, Homo sapiens
ggcacgaggctacgagctgcccgatggccaggtcatcaccattggcaatgagcggttccggtgtccggaggcgctgttccagccttccttcctgggtatggaatcttgcggcatccacgagaccaccttcaactccatcatgaagtgtgacgtggacatccgcaaagacctgtacgccaacacggtgctgtcgggcggcaccaccatgtatccgggcattgccgacaggatgcagaaggagatcaccgccctggcgcccagcaccatgaagatcaagatcatcgcacccccacatctgctggaaggtggacccttggcgctgttggtggcggcggagacagctgtgaagtgtgaggttctttgtctgctggcagctaggggcgacgaggcgggacgtcatggaagtgaaggatgccaattctgcgcttctcagtaactacgaggtatttcagttactaactgatctgaaagagcagcgtaaagaaagtggaaagaataaacacagctctgggcaacagaacttgaacactatcacctatgaaacgttaaaatacatatcaaaaacaccatgcaggcaccagagtcctgaaattgtcagagaatttctcacagcattgaaaagccacaagttgaccaaagctgagaagctccagctgctgaaccaccggcctgtgactgctgtggagatccagctgatggtggaagagagtgaagagcggctcacggaggagcagattgaagctcttctccacaccgtcaccagcattctgcctgcagagccagaggctgagcagaagaagaatacaaacagcaatgtggcaatggacgaagaggacccagcatagaagagcacagctggccccggcgtttcatgaagtcagaaggcctggcagccatttcctggacgttgagaggattgtttatttgatttttatcctcatcccagcaggcctggctttgtggttagttgggtacatcacaaaaataagttaaaaagaaatatttgtgccttggggagaagaaacatggtgaaaacaggctgaggttgtcagggcagagagctgaaggtggggacagtgaccgcggacccctctgtgcttgaaagatttcctccacggcctttgccccagttgtggggaggtctctgtgcacagcggggaaaatgcttgtgtcgcctttggtgggccatgtcctaattagtttcatctgcttccctgggaacttactaaggggcccagagcactgttggaagtctggttagagtccccagagagttactctaagttaaaatgagccactgaccttggctcaccttagaggaatttcctcgagaacaacagagataagaaaagaaccggcctggccaatccttcaacagctctagagccccttttctctgctggcaggggctttgtttaccagctcactgtttaggctaaatgttagggaccagatcactgcagttgaaaacaggcactccaggcttagtgacagtggcagcagaaacagtgttggctgcctttctgaccaccccactttcctgccctgagacagcagcccagggcaggtgcttcatattcagaccaggtaagcctcatttgcacaacagtcaaattgtttgttcctttaaaaaggacacaattagcctggcacggtgactcatgcttgtaatcccagcactttgggagggcaaggcaggcggatcacctgaggtcaggagtttgagaccagcctcaccaacatggaaaaaccccatctctactaaaaaaatacaaaattaaccaggggtgatggcacattccctgagtagctgggacttacaggcacgtaccactataccctgctaaaatttgtatttttagtagagacagggttttgccatattggccaggctagtcgtaatgtctctttttaacactgaatatgttaggtggtttttcttgatggatttagggttaacctagttaataataaattgtttccaggtaattatcaagttttgtcattttataaatctgaagagttaatattgtcatcgatacaaataaagtgaaatctgactgag

SEQ ID NO: 418907 - DNA, 2429 bp, Homo sapiens
ggcacgaggctacgagctgcccgatggccaggtcatcaccattggcaatgagcggttccggtgtccggaggcgctgttccagccttccttcctgggtatggaatcttgcggcatccacgagaccaccttcaactccatcatgaagtgtgacgtggacatccgcaaagacctgtacgccaacacggtgctgtcgggcggcaccaccatgtatccgggcattgccgacaggatgcagaaggagatcaccgccctggcgcccagcaccatgaagatcaagatcatcgcacccccacatctgctggaaggtggacccttggcgctgttggtggcggcggagacagctgtgaagtgtgaggttctttgtctgctggcagctaggggcgacgaggcgggacgtcatggaagtgaaggatgccaattctgcgcttctcagtaactacgaggtatttcagttactaactgatctgaaagagcagcgtaaagaaagtggaaagaataaacacagctctgggcaacagaacttgaacactatcacctatgaaacgttaaaatacatatcaaaaacaccatgcaggcaccagagtcctgaaattgtcagagaatttctcacagcattgaaaagccacaagttgaccaaagctgagaagctccagctgctgaaccaccggcctgtgactgctgtggagatccagctgatggtggaagagagtgaagagcggctcacggaggagcagattgaagctcttctccacaccgtcaccagcattctgcctgcagagccagaggctgagcagaagaagaatacaaacagcaatgtggcaatggacgaagaggacccagcatagaagagcacagctggccccggcgtttcatgaagtcagaaggcctggcagccatttcctggacgttgagaggattgtttatttgatttttatcctcatcccagcaggcctggctttgtggttagttgggtacatcacaaaaataagttaaaaagaaatatttgtgccttggggagaagaaacatggtgaaaacaggctgaggttgtcagggcagagagctgaaggtggggacagtgaccgcggacccctctgtgcttgaaagatttcctccacggcctttgccccagttgtggggaggtctctgtgcacagcggggaaaatgcttgtgtcgcctttggtgggccatgtcctaattagtttcatctgcttccctgggaacttactaaggggcccagagcactgttggaagtctggttagagtccccagagagttactctaagttaaaatgagccactgaccttggctcaccttagaggaatttcctcgagaacaacagagataagaaaagaaccggcctggccaatccttcaacagctctagagccccttttctctgctggcaggggctttgtttaccagctcactgtttaggctaaatgttagggaccagatcactgcagttgaaaacaggcactccaggcttagtgacagtggcagcagaaacagtgttggctgcctttctgaccaccccactttcctgccctgagacagcagcccagggcaggtgcttcatattcagaccaggtaagcctcatttgcacaacagtcaaattgtttgttcctttaaaaaggacacaattagcctggcacggtgactcatgcttgtaatcccagcactttgggagggcaaggcaggcggatcacctgaggtcaggagtttgagaccagcctcaccaacatggaaaaaccccatctctactaaaaaaatacaaaattaaccaggggtgatggcacattcctgtaatcccagctactcgggaggccgaggcaggagaatcgcttgaacccgggaggcagaggttgaggtgagccaagattgcaccattgcactccagcctgggcaacaagagcaaaacttcatctaaaaaacagaaaatattaagatgattaccatgtgaaaacctttttaatattcaggatttggaaagtatagttgccccaggcatgtggttgttgccttaggtcctgcgaatattgctgaaaatcggattttccacattcactttcttccctgttttagggaagaaaatgatcatagacattcgattttccaaattggcgctcttattttcaatgctaattggattacttctcttccaacccctgagtagctgggacttacaggcacgtaccactataccctgctaaaatttgtatttttagtagagacagggttttgccatattggccaggctagtcgtaatgtctctttttaacactgaatatgttaggtggtttttcttgatggatttagggttaacctagttaataataaattgtttccaggtaattatcaagttttgtcattttataaatctgaagagttaatattgtcatcgatacaaataaagtgaaatctgactgag

SEQ ID NO: 418908 - DNA, 2696 bp, Homo sapiens
ggcctggtggctctcacacctgtaaaggaagaggaagaggaggaggagcaggaggaaacagccaggcgtggtggctcacgcctgtaaaggagaaagaggaggaagaaacagccaggcacagtggctcaagcctgcaaaggaggaggaggaaacagccagttgcagtggctcacgcctgtagaggaggaggaggagacagccaggcacagtggctcatgcctgtaaaggaggaggaggaggagcaggaggaagaagaaacagccaggaagggtggctcatgccggtaaaggaggagaaggaagaggaggaggaggaggaaacagccaggaaggatgccaattctgcgcttctcagtaactacgaggtatttcagttactaactgatctgaaagagcagcgtaaagaaagtggaaagaataaacacagctctgggcaacagaacttgaacactatcacctatgaaacgttaaaatacatatcaaaaacaccatgcaggcaccagagtcctgaaattgtcagagaatttctcacagcattgaaaagccacaagttgaccaaagctgagaagctccagctgctgaaccaccggcctgtgactgctgtggagatccagctgatggtggaagagagtgaagagcggctcacggaggagcagattgaagctcttctccacaccgtcaccagcattctgcctgcagagccagaggctgagcagaagaagaatacaaacagcaatgtggcaatggacgaagaggacccagcatagaagagcacagctggccccggcgtttcatgaagtcagaaggcctggcagccatttcctggacgttgagaggattgtttatttgatttttatcctcatcccagcaggcctggctttgtggttagttgggtacatcacaaaaataagttaaaaagaaatatttgtgccttggggagaagaaacatggtgaaaacaggctgaggttgtcagggcagagagctgaaggtggggacagtgaccgcggacccctctgtgcttgaaagatttcctccacggcctttgccccagttgtggggaggtctctgtgcacagcggggaaaatgcttgtgtcgcctttggtgggccatgtcctaattagtttcatctgcttccctgggaacttactaaggggcccagagcactgttggaagtctggttagagtccccagagagttactctaagttaaaatgagccactgaccttggctcaccttagaggaatttcctcgagaacaacagagataagaaaagaaccggcctggccaatccttcaacagctctagagccccttttctctgctggcaggggctttgtttaccagctcactgtttaggctaaatgttagggaccagatcactgcagttgaaaacaggcactccaggcttagtgacagtggcagcagaaacagtgttggctgcctttctgaccaccccactttcctgccctgagacagcagcccagggcaggtgcttcatattcagaccaggtaagcctcatttgcacaacagtcaaattgtttgttcctttaaaaaggacacaattagcctggcacggtgactcatgcttgtaatcccagcactttgggagggcaaggcaggcggatcacctgaggtcaggagtttgagaccagcctcaccaacatggaaaaaccccatctctactaaaaaaatacaaaattaaccaggggtgatggcacattcctgtaatcccagctactcgggaggccgaggcaggagaatcgcttgaacccgggaggcagaggttgaggtgagccaagattgcaccattgcactccagcctgggcaacaagagcaaaacttcatctaaaaaacagaaaatattaagatgattaccatgtgaaaacctttttaatattcaggatttggaaagtatagttgccccaggcatgtggttgttgccttaggtcctgcgaatattgctgaaaatcggattttccacattcactttcttccctgttttagggaagaaaatgatcatagacattcgattttccaaattggcgctcttattttcaatgctaattggattacttctcttccaaccctcctgcccatccatccatcccagtccccaggcatcttaaccttaccatctgagcttcagctgaaatctgtttataggcaacattgaaagtaccagattggggccaggtgtagcggcccacacctgtaatcccagcactttgggaggcggaggctagcggatcatgaggtcaggagttcaagaccagcctggccaacatggtgaaacccccatctctactaaagatataaaaaactagccgagcgtggtgttgcatgcctgtgatcccagctactcgggaggctgaggcgggggaatcgcttgaacctctgcctcccagattcaagcgattctggtgccttagcctcctgagtagctgggacttacaggcacgtaccactataccctgctaaaatttgtatttttagtagagacagggttttgccatattggccaggctagtcgtaatgtctctttttaacactgaatatgttaggtggtttttcttgatggatttagggttaacctagttaataataaattgtttccaggtaattatcaagttttgtcattttataaatctgaagagttaatattgtcatcgatacaaataaagtgaaatctgactgag

SEQ ID NO: 418909 - DNA, 2373 bp, Homo sapiens
cgcgaggttccgggtccgccaagctcccggcatgcagcgcggcgatcccggcgagcaccttggcgcgcggagctggcaccttggcgctgttggtggcggcggagacagctgtgaagtgtgaggttctttgtctgctggcagctaggggcgacgaggcgggacgtcatggaagtgaaggatgccaattctgcgcttctcagtaactacgagcattgaaaagccacaagttgaccaaagctgagaagctccagctgctgaaccaccggcctgtgactgctgtggagatccagctgatggtggaagagagtgaagagcggctcacggaggagcagattgaagctcttctccacaccgtcaccagcattctgcctgcagagccagaggctgagcagaagaagaatacaaacagcaatgtggcaatggacgaagaggacccagcatagaagagcacagctggccccggcgtttcatgaagtcagaaggcctggcagccatttcctggacgttgagaggattgtttatttgatttttatcctcatcccagcaggcctggctttgtggttagttgggtacatcacaaaaataagttaaaaagaaatatttgtgccttggggagaagaaacatggtgaaaacaggctgaggttgtcagggcagagagctgaaggtggggacagtgaccgcggacccctctgtgcttgaaagatttcctccacggcctttgccccagttgtggggaggtctctgtgcacagcggggaaaatgcttgtgtcgcctttggtgggccatgtcctaattagtttcatctgcttccctgggaacttactaaggggcccagagcactgttggaagtctggttagagtccccagagagttactctaagttaaaatgagccactgaccttggctcaccttagaggaatttcctcgagaacaacagagataagaaaagaaccggcctggccaatccttcaacagctctagagccccttttctctgctggcaggggctttgtttaccagctcactgtttaggctaaatgttagggaccagatcactgcagttgaaaacaggcactccaggcttagtgacagtggcagcagaaacagtgttggctgcctttctgaccaccccactttcctgccctgagacagcagcccagggcaggtgcttcatattcagaccaggtaagcctcatttgcacaacagtcaaattgtttgttcctttaaaaaggacacaattagcctggcacggtgactcatgcttgtaatcccagcactttgggagggcaaggcaggcggatcacctgaggtcaggagtttgagaccagcctcaccaacatggaaaaaccccatctctactaaaaaaatacaaaattaaccaggggtgatggcacattcctgtaatcccagctactcgggaggccgaggcaggagaatcgcttgaacccgggaggcagaggttgaggtgagccaagattgcaccattgcactccagcctgggcaacaagagcaaaacttcatctaaaaaacagaaaatattaagatgattaccatgtgaaaacctttttaatattcaggatttggaaagtatagttgccccaggcatgtggttgttgccttaggtcctgcgaatattgctgaaaatcggattttccacattcactttcttccctgttttagggaagaaaatgatcatagacattcgattttccaaattggcgctcttattttcaatgctaattggattacttctcttccaaccctcctgcccatccatccatcccagtccccaggcatcttaaccttaccatctgagcttcagctgaaatctgtttataggcaacattgaaagtaccagattggggccaggtgtagcggcccacacctgtaatcccagcactttgggaggcggaggctagcggatcatgaggtcaggagttcaagaccagcctggccaacatggtgaaacccccatctctactaaagatataaaaaactagccgagcgtggtgttgcatgcctgtgatcccagctactcgggaggctgaggcgggggaatcgcttgaacctctgcctcccagattcaagcgattctggtgccttagcctcctgagtagctgggacttacaggcacgtaccactataccctgctaaaatttgtatttttagtagagacagggttttgccatattggccaggctagtcgtaatgtctctttttaacactgaatatgttaggtggtttttcttgatggatttagggttaacctagttaataataaattgtttccaggtaattatcaagttttgtcattttataaatctgaagagttaatattgtcatcgatacaaataaagtgaaatctgactgag

SEQ ID NO: 418910 - DNA, 2527 bp, Homo sapiens
gcattgccgttcactgcagtgatctggtccctaacatttagcctaaacagtgagctggtaaacaaagcccctgccagcagagaaaaggggctctagagctgttgaaggattggccaggccggttcttttcttatctctgttgttctcgaggaaattcctctaaggtgagccaaggtcagtggctcattttaacttagagtaactctctggggactctaaccagacttccaacagtgctctgggccccttagtaagttcccagggaagcagatgaaactaattaggacatggtccaccaaaggcgacacaagcattttccccgctgtgcaccagagtcctgaaattgtcagagaatttctcacagcattgaaaagccacaagttgaccaaagctgagaagctccagctgctgaaccaccggcctgtgactgctgtggagatccagctgatggtggaagagagtgaagagcggctcacggaggagcagattgaagctcttctccacaccgtcaccagcattctgcctgcagagccagaggctgagcagaagaagaatacaaacagcaatgtggcaatggacgaagaggacccagcatagaagagcacagctggccccggcgtttcatgaagtcagaaggcctggcagccatttcctggacgttgagaggattgtttatttgatttttatcctcatcccagcaggcctggctttgtggttagttgggtacatcacaaaaataagttaaaaagaaatatttgtgccttggggagaagaaacatggtgaaaacaggctgaggttgtcagggcagagagctgaaggtggggacagtgaccgcggacccctctgtgcttgaaagatttcctccacggcctttgccccagttgtggggaggtctctgtgcacagcggggaaaatgcttgtgtcgcctttggtgggccatgtcctaattagtttcatctgcttccctgggaacttactaaggggcccagagcactgttggaagtctggttagagtccccagagagttactctaagttaaaatgagccactgaccttggctcaccttagaggaatttcctcgagaacaacagagataagaaaagaaccggcctggccaatccttcaacagctctagagccccttttctctgctggcaggggctttgtttaccagctcactgtttaggctaaatgttagggaccagatcactgcagttgaaaacaggcactccaggcttagtgacagtggcagcagaaacagtgttggctgcctttctgaccaccccactttcctgccctgagacagcagcccagggcaggtgcttcatattcagaccaggtaagcctcatttgcacaacagtcaaattgtttgttcctttaaaaaggacacaattagcctggcacggtgactcatgcttgtaatcccagcactttgggagggcaaggcaggcggatcacctgaggtcaggagtttgagaccagcctcaccaacatggaaaaaccccatctctactaaaaaaatacaaaattaaccaggggtgatggcacattcctgtaatcccagctactcgggaggccgaggcaggagaatcgcttgaacccgggaggcagaggttgaggtgagccaagattgcaccattgcactccagcctgggcaacaagagcaaaacttcatctaaaaaacagaaaatattaagatgattaccatgtgaaaacctttttaatattcaggatttggaaagtatagttgccccaggcatgtggttgttgccttaggtcctgcgaatattgctgaaaatcggattttccacattcactttcttccctgttttagggaagaaaatgatcatagacattcgattttccaaattggcgctcttattttcaatgctaattggattacttctcttccaaccctcctgcccatccatccatcccagtccccaggcatcttaaccttaccatctgagcttcagctgaaatctgtttataggcaacattgaaagtaccagattggggccaggtgtagcggcccacacctgtaatcccagcactttgggaggcggaggctagcggatcatgaggtcaggagttcaagaccagcctggccaacatggtgaaacccccatctctactaaagatataaaaaactagccgagcgtggtgttgcatgcctgtgatcccagctactcgggaggctgaggcgggggaatcgcttgaacctctgcctcccagattcaagcgattctggtgccttagcctcctgagtagctgggacttacaggcacgtaccactataccctgctaaaatttgtatttttagtagagacagggttttgccatattggccaggctagtcgtaatgtctctttttaacactgaatatgttaggtggtttttcttgatggatttagggttaacctagttaataataaattgtttccaggtaattatcaagttttgtcattttataaatctgaagagttaatattgtcatcgatacaaataaagtgaaatctgactgag

SEQ ID NO: 418911 - DNA, 2443 bp, Homo sapiens
cgcgaggttccgggtccgccaagctcccggcatgcagcgcggcgatcccggcgagcaccttggcgcgcggagctggcaccttggcgctgttggtggcggcggagacagctgtgaagtgtgaggttctttgtctgctggcagctaggggcgacgaggcgggacgtcatggaagtgaaggatgccaattctgcgcttctcagtaactacgagacgttaaaatacatatcaaaaacaccatgcaggcaccagagtcctgaaattgtcagagaatttctcacagcattgaaaagccacaagttgaccaaagctgagaagctccagctgctgaaccaccggcctgtgactgctgtggagatccagctgatggtggaagagagtgaagagcggctcacggaggagcagattgaagctcttctccacaccgtcaccagcattctgcctgcagagccagaggctgagcagaagaagaatacaaacagcaatgtggcaatggacgaagaggacccagcatagaagagcacagctggccccggcgtttcatgaagtcagaaggcctggcagccatttcctggacgttgagaggattgtttatttgatttttatcctcatcccagcaggcctggctttgtggttagttgggtacatcacaaaaataagttaaaaagaaatatttgtgccttggggagaagaaacatggtgaaaacaggctgaggttgtcagggcagagagctgaaggtggggacagtgaccgcggacccctctgtgcttgaaagatttcctccacggcctttgccccagttgtggggaggtctctgtgcacagcggggaaaatgcttgtgtcgcctttggtgggccatgtcctaattagtttcatctgcttccctgggaacttactaaggggcccagagcactgttggaagtctggttagagtccccagagagttactctaagttaaaatgagccactgaccttggctcaccttagaggaatttcctcgagaacaacagagataagaaaagaaccggcctggccaatccttcaacagctctagagccccttttctctgctggcaggggctttgtttaccagctcactgtttaggctaaatgttagggaccagatcactgcagttgaaaacaggcactccaggcttagtgacagtggcagcagaaacagtgttggctgcctttctgaccaccccactttcctgccctgagacagcagcccagggcaggtgcttcatattcagaccaggtaagcctcatttgcacaacagtcaaattgtttgttcctttaaaaaggacacaattagcctggcacggtgactcatgcttgtaatcccagcactttgggagggcaaggcaggcggatcacctgaggtcaggagtttgagaccagcctcaccaacatggaaaaaccccatctctactaaaaaaatacaaaattaaccaggggtgatggcacattcctgtaatcccagctactcgggaggccgaggcaggagaatcgcttgaacccgggaggcagaggttgaggtgagccaagattgcaccattgcactccagcctgggcaacaagagcaaaacttcatctaaaaaacagaaaatattaagatgattaccatgtgaaaacctttttaatattcaggatttggaaagtatagttgccccaggcatgtggttgttgccttaggtcctgcgaatattgctgaaaatcggattttccacattcactttcttccctgttttagggaagaaaatgatcatagacattcgattttccaaattggcgctcttattttcaatgctaattggattacttctcttccaaccctcctgcccatccatccatcccagtccccaggcatcttaaccttaccatctgagcttcagctgaaatctgtttataggcaacattgaaagtaccagattggggccaggtgtagcggcccacacctgtaatcccagcactttgggaggcggaggctagcggatcatgaggtcaggagttcaagaccagcctggccaacatggtgaaacccccatctctactaaagatataaaaaactagccgagcgtggtgttgcatgcctgtgatcccagctactcgggaggctgaggcgggggaatcgcttgaacctctgcctcccagattcaagcgattctggtgccttagcctcctgagtagctgggacttacaggcacgtaccactataccctgctaaaatttgtatttttagtagagacagggttttgccatattggccaggctagtcgtaatgtctctttttaacactgaatatgttaggtggtttttcttgatggatttagggttaacctagttaataataaattgtttccaggtaattatcaagttttgtcattttataaatctgaagagttaatattgtcatcgatacaaataaagtgaaatctgactgag

SEQ ID NO: 418912 - DNA, 1819 bp, Homo sapiens
cgcgaggttccgggtccgccaagctcccggcatgcagcgcggcgatcccggcgagcaccttggcgcgcggagctggcaccttggcgctgttggtggcggcggagacagctgtgaagtgtgaggttctttgtctgctggcagctaggggcgacgaggcgggacgtcatggaagtgaaggatgccaattctgcgcttctcagtaactacgagacgttaaaatacatatcaaaaacaccatgcaggcaccagagtcctgaaattgtcagagaatttctcacagcattgaaaagccacaagttgaccaaagctgagaagctccagctgctgaaccaccggcctgtgactgctgtggagatccagctgatggtggaagagagtgaagagcggctcacggaggagcagattgaagctcttctccacaccgtcaccagcattctgcctgcagagccagaggctgagcagaagaagaatacaaacagcaatgtggcaatggacgaagaggacccagcatagaagagcacagctggccccggcgtttcatgaagtcagaaggcctggcagccatttcctggacgttgagaggattgtttatttgatttttatcctcatcccagcaggcctggctttgtggttagttgggtacatcacaaaaataagttaaaaagaaatatttgtgccttggggagaagaaacatggtgaaaacaggctgagacagcagcccagggcaggtgcttcatattcagaccaggtaagcctcatttgcacaacagtcaaattgtttgttcctttaaaaaggacacaattagcctggcacggtgactcatgcttgtaatcccagcactttgggagggcaaggcaggcggatcacctgaggtcaggagtttgagaccagcctcaccaacatggaaaaaccccatctctactaaaaaaatacaaaattaaccaggggtgatggcacattcctgtaatcccagctactcgggaggccgaggcaggagaatcgcttgaacccgggaggcagaggttgaggtgagccaagattgcaccattgcactccagcctgggcaacaagagcaaaacttcatctaaaaaacagaaaatattaagatgattaccatgtgaaaacctttttaatattcaggatttggaaagtatagttgccccaggcatgtggttgttgccttaggtcctgcgaatattgctgaaaatcggattttccacattcactttcttccctgttttagggaagaaaatgatcatagacattcgattttccaaattggcgctcttattttcaatgctaattggattacttctcttccaaccctcctgcccatccatccatcccagtccccaggcatcttaaccttaccatctgagcttcagctgaaatctgtttataggcaacattgaaagtaccagattggggccaggtgtagcggcccacacctgtaatcccagcactttgggaggcggaggctagcggatcatgaggtcaggagttcaagaccagcctctgcctcccagattcaagcgattctggtgccttagcctcctgagtagctgggacttacaggcacgtaccactataccctgctaaaatttgtatttttagtagagacagggttttgccatattggccaggctagtcgtaatgtctctttttaacactgaatatgttaggtggtttttcttgatggatttagggttaacctagttaataataaattgtttccaggtaattatcaagttttgtcattttataaatctgaagagttaatattgtcatcgatacaaataaagtgaaatctgactgag

SEQ ID NO: 418913 - DNA, 1457 bp, Homo sapiens
ggcacgaggctacgagctgcccgatggccaggtcatcaccattggcaatgagcggttccggtgtccggaggcgctgttccagccttccttcctgggtatggaatcttgcggcatccacgagaccaccttcaactccatcatgaagtgtgacgtggacatccgcaaagacctgtacgccaacacggtgctgtcgggcggcaccaccatgtatccgggcattgccgacaggatgcagaaggagatcaccgccctggcgcccagcaccatgaagatcaagatcatcgcacccccacatctgctggaaggtggacccttggcgctgttggtggcggcggagacagctgtgaagtgtgaggttctttgtctgctggcagctaggggcgacgaggcgggacgtcatggaagtgtaagtcttctcgggcgcgtcccttttcgcccgaggagcccaacggtttgaccgctgagagctgagagccgagagccgtggggactgggcgaccctcgtacgggagtgagggcagcgggccggccctgtccgggagggccgcggggtggtgacggggacgaacgggactctcgctttgcccttccgaaccttcgcttcccctccacgccgtgtctggtgcggggccgagcacttccgtgtccggctgcctttcaatgtgccccctccttctctcattcgtttaccagcgtttctgggtcacagtgcgggggtggagcccagtctggtatccgaccccggacttagaaggctataaaggcctgagtctgtccgccctgaaagtaggtggaggagagacgaatcagggccgggtagagctctgcttgcagctgtaggcccctggagagccctcggaagagctgccctcggaatttgatgggagcagtaaacactgtgagggaaggggctggttttggggtggagaagggaaggacgtgaaccaggactgggaccagagaaacagcagggggtgtgtgggtgtgtgtgcaaggcgagggtaaaagattttctgacagtttaactccacgtggtcttttccatgcttgctcgttgcgcctggtgcaaatggaagattttgcatctactctgaatgtgggctttatacggttgatattaatttgtaggtattactatcttgtgttctctttgaactgattatttgatacagtttcctttatgttcttttgcctcatgtttaatggttatatgtactatggcatttcacatttttacatttttaattaattgttttttcttaagaaacagggtcttgctctgtcccccaggcggggtgtaatcatggttcactgcagcctcactttctggactcaagcaatccttctcagctacttacgaggctgagatgggaggatcacttgatcccaggaggctgcaatgagctgagatagagccactacactcctgccagagtgacagtgtaaggctctgtctt

SEQ ID NO: 418914 - DNA, 618 bp, Homo sapiens
aggtggaggagagacgaatcagggccgggtagagctctgcttgcagctgtaggcccctggagagccctcggaagagctgccctcggaatttgatgggagcagtaaacactgtgagggaaggggctggttttggggtggagaagggaaggacgtgaaccaggactgggaccagagaaacagcagggggtgtgtgggtgtgtgtgcaaggcgagggtaaaagattttctgacagtttaactccacgtggtcttttccatgcttgctcgttgcgcctggtgcaaatggaagattttgcatctactctgaatgtgggctttatacggttgatattaatttgtaggtattactatcttgtgttctctttgaactgattatttgatacagtttcctttatgttcttttgcctcatgtttaatggttatatgtactatggcatttcacatttttacatttttaattaattgttttttcttaagaaacagggtcttgctctgtcccccaggcggggtgtaatcatggttcactgcagcctcactttctggactcaagcaatcctgcttcagcctcttcagtagctgggactacaggcccacgccatcactcaccgctaatttttta

SEQ ID NO: 418915 - DNA, 2657 bp, Homo sapiens
ggcacgaggctacgagctgcccgatggccaggtcatcaccattggcaatgagcggttccggtgtccggaggcgctgttccagccttccttcctgggtatggaatcttgcggcatccacgagaccaccttcaactccatcatgaagtgtgacgtggacatccgcaaagacctgtacgccaacacggtgctgtcgggcggcaccaccatgtatccgggcattgccgacaggatgcagaaggagatcaccgccctggcgcccagcaccatgaagatcaagatcatcgcacccccacatctgctggaaggtggacccttggcgctgttggtggcggcggagacagctgtgaagtgtgaggttctttgtctgctggcagctaggggcgacgaggcgggacgtcatggaagtgaaggatgccaattctgcgcttctcagtaactacgaggtatttcagttactaactgatctgaaagagcagcgtaaagaaagtggaaagaataaacacagctctgggcaacagaacttgaacactatcacctatgaaacgttaaaatacatatcaaaaacaccatgcaggcaccagagtcctgaaattgtcagagaatttctcacagcattgaaaagccacaagttgaccaaagctgagaagctccagctgctgaaccaccggcctgtgactgctgtggagatccagctgatggtggaagagagtgaagagcggctcacggaggagcagattgaagctcttctccacaccgtcaccagcattctgcctgcagagccagaggctgagcagaagaagaatacaaacagcaatgtggcaatggacgaagaggacccagcatagaagagcacagctggccccggcgtttcatgaagtcagaaggcctggcagccatttcctggacgttgagaggattgtttatttgatttttatcctcatcccagcaggcctggctttgtggttagttgggtacatcacaaaaataagttaaaaagaaatatttgtgccttggggagaagaaacatggtgaaaacaggctgaggttgtcagggcagagagctgaaggtggggacagtgaccgcggacccctctgtgcttgaaagatttcctccacggcctttgccccagttgtggggaggtctctgtgcacagcggggaaaatgcttgtgtcgcctttggtgggccatgtcctaattagtttcatctgcttccctgggaacttactaaggggcccagagcactgttggaagtctggttagagtccccagagagttactctaagttaaaatgagccactgaccttggctcaccttagaggaatttcctcgagaacaacagagataagaaaagaaccggcctggccaatccttcaacagctctagagccccttttctctgctggcaggggctttgtttaccagctcactgtttaggctaaatgttagggaccagatcactgcagttgaaaacaggcactccaggcttagtgacagtggcagcagaaacagtgttggctgcctttctgaccaccccactttcctgccctgagacagcagcccagggcaggtgcttcatattcagaccaggtaagcctcatttgcacaacagtcaaattgtttgttcctttaaaaaggacacaattagcctggcacggtgactcatgcttgtaatcccagcactttgggagggcaaggcaggcggatcacctgaggtcaggagtttgagaccagcctcaccaacatggaaaaaccccatctctactaaaaaaatacaaaattaaccaggggtgatggcacattcctgtaatcccagctactcgggaggccgaggcaggagaatcgcttgaacccgggaggcagaggttgaggtgagccaagattgcaccattgcactccagcctgggcaacaagagcaaaacttcatctaaaaaacagaaaatattaagatgattaccatgtgaaaacctttttaatattcaggatttggaaagtatagttgccccaggcatgtggttgttgccttaggtcctgcgaatattgctgaaaatcggattttccacattcactttcttccctgttttagggaagaaaatgatcatagacattcgattttccaaattggcgctcttattttcaatgctaattggattacttctcttccaaccctcctgcccatccatccatcccagtccccaggcatcttaaccttaccatctgagcttcagctgaaatctgtttataggcaacattgaaagtaccagattggggccaggtgtagcggcccacacctgtaatcccagcactttgggaggcggaggctagcggatcatgaggtcaggagttcaagaccagcctctgcctcccagattcaagcgattctggtgccttagcctcctgagtagctgggacttacaggcacgtaccactataccctgctaaaatttgtatttttagtagagacagggttttgccatattggccaggctagtcgtaatgtctctttttaacactgaatatgttaggtggtttttcttgatggatttagggttaacctagttaataataaattgtttccaggtaattatcaagttttgtcattttataaatctgaagagttaatattgtcatcgatacaaataaagtgaaatctgactgag

SEQ ID NO: 418916 - DNA, 3048 bp, Homo sapiens
ggcacgaggctacgagctgcccgatggccaggtcatcaccattggcaatgagcggttccggtgtccggaggcgctgttccagccttccttcctgggtatggaatcttgcggcatccacgagaccaccttcaactccatcatgaagtgtgacgtggacatccgcaaagacctgtacgccaacacggtgctgtcgggcggcaccaccatgtatccgggcattgccgacaggatgcagaaggagatcaccgccctggcgcccagcaccatgaagatcaagatcatcgcacccccacatctgctggaaggtggacccttggcgctgttggtggcggcggagacagctgtgaagtgtgaggttctttgtctgctggcagctaggggcgacgaggcgggacgtcatggaagtgaaggatgccaattctgcgcttctcagtaactacgaggtatttcagttactaactgatctgaaagagcagcgtaaagaaagtggaaagaataaacacagctctgggcaacagaacttgaacactatcacctatgaaacgttaaaatacatatcaaaaacaccatgcaggcaccagagtcctgaaattgtcagagaatttctcacagcattgaaaagccacaagttgaccaaagctgagaagctccagctgctgaaccaccggcctgtgactgctgtggagatccagctgatggtggaagagagtgaagagcggctcacggaggagcagattgaagctcttctccacaccgtcaccagcattctgcctgcagagccagaggctgagcagaagaagaatacaaacagcaatgtggcaatggacgaagaggacccagcatagaagagcacagctggccccggcgtttcatgaagtcagaaggcctggcagccatttcctggacgttgagaggattgtttatttgatttttatcctcatcccagcaggcctggctttgtggttagttgggtacatcacaaaaataagttaaaaagaaatatttgtgccttggggagaagaaacatggtgaaaacaggctgaggttgtcagggcagagagctgaaggtggggacagtgaccgcggacccctctgtgcttgaaagatttcctccacggcctttgccccagttgtggggaggtctctgtgcacagcggggaaaatgcttgtgtcgcctttggtgggccatgtcctaattagtttcatctgcttccctgggaacttactaaggggcccagagcactgttggaagtctggttagagtccccagagagttactctaagttaaaatgagccactgaccttggctcaccttagaggaatttcctcgagaacaacagagataagaaaagaaccggcctggccaatccttcaacagctctagagccccttttctctgctggcaggggctttgtttaccagctcactgtttaggctaaatgttagggaccagatcactgcagttgaaaacaggcactccaggcttagtgacagtggcagcagaaacagtgttggctgcctttctgaccaccccactttcctgccctgagacagcagcccagggcaggtgcttcatattcagaccaggtaagcctcatttgcacaacagtcaaattgtttgttcctttaaaaaggacacaattagcctggcacggtgactcatgcttgtaatcccagcactttgggagggcaaggcaggcggatcacctgaggtcaggagtttgagaccagcctcaccaacatggaaaaaccccatctctactaaaaaaatacaaaattaaccaggggtgatggcacattcctgtaatcccagctactcgggaggccgaggcaggagaatcgcttgaacccgggaggcagaggttgaggtgagccaagattgcaccattgcactccagcctgggcaacaagagcaaaacttcatctaaaaaacagaaaatattaagatgattaccatgtgaaaacctttttaatattcaggatttggaaagtatagttgccccaggcatgtggttgttgccttaggtcctgcgaatattgctgaaaatcggattttccacattcactttcttccctgttttagggaagaaaatgatcatagacattcgattttccaaattggcgctcttattttcaatgctaattggattacttctcttccaaccctcctgcccatccatccatcccagtccccaggcatcttaaccttaccatctgagcttcagctgaaatctgtttataggcaacattgaaagtaccagattggggccaggtgtagcggcccacacctgtaatcccagcactttgggaggcggaggctagcggatcatgaggtcaggagttcaagaccagcctggccaacatggtgaaacccccatctctactaaagatataaaaaactagccgagcgtggtgttgcatgcctgtgatcccagctactcgggaggctgaggcgggggaatcgcttgaaccggggaggcagaggttgcagtgagccagatcgtgcattgcactccagcctggccgacagggtgagactccatctcaaaaaagagaaagtaccagattgtacttttaaatctgtctagcgtattgagaattttagtgggagctgttgatttatttctcagggcatacatgtgccaatctgtctcattgttgtctctctctttttttttttttttttgagacagtctcgctgtgttgcccaggagtgcagtggcacgatctctgctcactgcaacctctgcctcccagattcaagcgattctggtgccttagcctcctgagtagctgggacttacaggcacgtaccactataccctgctaaaatttgtatttttagtagagacagggttttgccatattggccaggctagtcgtaatgtctctttttaacactgaatatgttaggtggtttttcttgatggatttagggttaacctagttaataataaattgtttccaggtaattatcaagttttgtcattttataaatctgaagagttaatattgtcatcgatacaaataaagtgaaatctgactgag

SEQ ID NO: 418917 - DNA, 2637 bp, Homo sapiens
ggcacgaggctacgagctgcccgatggccaggtcatcaccattggcaatgagcggttccggtgtccggaggcgctgttccagccttccttcctgggtatggaatcttgcggcatccacgagaccaccttcaactccatcatgaagtgtgacgtggacatccgcaaagacctgtacgccaacacggtgctgtcgggcggcaccaccatgtatccgggcattgccgacaggatgcagaaggagatcaccgccctggcgcccagcaccatgaagatcaagatcatcgcacccccacatctgctggaaggtggacccttggcgctgttggtggcggcggagacagctgtgaagtgtgaggttctttgtctgctggcagctaggggcgacgaggcgggacgtcatggaagtgaaggatgccaattctgcgcttctcagtaactacgaggtatttcagttactaactgatctgaaagagcagcgtaaagaaagtggaaagaataaacacagctctgggcaacagaacttgaacactatcacctatgaaacgttaaaatacatatcaaaaacaccatgcaggcaccagagtcctgaaattgtcagagaatttctcacagcattgaaaagccacaagttgaccaaagctgagaagctccagctgctgaaccaccggcctgtgactgctgtggagatccagctgatggtggaagagagtgaagagcggctcacggaggagcagattgaagctcttctccacaccgtcaccagcattctgcctgcagagccagaggctgagcagaagaagaatacaaacagcaatgtggcaatggacgaagaggacccagcatagaagagcacagctggccccggcgtttcatgaagtcagaaggcctggcagccatttcctggacgttgagaggattgtttatttgatttttatcctcatcccagcaggcctggctttgtggttagttgggtacatcacaaaaataagttaaaaagaaatatttgtgccttggggagaagaaacatggtgaaaacaggctgaggttgtcagggcagagagctgaaggtggggacagtgaccgcggacccctctgtgcttgaaagatttcctccacggcctttgccccagttgtggggaggtctctgtgcacagcggggaaaatgcttgtgtcgcctttggtgggccatgtcctaattagtttcatctgcttccctgggaacttactaaggggcccagagcactgttggaagtctggttagagtccccagagagttactctaagttaaaatgagccactgaccttggctcaccttagaggaatttcctcgagaacaacagagataagaaaagaaccggcctggccaatccttcaacagctctagagccccttttctctgctggcaggggctttgtttaccagctcactgtttaggctaaatgttagggaccagatcactgcagttgaaaacaggcactccaggcttagtgacagtggcagcagaaacagtgttggctgcctttctgaccaccccactttcctgccctgagacagcagcccagggcaggtgcttcatattcagaccaggtaagcctcatttgcacaacagtcaaattgtttgttcctttaaaaaggacacaattagcctggcacggtgactcatgcttgtaatcccagcactttgggagggcaaggcaggcggatcacctgaggtcaggagtttgagaccagcctcaccaacatggaaaaaccccatctctactaaaaaaatacaaaattaaccaggggtgatggcacattcctgtaatcccagctactcgggaggccgaggcaggagaatcgcttgaacccgggaggcagaggttgaggtgagccaagattgcaccattgcactccagcctgggcaacaagagcaaaacttcatctaaaaaacagaaaatattaagatgattaccatgtgaaaacctttttaatattcaggatttggaaagtatagttgccccaggcatgtggttgttgccttaggtcctgcgaatattgctgaaaatcggattttccacattcactttcttccctgttttagggaagaaaatgatcatagacattcgattttccaaattggcgctcttattttcaatgctaattggattacttctcttccaaccctcctgcccatccatccatcccagtccccaggcatcttaacctctgcctcccagattcaagcgattctggtgccttagcctcctgagtagctgggacttacaggcacgtaccactataccctgctaaaatttgtatttttagtagagacagggttttgccatattggccaggctagtcgtaatgtctctttttaacactgaatatgttaggtggtttttcttgatggatttagggttaacctagttaataataaattgtttccaggtaattatcaagttttgtcattttataaatctgaagagttaatattgtcatcgatacaaataaagtgaaatctgactgagaaaaaaaaaaacgaaaaaacggaccaccaaacagactgcgcacactgacacaactacgccaccgacacacagacacagaaaaaactcaaaacactccatgcaaccccaactacataagaacacctgc

SEQ ID NO: 418918 - DNA, 2512 bp, Homo sapiens
ggcacgaggctacgagctgcccgatggccaggtcatcaccattggcaatgagcggttccggtgtccggaggcgctgttccagccttccttcctgggtatggaatcttgcggcatccacgagaccaccttcaactccatcatgaagtgtgacgtggacatccgcaaagacctgtacgccaacacggtgctgtcgggcggcaccaccatgtatccgggcattgccgacaggatgcagaaggagatcaccgccctggcgcccagcaccatgaagatcaagatcatcgcacccccacatctgctggaaggtggacccttggcgctgttggtggcggcggagacagctgtgaagtgtgaggttctttgtctgctggcagctaggggcgacgaggcgggacgtcatggaagtgaaggatgccaattctgcgcttctcagtaactacgaggtatttcagttactaactgatctgaaagagcagcgtaaagaaagtggaaagaataaacacagctctgggcaacagaacttgaacactatcacctatgaaacgttaaaatacatatcaaaaacaccatgcaggcaccagagtcctgaaattgtcagagaatttctcacagcattgaaaagccacaagttgaccaaagctgagaagctccagctgctgaaccaccggcctgtgactgctgtggagatccagctgatggtggaagagagtgaagagcggctcacggaggagcagattgaagctcttctccacaccgtcaccagcattctgcctgcagagccagaggctgagcagaagaagaatacaaacagcaatgtggcaatggacgaagaggacccagcatagaagagcacagctggccccggcgtttcatgaagtcagaaggcctggcagccatttcctggacgttgagaggattgtttatttgatttttatcctcatcccagcaggcctggctttgtggttagttgggtacatcacaaaaataagttaaaaagaaatatttgtgccttggggagaagaaacatggtgaaaacaggctgaggttgtcagggcagagagctgaaggtggggacagtgaccgcggacccctctgtgcttgaaagatttcctccacggcctttgccccagttgtggggaggtctctgtgcacagcggggaaaatgcttgtgtcgcctttggtgggccatgtcctaattagtttcatctgcttccctgggaacttactaaggggcccagagcactgttggaagtctggttagagtccccagagagttactctaagttaaaatgagccactgaccttggctcaccttagaggaatttcctcgagaacaacagagataagaaaagaaccggcctggccaatccttcaacagctctagagccccttttctctgctggcaggggctttgtttaccagctcactgtttaggctaaatgttagggaccagatcactgcagttgaaaacaggcactccaggcttagtgacagtggcagcagaaacagtgttggctgcctttctgaccaccccactttcctgccctgagacagcagcccagggcaggtgcttcatattcagaccaggtaagcctcatttgcacaacagtcaaattgtttgttcctttaaaaaggacacaattagcctggcacggtgactcatgcttgtaatcccagcactttgggagggcaaggcaggcggatcacctgaggtcaggagtttgagaccagcctcaccaacatggaaaaaccccatctctactaaaaaaatacaaaattaaccaggggtgatggcacattcctgtaatcccagctactcgggaggccgaggcaggagaatcgcttgaacccgggaggcagaggttgaggtgagccaagattgcaccattgcactccagcctgggcaacaagagcaaaacttcatctaaaaaacagaaaatattaagatgattaccatgtgaaaacctttttaatattcaggatttggaaagtatagttgccccaggcatgtggttgttgccttaggtcctgcgaatattgctgaaaatcggattttccacattcactttcttccctgttttagggaagaaaatgatcatagacattcgattttccaaattggcgctcttattttcaatgctaattggattacttctcttccaaccctcctgcccatccatccatcccagtccccaggcatcttaaccttaccatctgagcttcagctgaaatctgtttataggcaacattgaaagtaccagattggggccaggtgtagcggcccacacctgtaatcccagcactttgggaggcggaggctagcggatcatgaggccaggctagtcgtaatgtctctttttaacactgaatatgttaggtggtttttcttgatggatttagggttaacctagttaataataaattgtttccaggtaattatcaagttttgtcattttataaatctgaagagttaatattgtcatcgatacaaataaagtgaaatctgactgag

SEQ ID NO: 418919 - DNA, 2394 bp, Homo sapiens
cctccacctcctgggttcaagagattctcctgcctcagcctcctgagtagctgggactacaggtatttcagttactaactgatctgaaagagcagcgtaaagaaagtggaaagaataaacacagctctgggcaacagaacttgaacactatcacctatgaaacgttaaaatacatatcaaaaacaccatgcaggcaccagagtcctgaaattgtcagagaatttctcacagcattgaaaagccacaagttgaccaaagctgagaagctccagctgctgaaccaccggcctgtgactgctgtggagatccagctgatggtggaagagagtgaagagcggctcacggaggagcagattgaagctcttctccacaccgtcaccagcattctgcctgcagagccagaggctgagcagaagaagaatacaaacagcaatgtggcaatggacgaagaggacccagcatagaagagcacagctggccccggcgtttcatgaagtcagaaggcctggcagccatttcctggacgttgagaggattgtttatttgatttttatcctcatcccagcaggcctggctttgtggttagttgggtacatcacaaaaataagttaaaaagaaatatttgtgccttggggagaagaaacatggtgaaaacaggctgaggttgtcagggcagagagctgaaggtggggacagtgaccgcggacccctctgtgcttgaaagatttcctccacggcctttgccccagttgtggggaggtctctgtgcacagcggggaaaatgcttgtgtcgcctttggtgggccatgtcctaattagtttcatctgcttccctgggaacttactaaggggcccagagcactgttggaagtctggttagagtccccagagagttactctaagttaaaatgagccactgaccttggctcaccttagaggaatttcctcgagaacaacagagataagaaaagaaccggcctggccaatccttcaacagctctagagccccttttctctgctggcaggggctttgtttaccagctcactgtttaggctaaatgttagggaccagatcactgcagttgaaaacaggcactccaggcttagtgacagtggcagcagaaacagtgttggctgcctttctgaccaccccactttcctgccctgagacagcagcccagggcaggtgcttcatattcagaccaggtaagcctcatttgcacaacagtcaaattgtttgttcctttaaaaaggacacaattagcctggcacggtgactcatgcttgtaatcccagcactttgggagggcaaggcaggcggatcacctgaggtcaggagtttgagaccagcctcaccaacatggaaaaaccccatctctactaaaaaaatacaaaattaaccaggggtgatggcacattcctgtaatcccagctactcgggaggccgaggcaggagaatcgcttgaacccgggaggcagaggttgaggtgagccaagattgcaccattgcactccagcctgggcaacaagagcaaaacttcatctaaaaaacagaaaatattaagatgattaccatgtgaaaacctttttaatattcaggatttggaaagtatagttgccccaggcatgtggttgttgccttaggtcctgcgaatattgctgaaaatcggattttccacattcactttcttccctgttttagggaagaaaatgatcatagacattcgattttccaaattggcgctcttattttcaatgctaattggattacttctcttccaaccctcctgcccatccatccatcccagtccccaggcatcttaaccttaccatctgagcttcagctgaaatctgtttataggcaacattgaaagtaccagattggggccaggtgtagcggcccacacctgtaatcccagcactttgggaggcggaggctagcggatcatgaggtcaggagttcaagaccagcctggccaacatggtgaaacccccatctctactaaagatataaaaaactagccgagcgtggtgttgcatgcctgtgatcccagctactcgggaggctgaggcgggggaatcgcttgaacctctgcctcccagattcaagcgattctggtgccttagcctcctgagtagctgggacttacaggcacgtaccactataccctgctaaaatttgtatttttagtagagacagggttttgccatattggccaggctagtcgtaatgtctctttttaacactgaatatgttaggtggtttttcttgatggatttagggttaacctagttaataataaattgtttccaggtaattatcaagttttgtcattttataaatctgaagagttaatattgtcatcgatacaaataaagtgaaatctgactgag

SEQ ID NO: 418920 - DNA, 2147 bp, Homo sapiens
  misc_feature (14)..(14): n is a, c, g, or t
  misc_feature (23)..(23): n is a, c, g, or t
  misc_feature (25)..(26): n is a, c, g, or t
  misc_feature (41)..(41): n is a, c, g, or t
tgcatggaatttgnacgagaccntnntgaaccacctggccntgtgacgtgctgtggagatccagctgatggtggaagagagtgaagagcggctcacggaggagcagattgaagctcttctccacaccgtcaccagcattctgcctgcagagccagaggctgagcagaagaagaatacaaacagcaatgtggcaatggacgaagaggacccagcatagaagagcacagctggccccggcgtttcatgaagtcagaaggcctggcagccatttcctggacgttgagaggattgtttatttgatttttatcctcatcccagcaggcctggctttgtggttagttgggtacatcacaaaaataagttaaaaagaaatatttgtgccttggggagaagaaacatggtgaaaacaggctgaggttgtcagggcagagagctgaaggtggggacagtgaccgcggacccctctgtgcttgaaagatttcctccacggcctttgccccagttgtggggaggtctctgtgcacagcggggaaaatgcttgtgtcgcctttggtgggccatgtcctaattagtttcatctgcttccctgggaacttactaaggggcccagagcactgttggaagtctggttagagtccccagagagttactctaagttaaaatgagccactgaccttggctcaccttagaggaatttcctcgagaacaacagagataagaaaagaaccggcctggccaatccttcaacagctctagagccccttttctctgctggcaggggctttgtttaccagctcactgtttaggctaaatgttagggaccagatcactgcagttgaaaacaggcactccaggcttagtgacagtggcagcagaaacagtgttggctgcctttctgaccaccccactttcctgccctgagacagcagcccagggcaggtgcttcatattcagaccaggtaagcctcatttgcacaacagtcaaattgtttgttcctttaaaaaggacacaattagcctggcacggtgactcatgcttgtaatcccagcactttgggagggcaaggcaggcggatcacctgaggtcaggagtttgagaccagcctcaccaacatggaaaaaccccatctctactaaaaaaatacaaaattaaccaggggtgatggcacattcctgtaatcccagctactcgggaggccgaggcaggagaatcgcttgaacccgggaggcagaggttgaggtgagccaagattgcaccattgcactccagcctgggcaacaagagcaaaacttcatctaaaaaacagaaaatattaagatgattaccatgtgaaaacctttttaatattcaggatttggaaagtatagttgccccaggcatgtggttgttgccttaggtcctgcgaatattgctgaaaatcggattttccacattcactttcttccctgttttagggaagaaaatgatcatagacattcgattttccaaattggcgctcttattttcaatgctaattggattacttctcttccaaccctcctgcccatccatccatcccagtccccaggcatcttaaccttaccatctgagcttcagctgaaatctgtttataggcaacattgaaagtaccagattggggccaggtgtagcggcccacacctgtaatcccagcactttgggaggcggaggctagcggatcatgaggtcaggagttcaagaccagcctggccaacatggtgaaacccccatctctactaaagatataaaaaactagccgagcgtggtgttgcatgcctgtgatcccagctactcgggaggctgaggcgggggaatcgcttgaacctctgcctcccagattcaagcgattctggtgccttagcctcctgagtagctgggacttacaggcacgtaccactataccctgctaaaatttgtatttttagtagagacagggttttgccatattggccaggctagtcgtaatgtctctttttaacactgaatatgttaggtggtttttcttgatggatttagggttaacctagttaataataaattgtttccaggtaattatcaagttttgtcattttataaatctgaagagttaatattgtcatcgatacaaataaagtgaaatctgactgag

SEQ ID NO: 418921 - DNA, 1559 bp, Homo sapiens
ggcacgaggctacgagctgcccgatggccaggtcatcaccattggcaatgagcggttccggtgtccggaggcgctgttccagccttccttcctgggtatggaatcttgcggcatccacgagaccaccttcaactccatcatgaagtgtgacgtggacatccgcaaagacctgtacgccaacacggtgctgtcgggcggcaccaccatgtatccgggcattgccgacaggatgcagaaggagatcaccgccctggcgcccagcaccatgaagatcaagatcatcgcacccccacatctgctggaaggtggacccttggcgctgttggtggcggcggagacagctgtgaagtgtgaggttctttgtctgctggcagctaggggcgacgaggcgggacgtcatggaagtgaaggatgccaattctgcgcttctcagtaactacgaggtatttcagttactaactgatctgaaagagcagcgtaaagaaagtggaaagaataaacacagctctgggcaacagaacttgaacactatcacctatgaaacgttaaaatacatatcaaaaacaccatgcaggcaccagagtcctgaaattgtcagagaatttctcacagcattgaaaagccacaagttgaccaaagctgagaagctccagctgctgaaccaccggcctgtgactgctgtggagatccagctgatggtggaagagagtgaagagcggctcacggaggagcagattgaagctcttctccacaccgtcaccagcattctgcctgcagagccagaggctgagcagaagaagaatacaaacagcaatgtggcaatggacgaagaggacccagcatagaagagcacagctggccccggcgtttcatgaagtcagaaggcctggcagccatttcctggacgttgagaggattgtttatttgatttttatcctcatcccagcaggcctggctttgtggttagttgggtacatcacaaaaataagttaaaaagaaatatttgtgccttggggagaagaaacatggtgaaaacaggctgagacagcagcccagggcaggtgcttcatattcagaccaggtaagcctcatttgcacaacagtcaaattgtttgttcctttaaaaaggacacaattagcctggcacggtgactcatgcttgtaatcccagcactttgggagggcaaggcaggcggatcacctgaggtcaggagtttgagaccagcctcaccaacatggaaaaaccccatctctactaaaaaaatacaaaattaaccaggggtgatggcacattccctgagtagctgggacttacaggcacgtaccactataccctgctaaaatttgtatttttagtagagacagggttttgccatattggccaggctagtcgtaatgtctctttttaacactgaatatgttaggtggtttttcttgatggatttagggttaacctagttaataataaattgtttccaggtaattatcaagttttgtcattttataaatctgaagagttaatattgtcatcgatacaaataaagtgaaatctgactgag

SEQ ID NO: 418922 - DNA, 452 bp, Homo sapiens
accgtgggcctttgactgagctgcagggagggagagagatggacccagtcagccagaagggttgaccatggcacttggtcctgtctgtgaacttgcaggtgtggaaaataaggttcagtgaggcgatggatgcatcgcataacggagtctcactctgttgcccaggctggagttcaatggtgcaatgatctcggctcactgcaacctccgcctcttgggtgcaagtaactctcctgcctcagcctcccgagtagctgggattacagcaatggtgaaaggcagttttcctcgaatgagagcatcagacaggcatgcccgggaccagctgtgggaatcctggagagacagacatgaagcacttcacttggaaatgctttcttagtctttcaatttaacattcaaagggatgagggatttttatcaacagcagccagctgcaatgcaaagtcatg

SEQ ID NO: 418923 - DNA, 324 bp, Homo sapiens
gagaagacgacagaaggggtaggggaactgctgcccacctatacccactacctgccccctggctctcccactccatacaaccctccccttgctggtgcccccatgcccctaacccacctctaaccctcatggacgcagacctcacgggacgggcctcatcctccttttttaatccagcagcatcccctaccccaggctgtcaaccctttctcctgttggactacagttcagaggcagcctgcagtcctcccatgatagccagggagagccgcacaacatacaattatatttttggtagtattaaacagttttgtattattcaac

SEQ ID NO: 418924 - DNA, 1245 bp, Homo sapiens
ggtggggggggcggggggcgtggcaccctgagggtgttgggggctgggacaaacaggacacctgggtttacctacgggctgaggatgttggcgcccttaaggaggtgcagtcttatgggagggacaggggcggagtcagtctttaaaagctgttcccaggtctggcccgcctgccacaaacgctgagcccaggtgggagaggtctggcctatccgcgcctggcagctgtcggaactccggagaccacaaaggggtttatggtttaccccctccacggaaggatcgacgcttcacgttgaggggagggcattcaggacgccctcttaaggcttctcccaacccatggcgctaccaggctcctcacaggaccaggcctggagcctggagcctccggctgccacggctgctgcctcctcatcttcgggaccccaggagcgggagggcgctgggagccccgcggcccccgggacgctgcccctggagaaggtgaagcggccgatgaacgcgttcatggtgtggagctccgctcagcgccgccagatggcgcagcagaaccccaagatgcacaactccgagatctccaagcgcctgggcgcgcagtggaagctgctggacgaggacgagaagcggcccttcgtggaggaggccaagcggctccgcgcccgacacctgcgcgactaccccgactacaagtaccggcctcggcgcaaggccaagagctcgggcgccggaccttcccgctgcggacagggaagaggcaacctggccagcggcggcccgctctgggggccggggtacgcgaccacccaaccgagcagaggctttgggtacagaccccccagctactcgacagcctacctgcctggcagctatggctcttcccactgcaaactggaagccccctcaccgtgctccctccctcagagtgaccctaggctccagggggaactgctgcccacctatacccactacctgccccctggctctcccactccatacaaccctccccttgctggtgcccccatgcccctaacccacctctaaccctcatggacgcagacctcacgggacgggcctcatcctccttttttaatccagcagcatcccctaccccaggctgtcaaccctttctcctgttggactacagttcagaggcagcctgcagtcctcccatgatagccagggagagccgcacaacatacaattatatttttggtagtattaaacagttttgtattattcaac

SEQ ID NO: 418925 - DNA, 1493 bp, Homo sapiens
ggtggggggggcggggggcgtggcaccctgagggtgttgggggctgggacaaacaggacacctgggtttacctacgggctgaggatgttggcgcccttaaggaggtgcagtcttatgggagggacaggggcggagtcagtctttaaaagctgttcccaggtctggcccgcctgccacaaacgctgagcccaggtgggagaggtctggcctatccgcgcctggcagctgtcggaactccggagaccacaaaggggtttatggtttaccccctccacggaaggtcggtctgatcgcagctgcgggtcggggagagggaccgggggtcccccagtcagtaggcctcagaacacctcttcagtgccggggcaccagacagcggattttgcattcgactctccccaaagtgtgccgaacaggttggaagcaaaggctccggtttaagctctgggcttggggataaaatacactttttaaggacccaagttcctcggcaacgactccagactgggaagacctttccattttcaggatcgacgcttcacgttgaggggagggcattcaggacgccctcttaaggcttctcccaacccatggcgctaccaggctcctcacaggaccaggcctggagcctggagcctccggctgccacggctgctgcctcctcatcttcgggaccccaggagcgggagggcgctgggagccccgcggcccccgggacgctgcccctggagaaggtgaagcggccgatgaacgcgttcatggtgtggagctccgctcagcgccgccagatggcgcagcagaaccccaagatgcacaactccgagatctccaagcgcctgggcgcgcagtggaagctgctggacgaggacgagaagcggcccttcgtggaggaggccaagcggctccgcgcccgacacctgcgcgactaccccgactacaagtaccggcctcggcgcaaggccaagagctcgggcgccggaccttcccgctgcggacagggaagaggcaacctggccagcggcggcccgctctgggggccggggtacgcgaccacccaaccgagcagaggctttgggtacagaccccccagctactcgacagcctacctgcctggcagctatggctcttcccactgcaaactggaagccccctcaccgtgctccctccctcagagtgaccctaggctccagggggaactgctgcccacctatacccactacctgccccctggctctcccactccatacaaccctccccttgctggtgcccccatgcccctaacccacctctaaccctcatggacgcagacctcacgggacgggcctcatcctccttttttaatccagcagcatcccctaccccaggctgtcaaccctttctcctgttggactacagttcagaggcagcctgcagtcctcccatgatagccagggagagccgcacaacatacaattatatttttggtagtattaaacagttttgtattattcaac

SEQ ID NO: 418926 - DNA, 389 bp, Homo sapiens
actggggtggcccagagtccagcgacaagggcgaccccttcgctacctgtctgcacgtcccagcacccaagccgaggccagactcttggggtgaggacaactgggagggcctcgagactgacagtcgacaggtcaaggctgagctggcccggaagaagcgcgaggagcggcggcgggagatggaggccaaacgcgccgagaggaaggtggccaagggccccatgaagctgggagcccggaagctggactgaaccgtggcggtggcccttcccggctgcggagagcccgccccacagatgtatttattgtacaaaccatgtgagcccggccggcccagccaggccatctcacgtgtacataatcagagccacaataaattctatttcaca

SEQ ID NO: 418927 - DNA, 487 bp, Homo sapiens
gtctcactccgtcactccatggctggagtgcaggagtgcgatcatagctcactgtcccgtcaaactccgaggctcaggtgatcctcccacctcagcctcccaagtagctaggactacaggcttgcaactgtgggtgacaggatatgcactgctggggtccaggaggggcagtcctccaactcccagggcaggccctggctaaggcagtcacaagggccaagttcctcttgaaacccagaattaagtacagcccctttgttcctcaaccctgcagctcccatcatccctcccccacacagtgctctctggagtacagggtacgagctgcaggtgctagatggggaaaatgaggtggaggctccatggtgggggctagaacctgggactcctgattactagttggggtccctcccctagacaaagcccagattctcattcccaacagatccagggaagaaacaaagcagataataccttcaggctttaa

SEQ ID NO: 418928 - DNA, 556 bp, Homo sapiens
taattagccagatgtggtagctcacacctgaggtcctagctactcggaaggctgaggcaggagaatcgcttgaacccaagaggcagaggttgcagtgagtcgagatcacaccggtgtactccagcctgggcaacagagtgagaccctgtctctaaataaataaaagcacataaagaggggacattttggcttgcaactgtgggtgacaggatatgcactgctggggtccaggaggggcagtcctccaactcccagggcaggccctggctaaggcagtcacaagggccaagttcctcttgaaacccagaattaagtacagcccctttgttcctcaaccctgcagctcccatcatccctcccccacacagtgctctctggagtacagggtacgagctgcaggtgctagatggggaaaatgaggtggaggctccatggtgggggctagaacctgggactcctgattactagttggggtccctcccctagacaaagcccagattctcattcccaacagatccagggaagaaacaaagcagataataccttcaggctttaa

SEQ ID NO: 418929 - DNA, 987 bp, Homo sapiens
ctcctctttgacatttccaccatattccccttaggtatgtacctgtttggactttaatttagagtgtaacttttggtcaagaatcctggagagaaaagacgggtactaaagcctcgctagtgatttacctgggtgccgacccccacaactcatccaccctacatgcatacttcaaactcctccaggcagatactccctgcctgacacacagtgacactttgggaaaaattgcagaacagtaaccaactctgagcagataaatgtgatgtcaaaatgatagtaatgagagatgtcgttcgttgaaagcctgctagctgccatgcactatactatttcttacatctaaatctgattaagttataccccattttataaatagacactttgataagtaaacctatctaagatcaaaatactgagaaatgtcctaattggggatttgaacctggttctaattccaaagtccaagctacatccaccccaacctcctacctcctatctccaagactttgtgagtaaaaaaacaagtgtcacttctctccttctcttttttctgtcctaaaggaagctgggagctaaccacttaggactagtactaatctttcagagaaagggatgaggggagccttgttatttctgtggggttcagctctcagaccagagtaagacaggcaacaaggttgaggagtagccatatgcagaaataacctgtgtatctagccacaggatctccaacactgtgtcactcgggaatcaaaatacagagacagttcctcaatagagtgtggatctagcccagaatgtggacaaggggagtggagaaggggagaggtacacactgagcattgtaacaaggcctgtcctcaagcttgaggaggattaggaagatggcttgagtctgggagtaggaggctgcagtgagctatgattgtaccactgtaccccagcctaggtgacagagtgagaccctgtctcttaaaagaaaaa

SEQ ID NO: 418930 - DNA, 745 bp, Homo sapiens
cgcgacccgccccgtcccgtccagtctggcctgggcgccgcgggaacgctgtcctagctgccgccacccgaacagcctgtcctggtgccccggctccctgccccgcgcccagtcatgaccctgcgcccctcactcctcccgctccatctgctgctgctgctgctgctcagtgcggcggtgtgccgggctgaggctgggctcgaaaccgaaagtcccgtccggaccctccaagtggagaccctggtggagcccccagaaccatgtgccgagcccgctgcttttggagacacgcttcacatacactacacgggaagcttggtagatggacgtattattgacacctccctgaccagagaccctctggttatagaacttggccaaaagcaggtgattccaggtctggagcagagtcttctcgacatgtgtgtgggagagaagcgaagggcaatcattccttctcacttggcctatggaaaacggggatttccaccatctgtcccagcggatgcagtggtgcagtatgacgtggagctgattgcactaatccgagccaactactggctaaagctggtgaagggcattttgcctctggtagggatggccatggtgccagccctcctgggcctcattgggtatcacctatacagaaaggccaatagacccaaagtctccaaaaagaagctcaaggaagagaaacgaaacaagagcaaaaagaaataataaataataaattttaaaaaactta

SEQ ID NO: 418931 - DNA, 867 bp, Homo sapiens
cgcgacccgccccgtcccgtccagtctggcctgggcgccgcgggaacgctgtcctagctgccgccacccgaacagcctgtcctggtgccccggctccctgccccgcgcccagtcatgaccctgcgcccctcactcctcccgctccatctgctgctgctgctgctgctcagtgcggcggtgtgccgggctgaggctgggctcgaaaccgaaagtcccgtccggaccctccaagtggagaccctggtggagcccccagaaccatgtgccgagcccgctgcttttggagacacgcttcacatacactacacgggaagcttggtagatggacgtattattgacacctccctgaccagagaccctctggttatagaacttggccaaaagcaggtgattccaggtctggagcagagtcttctcgacatgtgtgtggggtggaaaaattcgtgttttgggtgtgaagattcagggggttttgctgaaggagcttcagctggactgaggctgctggcctacctctcctgcctctggctgtgactgacattccttccctcagagagaagcgaagggcaatcattccttctcacttggcctatggaaaacggggatttccaccatctgtcccagcggatgcagtggtgcagtatgacgtggagctgattgcactaatccgagccaactactggctaaagctggtgaagggcattttgcctctggtagggatggccatggtgccagccctcctgggcctcattgggtatcacctatacagaaaggccaatagacccaaagtctccaaaaagaagctcaaggaagagaaacgaaacaagagcaaaaagaaataataaataataaattttaaaaaactta

SEQ ID NO: 418932 - DNA, 171 bp, Homo sapiens
aattcaagcttctaacgatgtacggggacatggtgccagccctcctgggcctcattgggtatcacctatacagaaaggccaatagacccaaagtctccaaaaagaagctcaaggaagagaaacgaaacaagagcaaaaagaaataataaataataaattttaaaaaactta

SEQ ID NO: 418933 - DNA, 2148 bp, Homo sapiens
cgcgacccgccccgtcccgtccagtctggcctgggcgccgcgggaacgctgtcctagctgccgccacccgaacagcctgtcctggtgccccggctccctgccccgcgcccagtcatgaccctgcgcccctcactcctcccgctccatctgctgctgctgctgctgctcagtgcggcggtgtgccgggctgaggctgggctcgaaaccgaaagtcccgtccggaccctccaagtggagaccctggtggagcccccagaaccatgtgccgagcccgctgcttttggagacacgcttcacatacactacacgggaagcttggtagatggacgtattattgacacctccctgaccagagaccctctggttatagaacttggccaaaagcaggtgattccaggtctggagcagagtcttctcgacatgtgtgtgggagagaagcgaagggcaatcattccttctcacttggcctatggaaaacggggatttccaccatctgtcccagggactaaagacaacctgatgaggccacctggcatgacctccagcagccagtaacttgttagggaagagacctgcttgggccacatgggtctgctgcctgtgccaccacctttcccagaacactggacttctttcctgcccttttctacaactctacgctgtgtcagctgtacagccaccccccaccccttcctttcagcctccatcagggaagagacagtaaaaataatcacagtcaagtgattcaaaacaaaacaaaaagcaactgttaaagccaagtctgccccataactttaaaagccatcattggtcactgccgatgtctatttttgaagggttgagatggacagatttcccaagatgcatatcttttgctttcagttctaacaaatgttctattagctaaaatgtgttgtactccacagagtattgggctcgtaattcttttttttttttggagatggagtttcactcttgttgcccaggctggagtgcaatagtgcaatcttcactcaccacaacctccgccacccgggttcaagcaattctcctgtctcagcctcccgagtagctgggattacaggcatgcgccaccacgaccggctaattttatacttttagtagagatggggcttctccatgttggtcaggctggtctcaaactcccaacctcaggtgatccgcctgccttggcttcccaaagtgcggggattacaggcatgagccaccgcgcctggctgggctcgttaattcttatcctagttccagcttagaggaaggcctggaaggagggtagggggaccaaggagaaacttttacccaaagccctattacctccccattcccagtgctgcttatttgtacctcttctgcccactcatttctgttccacctgcccctttacttcttaagcagcatcctcatccttcttcctcttcagctcttatgttgaaactcctgttatctcataatcacgttgaatgtgctcattggttggttgattttttaaagtctagtttaaatccatttaatttcagccctgcaaagactctatccgtgtggttatttggaaatacgataaattagtagttagtatagagggttctcccacttacaaatggagaagagcctgtacatttcatattcacagaaagttttcctgcattcaaagacttgtcactggacccaagccacatgtgtagttggggtcaacatgattatcactggactctgctcgtaaatcctcctctactcttgtctaaaggaattcaagcccacatttaaatcttgtcagcttcatagttgttggctttgctgtggcctacgctccctattttcattcagattctgagccctggataaaatgcagagagtctaaccctctccacccctctgcctctccagcggatgcagtggtgcagtatgacgtggagctgattgcactaatccgagccaactactggctaaagctggtgaagggcattttgcctctggtagggatggccatggtgccagccctcctgggcctcattgggtatcacctatacagaaaggccaatagacccaaagtctccaaaaagaagctcaaggaagagaaacgaaacaagagcaaaaagaaataataaataataaattttaaaaaactta

SEQ ID NO: 418934 - DNA, 2518 bp, Homo sapiens
cgcgacccgccccgtcccgtccagtctggcctgggcgccgcgggaacgctgtcctagctgccgccacccgaacagcctgtcctggtgccccggctccctgccccgcgcccagtcatgaccctgcgcccctcactcctcccgctccatctgctgctgctgctgctgctcagtgcggcggtgtgccgggctgaggctgggctcgaaaccgaaagtcccgtccggaccctccaagtggagaccctggtggagcccccagaaccatgtgccgagcccgctgcttttggagacacgcttcacatacactacacgggaagcttggtagatggacgtattattgacacctccctgaccagagaccctctggttatagaacttggccaaaagcaggtgattccaggtctggagcagagtcttctcgacatgtgtgtggggtgagtatctcggcaggggtgggcctgggtaccccctttgcatgggtagaggctttctcggccatcctcactccttaagcaggagaatgtggaataaaggaccctgcttcccactggacaggtccaggtcagtgggacctctgagggcattcaaagcctctgtgcctcttgcgctgttgcttttgtcgggggagttgaggcacatggggagatggacacctttgctggccagcctgtttggtgttcaggtggaaaaattcgtgttttgggtgtgaagattcagggggttttgctgaaggagcttcagctggactgaggctgctggcctacctctcctgcctctggctgtgactgacattccttccctcagagagaagcgaagggcaatcattccttctcacttggcctatggaaaacggggatttccaccatctgtcccagggactaaagacaacctgatgaggccacctggcatgacctccagcagccagtaacttgttagggaagagacctgcttgggccacatgggtctgctgcctgtgccaccacctttcccagaacactggacttctttcctgcccttttctacaactctacgctgtgtcagctgtacagccaccccccaccccttcctttcagcctccatcagggaagagacagtaaaaataatcacagtcaagtgattcaaaacaaaacaaaaagcaactgttaaagccaagtctgccccataactttaaaagccatcattggtcactgccgatgtctatttttgaagggttgagatggacagatttcccaagatgcatatcttttgctttcagttctaacaaatgttctattagctaaaatgtgttgtactccacagagtattgggctcgtaattcttttttttttttggagatggagtttcactcttgttgcccaggctggagtgcaatagtgcaatcttcactcaccacaacctccgccacccgggttcaagcaattctcctgtctcagcctcccgagtagctgggattacaggcatgcgccaccacgaccggctaattttatacttttagtagagatggggcttctccatgttggtcaggctggtctcaaactcccaacctcaggtgatccgcctgccttggcttcccaaagtgcggggattacaggcatgagccaccgcgcctggctgggctcgttaattcttatcctagttccagcttagaggaaggcctggaaggagggtagggggaccaaggagaaacttttacccaaagccctattacctccccattcccagtgctgcttatttgtacctcttctgcccactcatttctgttccacctgcccctttacttcttaagcagcatcctcatccttcttcctcttcagctcttatgttgaaactcctgttatctcataatcacgttgaatgtgctcattggttggttgattttttaaagtctagtttaaatccatttaatttcagccctgcaaagactctatccgtgtggttatttggaaatacgataaattagtagttagtatagagggttctcccacttacaaatggagaagagcctgtacatttcatattcacagaaagttttcctgcattcaaagacttgtcactggacccaagccacatgtgtagttggggtcaacatgattatcactggactctgctcgtaaatcctcctctactcttgtctaaaggaattcaagcccacatttaaatcttgtcagcttcatagttgttggctttgctgtggcctacgctccctattttcattcagattctgagccctggataaaatgcagagagtctaaccctctccacccctctgcctctccagcggatgcagtggtgcagtatgacgtggagctgattgcactaatccgagccaactactggctaaagctggtgaagggcattttgcctctggtagggatggccatggtgccagccctcctgggcctcattgggtatcacctatacagaaaggccaatagacccaaagtctccaaaaagaagctcaaggaagagaaacgaaacaagagcaaaaagaaataataaataataaattttaaaaaactta

SEQ ID NO: 418935 - DNA, 2320 bp, Homo sapiens
gggatctttggaagagcatccgtgacccctgtagtccgatcgtaggtggagcccccagaaccatgtgccgagcccgctgcttttggagacacgcttcacatacactacacgggaagcttggtagatggacgtattattgacacctccctgaccagagaccctctggttatagaacttggccaaaagcaggtgattccaggtctggagcagagtcttctcgacatgtgtgtggggtgagtatctcggcaggggtgggcctgggtaccccctttgcatgggtagaggctttctcggccatcctcactccttaagcaggagaatgtggaataaaggaccctgcttcccactggacaggtccaggtcagtgggacctctgagggcattcaaagcctctgtgcctcttgcgctgttgcttttgtcgggggagttgaggcacatggggagatggacacctttgctggccagcctgtttggtgttcaggtggaaaaattcgtgttttgggtgtgaagattcagggggttttgctgaaggagcttcagctggactgaggctgctggcctacctctcctgcctctggctgtgactgacattccttccctcagagagaagcgaagggcaatcattccttctcacttggcctatggaaaacggggatttccaccatctgtcccagggactaaagacaacctgatgaggccacctggcatgacctccagcagccagtaacttgttagggaagagacctgcttgggccacatgggtctgctgcctgtgccaccacctttcccagaacactggacttctttcctgcccttttctacaactctacgctgtgtcagctgtacagccaccccccaccccttcctttcagcctccatcagggaagagacagtaaaaataatcacagtcaagtgattcaaaacaaaacaaaaagcaactgttaaagccaagtctgccccataactttaaaagccatcattggtcactgccgatgtctatttttgaagggttgagatggacagatttcccaagatgcatatcttttgctttcagttctaacaaatgttctattagctaaaatgtgttgtactccacagagtattgggctcgtaattcttttttttttttggagatggagtttcactcttgttgcccaggctggagtgcaatagtgcaatcttcactcaccacaacctccgccacccgggttcaagcaattctcctgtctcagcctcccgagtagctgggattacaggcatgcgccaccacgaccggctaattttatacttttagtagagatggggcttctccatgttggtcaggctggtctcaaactcccaacctcaggtgatccgcctgccttggcttcccaaagtgcggggattacaggcatgagccaccgcgcctggctgggctcgttaattcttatcctagttccagcttagaggaaggcctggaaggagggtagggggaccaaggagaaacttttacccaaagccctattacctccccattcccagtgctgcttatttgtacctcttctgcccactcatttctgttccacctgcccctttacttcttaagcagcatcctcatccttcttcctcttcagctcttatgttgaaactcctgttatctcataatcacgttgaatgtgctcattggttggttgattttttaaagtctagtttaaatccatttaatttcagccctgcaaagactctatccgtgtggttatttggaaatacgataaattagtagttagtatagagggttctcccacttacaaatggagaagagcctgtacatttcatattcacagaaagttttcctgcattcaaagacttgtcactggacccaagccacatgtgtagttggggtcaacatgattatcactggactctgctcgtaaatcctcctctactcttgtctaaaggaattcaagcccacatttaaatcttgtcagcttcatagttgttggctttgctgtggcctacgctccctattttcattcagattctgagccctggataaaatgcagagagtctaaccctctccacccctctgcctctccagcggatgcagtggtgcagtatgacgtggagctgattgcactaatccgagccaactactggctaaagctggtgaagggcattttgcctctggtagggatggccatggtgccagccctcctgggcctcattgggtatcacctatacagaaaggccaatagacccaaagtctccaaaaagaagctcaaggaagagaaacgaaacaagagcaaaaagaaataataaataataaattttaaaaaactta

SEQ ID NO: 418936 - DNA, 578 bp, Homo sapiens
  misc_feature (16)..(16): n is a, c, g, or t
  misc_feature (18)..(18): n is a, c, g, or t
  misc_feature (27)..(27): n is a, c, g, or t
  misc_feature (31)..(31): n is a, c, g, or t
  misc_feature (33)..(33): n is a, c, g, or t
  misc_feature (42)..(42): n is a, c, g, or t
  misc_feature (44)..(44): n is a, c, g, or t
aacctgcattaccaangnttaaactcntatntntaaagtttntntgagtaaacttgccagttcctacctggcacggagaagtgcagggtggagagatctccgagaagcgccagccttctggggcttcctgttccttacagcgggaagcttggtagatggacgtattattgacacctccctgaccagagaccctctggttatagaacttggccaaaagcaggtgattccaggtctggagcagagtcttctcgacatgtgtgtgggagagaagcgaagggcaatcattccttctcacttggcctatggaaaacggggatttccaccatctgtcccagcggatgcagtggtgcagtatgacgtggagctgattgcactaatccgagccaactactggctaaagctggtgaagggcattttgcctctggtagggatggccatggtgccagccctcctgggcctcattgggtatcacctatacagaaaggccaatagacccaaagtctccaaaaagaagctcaaggaagagaaacgaaacaagagcaaaaagaaataataaataataaattttaaaaaactta

SEQ ID NO: 418937 - DNA, 1689 bp, Homo sapiens
cgcgacccgccccgtcccgtccagtctggcctgggcgccgcgggaacgctgtcctagctgccgccacccgaacagcctgtcctggtgccccggctccctgccccgcgcccagtcatgaccctgcgcccctcactcctcccgctccatctgctgctgctgctgctgctcagtgcggcggtgtgccgggctgaggctgggctcgaaaccgaaagtcccgtccggaccctccaagtggagaccctggtggagcccccagaaccatgtgccgagcccgctgcttttggagacacgcttcacatacactacacgggaagcttggtagatggacgtattattgacacctccctgaccagagaccctctggttatagaacttggccaaaagcaggtgattccaggtctggagcagagtcttctcgacatgtgtgtgggagagaagcgaagggcaatcattccttctcacttggcctatggaaaacggggatttccaccatctgtcccagatggagtttcactcttgttgcccaggctggagtgcaatagtgcaatcttcactcaccacaacctccgccacccgggttcaagcaattctcctgtctcagcctcccgagtagctgggattacaggcatgcgccaccacgaccggctaattttatacttttagtagagatggggcttctccatgttggtcaggctggtctcaaactcccaacctcaggtgatccgcctgccttggcttcccaaagtgcggggattacaggcatgagccaccgcgcctggctgggctcgttaattcttatcctagttccagcttagaggaaggcctggaaggagggtagggggaccaaggagaaacttttacccaaagccctattacctccccattcccagtgctgcttatttgtacctcttctgcccactcatttctgttccacctgcccctttacttcttaagcagcatcctcatccttcttcctcttcagctcttatgttgaaactcctgttatctcataatcacgttgaatgtgctcattggttggttgattttttaaagtctagtttaaatccatttaatttcagccctgcaaagactctatccgtgtggttatttggaaatacgataaattagtagttagtatagagggttctcccacttacaaatggagaagagcctgtacatttcatattcacagaaagttttcctgcattcaaagacttgtcactggacccaagccacatgtgtagttggggtcaacatgattatcactggactctgctcgtaaatcctcctctactcttgtctaaaggaattcaagcccacatttaaatcttgtcagcttcatagttgttggctttgctgtggcctacgctccctattttcattcagattctgagccctggataaaatgcagagagtctaaccctctccacccctctgcctctccagcggatgcagtggtgcagtatgacgtggagctgattgcactaatccgagccaactactggctaaagctggtgaagggcattttgcctctggtagggatggccatggtgccagccctcctgggcctcattgggtatcacctatacagaaaggccaatagacccaaagtctccaaaaagaagctcaaggaagagaaacgaaacaagagcaaaaagaaataataaataataaattttaaaaaactta

SEQ ID NO: 418938 - DNA, 517 bp, Homo sapiens
ccagcggtccaggtgtgtgttgcgcgcctgctgggagggagagggtgctagatgtatgctcttgatgctctctccccccagggaagcttggtagatggacgtattattgacacctccctgaccagagaccctctggttatagaacttggccaaaagcaggtgattccaggtctggagcagagtcttctcgacatgtgtgtgggagagaagcgaagggcaatcattccttctcacttggcctatggaaaacggggatttccaccatctgtcccagcggatgcagtggtgcagtatgacgtggagctgattgcactaatccgagccaactactggctaaagctggtgaagggcattttgcctctggtagggatggccatggtgccagccctcctgggcctcattgggtatcacctatacagaaaggccaatagacccaaagtctccaaaaagaagctcaaggaagagaaacgaaacaagagcaaaaagaaataataaataataaattttaaaaaactta

SEQ ID NO: 418939 - DNA, 2270 bp, Homo sapiens
cgcgacccgccccgtcccgtccagtctggcctgggcgccgcgggaacgctgtcctagctgccgccacccgaacagcctgtcctggtgccccggctccctgccccgcgcccagtcatgaccctgcgcccctcactcctcccgctccatctgctgctgctgctgctgctcagtgcggcggtgtgccgggctgaggctgggctcgaaaccgaaagtcccgtccggaccctccaagtggagaccctggtggagcccccagaaccatgtgccgagcccgctgcttttggagacacgcttcacatacactacacgggaagcttggtagatggacgtattattgacacctccctgaccagagaccctctggttatagaacttggccaaaagcaggtgattccaggtctggagcagagtcttctcgacatgtgtgtggggtggaaaaattcgtgttttgggtgtgaagattcagggggttttgctgaaggagcttcagctggactgaggctgctggcctacctctcctgcctctggctgtgactgacattccttccctcagagagaagcgaagggcaatcattccttctcacttggcctatggaaaacggggatttccaccatctgtcccagggactaaagacaacctgatgaggccacctggcatgacctccagcagccagtaacttgttagggaagagacctgcttgggccacatgggtctgctgcctgtgccaccacctttcccagaacactggacttctttcctgcccttttctacaactctacgctgtgtcagctgtacagccaccccccaccccttcctttcagcctccatcagggaagagacagtaaaaataatcacagtcaagtgattcaaaacaaaacaaaaagcaactgttaaagccaagtctgccccataactttaaaagccatcattggtcactgccgatgtctatttttgaagggttgagatggacagatttcccaagatgcatatcttttgctttcagttctaacaaatgttctattagctaaaatgtgttgtactccacagagtattgggctcgtaattcttttttttttttggagatggagtttcactcttgttgcccaggctggagtgcaatagtgcaatcttcactcaccacaacctccgccacccgggttcaagcaattctcctgtctcagcctcccgagtagctgggattacaggcatgcgccaccacgaccggctaattttatacttttagtagagatggggcttctccatgttggtcaggctggtctcaaactcccaacctcaggtgatccgcctgccttggcttcccaaagtgcggggattacaggcatgagccaccgcgcctggctgggctcgttaattcttatcctagttccagcttagaggaaggcctggaaggagggtagggggaccaaggagaaacttttacccaaagccctattacctccccattcccagtgctgcttatttgtacctcttctgcccactcatttctgttccacctgcccctttacttcttaagcagcatcctcatccttcttcctcttcagctcttatgttgaaactcctgttatctcataatcacgttgaatgtgctcattggttggttgattttttaaagtctagtttaaatccatttaatttcagccctgcaaagactctatccgtgtggttatttggaaatacgataaattagtagttagtatagagggttctcccacttacaaatggagaagagcctgtacatttcatattcacagaaagttttcctgcattcaaagacttgtcactggacccaagccacatgtgtagttggggtcaacatgattatcactggactctgctcgtaaatcctcctctactcttgtctaaaggaattcaagcccacatttaaatcttgtcagcttcatagttgttggctttgctgtggcctacgctccctattttcattcagattctgagccctggataaaatgcagagagtctaaccctctccacccctctgcctctccagcggatgcagtggtgcagtatgacgtggagctgattgcactaatccgagccaactactggctaaagctggtgaagggcattttgcctctggtagggatggccatggtgccagccctcctgggcctcattgggtatcacctatacagaaaggccaatagacccaaagtctccaaaaagaagctcaaggaagagaaacgaaacaagagcaaaaagaaataataaataataaattttaaaaaactta

SEQ ID NO: 418940 - DNA, 762 bp, Homo sapiens
gaggcggtggtggcgagagtcagtctttcagagcacaggatggaacaagaactccagccactgactgtctcatgtatctgcaagggccgaggaaattaatgacccaaggaggctatgatatggtccaaaaacttttcctggattttttccgtaggcggctgagccagaggccaactgcagaggaactggaacagaggaacattttgaaacctcggaatgaacaagaggaacaggaggagaagagagagatcaagaggaggctaacccgaaagctcagtcaaaggcccacggtggaagagcttcgggaaagaaagatcctcatccgcttcagtgactacgtggaggtggctgacgctcaggactatgaccgcagggcagataagccgtggacccgcctcaccgctgcagacaaagtaagcagaggggagtgctggagagtgggaggcaggaccgtctgctgggtctcgctgggctcaccgctggggagcgtgtagggagacctgcagccaggcctcagccgcagtccccataatggagtgttgagaccccaacacctttccccaggggccacagataatctgcggaaaggctgctgaatcggagaaaacacaaggcacataatactgtgcccattttacaggaggaggagcagcagcctgggaggctgtgcccagagaaagagaatagcactggataggtgtagacaggtgaaggcaagaggctccaggctcatcacagcccttccgtataggggatggtgct

SEQ ID NO: 418941 - DNA, 467 bp, Homo sapiens
gaggcggtggtggcgagagtcagtctttcagagcacaggatggaacaagaactccagccactgactgtctcatgtatctgcaagggccgaggaaattaatgacccaaggaggctatgatatggtccaaaaacttttcctggattttttccgtaggcggctgagccagaggccaactgcagaggaactggaacagaggaacattttgaaacgtaagtgactaagcccatggcaatccctgatgttttgtgcccgttcttccaatcaccaacacgccaccactaaccccctgacattgaccccactccgcataacgttttaacctcttctcctcctccatcccctcgccccctcacatatccaccctccctccacctcataccccactgggcctaactcccccccctcctctaccccacacctcccagctacctaacccacatccctcttcaacatcctcccctccccg

SEQ ID NO: 418942 - DNA, 1275 bp, Homo sapiens
gaggcggtggtggcgagagtcagtctttcagagcacaggatggaacaagaactccagccactgactgtctcatgtatctgcaagggccgaggaaattaatgacccaaggaggctatgatatggtccaaaaacttttcctggattttttccgtaggcggctgagccagaggccaactgcagaggaactggaacagaggaacattttgaaacctcggaatgaacaagaggaacaggaggagaagagagagatcaagaggaggctaacccgaaagctcagtcaaaggcccacggtggaagagcttcgggaaagaaagatcctcatccgcttcagtgactacgtggaggtggctgacgctcaggactatgaccgcagggcagataagccgtggacccgcctcaccgctgcagacaaagctgccatccgaaaggagctcaatgaattcaaaagcactgagatggaagttcatgaattgagtagacacttaacaaggtttcaccgaccttaacagtcgaattcctcttgagtgctatgctgtcttcaaaacataaatttataagaaccataagtgctggtatttattcacttccccattacgatgtaaatcttctgaactgccttttttttaaaaagaagaaaaatcaaggaaacacaatcaggattttatgtgtgaaaacgcaaaagtgatggctcggcggtccgagctgctggtcccacttctgacaccaaaatgcatcccaacccccggcagtgccaagggcaccagcagggccctgactgaagactgtctggcaggtggaacggtccttgtcctctccagccaggcccagcaggcactaccttcatgaagtctccagcaaacctcttcctcacaagtgtctgtcatctgagtccaaagaaagctgaaggggtgggtttgttttgggggtactgtgcaaagctaatgatctggttggacttctacacttggccaaatgtactggctccagacatgacatttggtttgggggccctttgaagttgatgccaagaaggagtgaacacttctcagttgcccctggcttttccctcctttcagccaccacccacacaatgaacaaaagggaagggcccatttctgggggagtctggctgcctcttggctacgaaggctggcactgagcacccatcctgctccctctgcctgagctgagctgcctttcaggaagctctggtttagaaggggaaagatgtcatatgctcagttcaaataatcaacccaactgtgtccagagtgt

SEQ ID NO: 418943 - DNA, 2627 bp, Homo sapiens
  misc_feature (1393)..(1393): n is a, c, g, or t
attttctttctctcccttcacccctttctctcctttgctctctttctttctctctcccttttttttcctttttccctctctttcccactccctccccaccccttcccttcctctcccctcccccttcccctccccctcccccgtgcgcgagcctcttcctctcccctcctcccccttccgcctctctccctctccctccgtctccttctccctctcagctcgccgggcgaccctgctcctgcctcccacattaatggcggcatcctcggaggatgatatagaccggcggcccatccggagagtgcgctccaagagcgacacgccgtacctcgcagaggccaggatctcctttaacctgggggcagctgaggaagtggagaggctggcggcgatgcgttctgactccctcgtcccaggcacccacaccccacccatccgcaggagaagtaagtttgccaacctgggaaggattttcaagccttggaaatggaggaagaagaaaagcgaaaagttcaaacacacgtcagcagccctggaaaggaaaatatctatgaggcaaagcagagaagagctgataaagcgaggagtcctgaaggaaatctatgataaagatggggaactctctatatccaatgaagaggactccctagaaaatgggcagtccctgagctccagccagctgtctctgcctgccctgtccgaaatggagccagtcccaatgcccagggatccctgctcatatgaggtgctccaaccgtcagacatcatggatgggccagatcctggcgcccctgtgaaattgccttgtctgccagtgaaactgtcgcctccgctacctccaaagaaagtcatgatctgtatgcccgtgggggggccagacctctcactggtgtcctacacagcccagaagagtggccagcagggtgtggcccagcaccaccacactgtcctgccctcccagatccagcaccagctgcagtacggcagccacggccagcacctcccctccaccaccggctccctccccatgcacccctcgggctgcagaatgatagacgagctcaacaaaacgctggccatgaccatgcagaggctggaaagctctgagcagcgggtcccctgttccacttcttaccacagctctgggttgcactcgggtgatggggtcaccaaagcaggacctatgggccttccagaaataagacaagtgccaactgttgtgattgaatgtgatgacaataaagaaaatgtgcctcatgagtcagactacgaagactcttcttgcctgtatacaagagaagaggaggaagaggaggaggacgaagacgacgacagctcattatacaccagctccctggccatgaaggtctgcaggaaggactccttagccatnaaactcagcaacaggccctccaagcgagagctggaagaaaagaacatccttcccaggcagacggatgaggagcggctggagctgaggcaacagattggcaccaagctcaccaggcggctgagccagaggccaactgcagaggaactggaacagaggaacattttgaaacctcggaatgaacaagaggaacaggaggagaagagagagatcaagaggaggctaacccgaaagctcagtcaaaggcccacggtggaagagcttcgggaaagaaagatcctcatccgcttcagtgactacgtggaggtggctgacgctcaggactatgaccgcagggcagataagccgtggacccgcctcaccgctgcagacaaagctgccatccgaaaggagctcaatgaattcaaaagcactgagatggaagttcatgaattgagtagacacttaacaaggtttcaccgaccttaacagtcgaattcctcttgagtgctatgctgtcttcaaaacataaatttataagaaccataagtgctggtatttattcacttccccattacgatgtaaatcttctgaactgccttttttttaaaaagaagaaaaatcaaggaaacacaatcaggattttatgtgtgaaaacgcaaaagtgatggctcggcggtccgagctgctggtcccacttctgacaccaaaatgcatcccaacccccggcagtgccaagggcaccagcagggccctgactgaagactgtctggcaggtggaacggtccttgtcctctccagccaggcccagcaggcactaccttcatgaagtctccagcaaacctcttcctcacaagtgtctgtcatctgagtccaaagaaagctgaaggggtgggtttgttttgggggtactgtgcaaagctaatgatctggttggacttctacacttggccaaatgtactggctccagacatgacatttggtttgggggccctttgaagttgatgccaagaaggagtgaacacttctcagttgcccctggcttttccctcctttcagccaccacccacacaatgaacaaaagggaagggcccatttctgggggagtctggctgcctcttggctacgaaggctggcactgagcacccatcctgctccctctgcctgagctgagctgcctttcaggaagctctggtttagaaggggaaagatgtcatatgctcagttcaaataatcaacccaactgtgtccagagtgt

SEQ ID NO: 418944 - DNA, 1144 bp, Homo sapiens
aaggttgcattgctagttagcaacagagccattgatttaattctgactttcttttggggggaacatttagagaaataggatatagcaagtatttagtctagagactcagagacacagattgggttctgcaccttgctgctggatccaggctgatggcaggaggtggaggccaccagggctgccccagatgaaactttcaaagccaggtgtgtgttcagtggtactcctgtggggatgacggtgggaagctcgcacctccctctcacggtcaagaacctccctgaagatgggagattggactgttgaatcctgcacctttggcagccccttggtcttgatgtaattgtttgtttccttaggtttcaccgaccttaacagtcgaattcctcttgagtgctatgctgtcttcaaaacataaatttataagaaccataagtgctggtatttattcacttccccattacgatgtaaatcttctgaactgccttttttttaaaaagaagaaaaatcaaggaaacacaatcaggattttatgtgtgaaaacgcaaaagtgatggctcggcggtccgagctgctggtcccacttctgacaccaaaatgcatcccaacccccggcagtgccaagggcaccagcagggccctgactgaagactgtctggcaggtggaacggtccttgtcctctccagccaggcccagcaggcactaccttcatgaagtctccagcaaacctcttcctcacaagtgtctgtcatctgagtccaaagaaagctgaaggggtgggtttgttttgggggtactgtgcaaagctaatgatctggttggacttctacacttggccaaatgtactggctccagacatgacatttggtttgggggccctttgaagttgatgccaagaaggagtgaacacttctcagttgcccctggcttttccctcctttcagccaccacccacacaatgaacaaaagggaagggcccatttctgggggagtctggctgcctcttggctacgaaggctggcactgagcacccatcctgctccctctgcctgagctgagctgcctttcaggaagctctggtttagaaggggaaagatgtcatatgctcagttcaaataatcaacccaactgtgtccagagtgt

SEQ ID NO: 418945 - DNA, 676 bp, Homo sapiens
  misc_feature (675)..(675): n is a, c, g, or t
gaggcggtggtggcgagagtcagtctttcagagcacaggatggaacaagaactccagccactgactgtctcatgtatctgcaagggccgaggaaattaatgacccaaggaggctatgatatggtccaaaaacttttcctggattttttccgtaggcggctgagccagaggccaactgcagaggaactggaacagaggaacattttgaaacctcggaatgaacaagaggaacaggaggagaagagagagatcaagaggaggctaacccgaaagctcagtcaaaggcccacggtggaagagcttcgggaaagaaagatcctcatccgcttcagtgactacgtggaggtggctgacgctcaggactatgaccgcagggcagataagccgtggacccgcctcaccgctgcagacaaagctgccatccgaaaggagctcaatgaattcaaaagcactgagatggaagttcatgaattgagtagacacttaacaaggtttcaccgaccttaacagtcgaattcctcttgagtgctatgctgtcttcaaaacataaatttataagaaccataagtgctggtatttattcacttccccattacgatgtaaattttgcgtcaaaaaaacttactgttggtagagtgataaaacttatgcggcggcaagattaatccctttagtna

SEQ ID NO: 418946 - DNA, 1250 bp, Homo sapiens
tgagtcagaagactcccagagattggggacggccgaggcaggtcgggggtctggtttggatccccgggttactttctgtttcattttgaaatgttccctgtttctgcaaccggttgcctccaatgtcaagtaaaacgcaggactccttggagacgccagctgggcttctaaggactggggctctgtgaaggtaagaggcagtctgtgccccaccggctggaggctgccactttagagacgtctgagtacccgcaggtcacacccaggaggggttggtgtgcctgccaactgttctgggctctgagtgaggctggagagaccatcgtggaggcggttttaggttagaaaagggataaaatggacccttcatgccagatgggtggccacctagtccacgctgaggaagtggagaggctggcggcgatgcgttctgactccctcgtcccaggcacccacaccccacccatccgcaggagaagtaagtttgccaacctgggaaggattttcaagccttggaaatggaggaagaagaaaagcgaaaagttcaaacacacgtcagcagccctggaaaggaaaatatctatgaggcaaagcagagaagagctgataaagcgaggagtcctgaaggaaatctatgataaagatggggaactctctatatccaatgaagaggactccctagaaaatgggcagtccctgagctccagccagctgtctctgcctgccctgtccgaaatggagccagtcccaatgcccagggatccctgctcatatgaggtgctccaaccgtcagacatcatggatgggccagtgtctgaagagagtccctctgccagtgagtctggagtcctcctgtcccaagatccttcagccaaaccagtcctgctactgccccccaaaaaacctgctgctttccctggagaccatgaagagaccccagtgaagcagctgccccttctcaagcagcccccggccctgcctcccaaacccactaccaggattgccaaccacttaacagattggcaccaagctcaccaggtaggacagcggcaccctctgcctccctggcagtgggcctttagctctccaggttctagcaaaagaattcagtctcggccgggcgcagtagcttatgcctgtaatcccagcactttgggaggccgaggcaggtggatcacatgaggtcaggagttcaagaccagcctggccaacatggtgaaaccccatctctactaaaaatgcaaaaatta

SEQ ID NO: 418947 - DNA, 485 bp, Homo sapiens
ccctgtgaaattgccttgtctgccagtgaaactgtcgcctccgctacctccaaagaaagtcatgatctgtatgcccgtgggggggccagacctctcactggtgtcctacacagcccagaagagtggccagcagggtgtggcccagcaccaccacactgtcctgccctcccagatccagcaccagctgcagtacggcagccacggccagcacctcccctccaccaccggctccctccccatgcacccctcgggctgcagaatgatagacgagctcaacaaaacgctggccatgaccatgcagaggctggaaaggtaaaggtgggcaccaggagggaggacgggaggagaggggttggctggggaggggggcctagggatttggaccatgacttaggaatgtgaacaaggggtcatccccactgggggaaaatgtttgaaagtaaaatgagacaaaaaactgaaggtcaaagcatggaaaaaaaaaa

SEQ ID NO: 418948 - DNA, 4784 bp, Homo sapiens
  misc_feature (1407)..(1407): n is a, c, g, or t
  misc_feature (1747)..(1747): n is a, c, g, or t
  misc_feature (2566)..(2566): n is a, c, g, or t
  misc_feature (4343)..(4343): n is a, c, g, or t
tatttagcaagatcaaagacactctggctggaacggctcttgttttaccgctgacagatagcctttgatttttattttttgcagtgttccagtgttttctctcaaaactctgtgtttggaacatcaaggatggattatcccaaaatggattattttctggatgtagagtctgctcacagactcttggatgttgagtcagctcaaagattcttctacagtcaaggagctcaagctcgccgggcgaccctgctcctgcctcccacattaatggcggcatcctcggaggatgatatagaccggcggcccatccggagagtgcgctccaagagcgacacgccgtacctcgcagaggccaggatctcctttaacctgggggcagctgaggaagtggagaggctggcggcgatgcgttctgactccctcgtcccaggcacccacaccccacccatccgcaggagaagtaagtttgccaacctgggaaggattttcaagccttggaaatggaggaagaagaaaagcgaaaagttcaaacacacgtcagcagccctggaaaggaaaatatctatgaggcaaagcagagaagagctgataaagcgaggagtcctgaaggaaatctatgataaagatggggaactctctatatccaatgaagaggactccctagaaaatgggcagtccctgagctccagccagctgtctctgcctgccctgtccgaaatggagccagtcccaatgcccagggatccctgctcatatgaggtgctccaaccgtcagacatcatggatgggccagatcctggcgcccctgtgaaattgccttgtctgccagtgaaactgtcgcctccgctacctccaaagaaagtcatgatctgtatgcccgtgggggggccagacctctcactggtgtcctacacagcccagaagagtggccagcagggtgtggcccagcaccaccacactgtcctgccctcccagatccagcaccagctgcagtacggcagccacggccagcacctcccctccaccaccggctccctccccatgcacccctcgggctgcagaatgatagacgagctcaacaaaacgctggccatgaccatgcagaggctggaaagctctgagcagcgggtcccctgttccacttcttaccacagctctgggttgcactcgggtgatggggtcaccaaagcaggacctatgggccttccagaaataagacaagtgccaactgttgtgattgaatgtgatgacaataaagaaaatgtgcctcatgagtcagactacgaagactcttcttgcctgtatacaagagaagaggaggaagaggaggaggacgaagacgacgacagctcattatacaccagctccctggccatgaaggtctgcaggaaggactccttagccatnaaactcagcaacaggccctccaagcgagagctggaagaaaagaacatccttcccaggcagacggatgaggagcggctggagctgaggcaacagattggcaccaagctcaccaggcggctgagccagaggccaactgcagaggaactggaacagaggaacattttgaaacgtaagtgactaagcccatggcaatccctgatgttttgtggcggcttttgttattatttaatggtaggccacaaggtttctaccttgcgcctctgcggaaagcattgaaaacctttctaacggttgaagcttcatgtgtgcatgttagaacaccaaagacgacctccccaangagaaggcaaattttattccactttattctttagaagctcacgggcggcaggcagaaccttccttttagtgagttgtaaagtcagagagaagctgaaaaattagagtgagaccacttattatttaatgatttttaagagcagggtcacctttaaaccagaattggcttgaaaatggagactgtgatatgcacggctaaaataagggaaatgtccatttgaactgagactagaaagcatgactttgcattgcagctggctgctgttgataaaaatccctcatccctttgaatgttaaattgaaagactaagaaagcatttccaagcgaagtgcttcatgtctgtctctcaggattcccacagctggtcccgggcatgcctgtctgatgctctcattcgaggaaaactgcctttcaccattgctgcagacagaaaaaaataaatgagccccttgtttggtttaggacacagagacatttgaatatgtacagaggatccacttggtgctttaaaaaaaaaaagagaaaacaggatacaaaatactaaaagagatcaagcatttgatggacagcagtatgcgtcagtttagtggtagatattaaataacttaaatatcaaaccattctattcattcattgctaccattctcgccaacactggcctcaagatagtgaacaaatatttctggcttaattcatgaccctgttccccctaccccacaacacacttctaatttctctccagaagagaaagatatatactatgcagagttttctagaaatgctatgttgtacagactgactcctcgcctcccccggccnccccgccccgccccgccccgtgcccagtaaatcacatgcaaccgcagtgtgagtttgccgggaatttccactgaaaccacactaagatattcttgactttacctttctaccgtgctcactgtggccttgtgacttggtcggcatttcgtagtctgctgaaggtgggtgctgggttccgctttggtggggagacctgttgcctacagcacccacccccgcccgacgcccccgcatgtccgtttatgtcaactctgcctttatcaatgtcttgcctcccgtccccacgccagccgccacttcctcaactctcagtagaagttattttcaggattagccttcctcagtcgtgggggaaccctacgctttgcctaggtctctaggaatgtgtgtttacttttttctgcccaaggggtaccctttaaagtttccaagcttaatattctatataatgaattcagagctttttcaaagcatttccaaggtcagggaagcatttggcttgtaggatgtcttcctttcggccccaatctggtacctgagccattataaacttcccattgttggagagaaagataaacagccaggtgaacctgtacaacttactcacagcccgctgctgtacttgtggcctctgacctgagacctaaactcaaagaagctaaaagcctccgggggattatttaggtttcagaaaatagtgcttatcacaccaggagtacggtttctggagagatctaaaatcccctagctcagctctgggctctctcaaagatatcagatccccgctgtggcttgtccagatccctgggagactacaggtcctttgagcttgggtttttaccgccatcaaccagggaacttagattcaggggaccaaaaaggagttgtgaaagattgttcccatggttctcttttattctcttccctaatccctcttgtcctggccacatagttgcaaattaaagaactacttgaccaattctaacaggttggtcatttcatagttttgaaacttttcagaaatcaacttgttttcccataggttcttatttttccctgtattctggaactatgttctcctaaatatttttttaaatttaatctattgcgattgttaaacaaaaaaaatgtctagtggtataagaaaacatcctccaatagtttgttttaaaactgattttctgagctttcagccatttgaggaactgctcggtgttgggtggtggggaacagggcacagagatgccatggctcagccctggagctttgagagccttgggttggtttccagccccaccctgcctggtcctgggagcagcccctgttctgtccagcagccagtgaggccctgtgcacctctgagcacataatgaaccctctgatggtggcagctgtaatgacgacatcgtaggcctttcctggcctgtcttcccagttgcctaatggggttgtcttggtaccttctgcctgaaaattcatgaacctgggttggtcaatggctttgaactaaaggtatcaattctgtaggtggtagcttgtggccccacccctcagagtgacctaagaaacgcacataggagatgaaggctccatgctgtgtcagctgtgtcacaggatgcccgccttcacggctctgaagggacctgtaggatcagaagtctgaggctagtaatgaggaggagagccggccccacacaaaacatgaccacaggaaaaaacctatctgtgtaaccactgagccaggtagggtgtgactggccacttaacacccctgagncttcagatcctcagttataaaccaggagtggtagatgaggtggtcactaggtcccctcatggccctagtattctgtgcttctgtaaattttcaccgtgtgccctctagctgtccctggtgacccaacatccagaccaccttttcttccatccgttttcccacctgagacatcgcaaaatgggagttccctccttctggttcttgctgtctgcctccccatttaactctgctagattaattcatactaagatattaatggctgactagtttaataggttttatcccactgaaatttgcatttgtacaaatgtcactgtctgggggctccctacttccgggtgttgctgtctgccccccagtttatctctactagattaattcatactgagctattaatggctgactagtttaatgggcttttattcaagagaaatttgcatt

SEQ ID NO: 418949 - DNA, 779 bp, Homo sapiens
gatgagctgaggatcaacactcacaacggctgacacttaatgacgctatttatcaaatagaccttttgaaaactgatagcatgtgaatttaacagtatatgttccagagaatataaagcaaggaaaggctggtgttccagtgttttctctcaaaactctgtgtttggaacatcaaggatggattatcccaaaatggattattttctggatgtagagtctgctcacagactcttggatgttgagtcagctcaaagattcttctacagtcaaggagctcaagctcgccgggcgaccctgctcctgcctcccacattaatggcggcatcctcggaggatgatatagaccggcggcccatccggagagtgcgctccaagagcgacacgccgtacctcgcagaggccaggatctcctttaacctgggggcaggcgtttccctttttggggatatggatgaagcaagaatgggaccagcagtgccaactcttgggcgtcctcttgggctcgaactgtgttccctggaaaaccacggcctcctgaagacagcccctacatacactacatcagcccacatctgctcaggccccagtacaggtggacaattctctactcagggtatgagccctgttcaaggagctaagagaaggagggtggtttggctgcctttagagggggaagagtttggctgagaggacatttactctttggtccatatgggaagggaaaatgcgggttggcgtgtgtattcatttcctagagttgctgtaacaaagtaccacaa

SEQ ID NO: 418950 - DNA, 2659 bp, Homo sapiens
  misc_feature (1425)..(1425): n is a, c, g, or t
tgagtcagaagactcccagagattggggacggccgaggcaggtcgggggtctggtttggatccccgggttactttctgtttcattttgaaatgttccctgtttctgcaaccggttgcctccaatgtcaagtaaaacgcaggactccttggagacgccagctgggcttctaaggactggggctctgtgaaggtaagaggcagtctgtgccccaccggctggaggctgccactttagagacgtctgagtacccgcaggtcacacccaggaggggttggtgtgcctgccaactgttctgggctctgagtgaggctggagagaccatcgtggaggcggttttaggttagaaaagggataaaatggacccttcatgccagatgggtggccacctagtccacgctgaggaagtggagaggctggcggcgatgcgttctgactccctcgtcccaggcacccacaccccacccatccgcaggagaagtaagtttgccaacctgggaaggattttcaagccttggaaatggaggaagaagaaaagcgaaaagttcaaacacacgtcagcagccctggaaaggaaaatatctatgaggcaaagcagagaagagctgataaagcgaggagtcctgaaggaaatctatgataaagatggggaactctctatatccaatgaagaggactccctagaaaatgggcagtccctgagctccagccagctgtctctgcctgccctgtccgaaatggagccagtcccaatgcccagggatccctgctcatatgaggtgctccaaccgtcagacatcatggatgggccagatcctggcgcccctgtgaaattgccttgtctgccagtgaaactgtcgcctccgctacctccaaagaaagtcatgatctgtatgcccgtgggggggccagacctctcactggtgtcctacacagcccagaagagtggccagcagggtgtggcccagcaccaccacactgtcctgccctcccagatccagcaccagctgcagtacggcagccacggccagcacctcccctccaccaccggctccctccccatgcacccctcgggctgcagaatgatagacgagctcaacaaaacgctggccatgaccatgcagaggctggaaagctctgagcagcgggtcccctgttccacttcttaccacagctctgggttgcactcgggtgatggggtcaccaaagcaggacctatgggccttccagaaataagacaagtgccaactgttgtgattgaatgtgatgacaataaagaaaatgtgcctcatgagtcagactacgaagactcttcttgcctgtatacaagagaagaggaggaagaggaggaggacgaagacgacgacagctcattatacaccagctccctggccatgaaggtctgcaggaaggactccttagccatnaaactcagcaacaggccctccaagcgagagctggaagaaaagaacatccttcccaggcagacggatgaggagcggctggagctgaggcaacagattggcaccaagctcaccaggcggctgagccagaggccaactgcagaggaactggaacagaggaacattttgaaacctcggaatgaacaagaggaacaggaggagaagagagagatcaagaggaggctaacccgaaagctcagtcaaaggcccacggtggaagagcttcgggaaagaaagatcctcatccgcttcagtgactacgtggaggtggctgacgctcaggactatgaccgcagggcagataagccgtggacccgcctcaccgctgcagacaaagctgccatccgaaaggagctcaatgaattcaaaagcactgagatggaagttcatgaattgagtagacacttaacaaggtttcaccgaccttaacagtcgaattcctcttgagtgctatgctgtcttcaaaacataaatttataagaaccataagtgctggtatttattcacttccccattacgatgtaaatcttctgaactgccttttttttaaaaagaagaaaaatcaaggaaacacaatcaggattttatgtgtgaaaacgcaaaagtgatggctcggcggtccgagctgctggtcccacttctgacaccaaaatgcatcccaacccccggcagtgccaagggcaccagcagggccctgactgaagactgtctggcaggtggaacggtccttgtcctctccagccaggcccagcaggcactaccttcatgaagtctccagcaaacctcttcctcacaagtgtctgtcatctgagtccaaagaaagctgaaggggtgggtttgttttgggggtactgtgcaaagctaatgatctggttggacttctacacttggccaaatgtactggctccagacatgacatttggtttgggggccctttgaagttgatgccaagaaggagtgaacacttctcagttgcccctggcttttccctcctttcagccaccacccacacaatgaacaaaagggaagggcccatttctgggggagtctggctgcctcttggctacgaaggctggcactgagcacccatcctgctccctctgcctgagctgagctgcctttcaggaagctctggtttagaaggggaaagatgtcatatgctcagttcaaataatcaacccaactgtgtccagagtgt

SEQ ID NO: 418951 - DNA, 2354 bp, Homo sapiens
  misc_feature (1425)..(1425): n is a, c, g, or t
tgagtcagaagactcccagagattggggacggccgaggcaggtcgggggtctggtttggatccccgggttactttctgtttcattttgaaatgttccctgtttctgcaaccggttgcctccaatgtcaagtaaaacgcaggactccttggagacgccagctgggcttctaaggactggggctctgtgaaggtaagaggcagtctgtgccccaccggctggaggctgccactttagagacgtctgagtacccgcaggtcacacccaggaggggttggtgtgcctgccaactgttctgggctctgagtgaggctggagagaccatcgtggaggcggttttaggttagaaaagggataaaatggacccttcatgccagatgggtggccacctagtccacgctgaggaagtggagaggctggcggcgatgcgttctgactccctcgtcccaggcacccacaccccacccatccgcaggagaagtaagtttgccaacctgggaaggattttcaagccttggaaatggaggaagaagaaaagcgaaaagttcaaacacacgtcagcagccctggaaaggaaaatatctatgaggcaaagcagagaagagctgataaagcgaggagtcctgaaggaaatctatgataaagatggggaactctctatatccaatgaagaggactccctagaaaatgggcagtccctgagctccagccagctgtctctgcctgccctgtccgaaatggagccagtcccaatgcccagggatccctgctcatatgaggtgctccaaccgtcagacatcatggatgggccagatcctggcgcccctgtgaaattgccttgtctgccagtgaaactgtcgcctccgctacctccaaagaaagtcatgatctgtatgcccgtgggggggccagacctctcactggtgtcctacacagcccagaagagtggccagcagggtgtggcccagcaccaccacactgtcctgccctcccagatccagcaccagctgcagtacggcagccacggccagcacctcccctccaccaccggctccctccccatgcacccctcgggctgcagaatgatagacgagctcaacaaaacgctggccatgaccatgcagaggctggaaagctctgagcagcgggtcccctgttccacttcttaccacagctctgggttgcactcgggtgatggggtcaccaaagcaggacctatgggccttccagaaataagacaagtgccaactgttgtgattgaatgtgatgacaataaagaaaatgtgcctcatgagtcagactacgaagactcttcttgcctgtatacaagagaagaggaggaagaggaggaggacgaagacgacgacagctcattatacaccagctccctggccatgaaggtctgcaggaaggactccttagccatnaaactcagcaacaggccctccaagcgagagctggaagaaaagaacatccttcccaggcagacggatgaggagcggctggagctgaggcaacagattggcaccaagctcaccaggcggctgagccagaggccaactgcagaggaactggaacagaggaacattttgaaacctcggaatgaacaagaggaacaggaggagaagagagagatcaagaggaggctaacccgaaagctcagtcaaaggcccacggtggaagagcttcgggaaagaaagatcctcatccgcttcagtgactacgtggaggtggctgacgctcaggactatgaccgcagggcagataagccgtggacccgcctcaccgctgcagacaaagctgccatccgaaaggagctcaatgaattcaaaagcactgagatggaagttcatgaattgagtagacacttaacaaggttagtattaagggttttttttttcctttttttccctcaagttgcaatatttatctccaaataaagctctcccacttgtgggacatgagtgggttggagggtgccatgagagggaagatagtaggaaggcaggcatgcggttccactttaggttactgaaacgaggaagtggaacacagatggcccgggctaaaaccaactttctgcaaagtctgagtttcactcatttaaactaaaggtctgataagcaccagactaccaacgaccccaaggtgggtttttgtgaaaacttaggtcaaggagaaaagattgttgccaatttgcaaccagtcagcagaggccaaacctgaacaaaataccacatccacacgggacttccaaagtggaccacttctgttattccctgacattctccctgacagtccagcatcatgatgatatttgggaaaaccgaggcatggagtgattaagaggattata

SEQ ID NO: 418952 - DNA, 871 bp, Homo sapiens
agatggagtcttacactgtcacccgggctggagtgcaatggcgcaatctcagctcactacaacctctgcctcccgggttcaagcaattctcctgcctcagcctcccaagtagttgagattacagacgtgatgggacctgccttctccactagtagctgggcagctcacaattcacacctgtgtacctgccacatccctcacttggtggaaaacacccagaaggtcttgagtcccccacccctgggtgtcagtccaaatgactgtataggaggcccttatttttgtcacagagcaagctggccatgaacgaaggagagaagacgccacagatttccttccctctcctccaggagaccataagatagatcccccatcctctcagccctattcccatgcctccctctcattggaggagctgaccaaagcagccctaacgggccataacacttgaccaattcagctgctggcagagggaggaaacaagtgttttcccaagtggcattttcatctcgctttcaccctgactaaagattgtcttaagtagcagcccagcccgcccagccccaggtgggtagtggggaggagagctggcattcctccaggtggcaaatggcgactctatactctccgcccgccccagggctggatggattagaaaaatgcctatttttcttgtatcgatgtagagactctattttctcccaaagacactatttttgcagctgtttgaagtttgtatattttccgtactgcagagcttacacaaaattgaagaatgttaatgttcgagttttcttatcttgtgtttagaggttgttttttgcagatcttggtgttaatagaccaaataaataaataaatattcccagca

SEQ ID NO: 418953 - DNA, 2350 bp, Homo sapiens
ggcttggtacggtgccgaaggtcgttttctcgcagtggggctgagtgcaggcagccgggagagccatggcgggggccgcagcgggcggcagaggcggaggtgcctgggggccggggcgcggaggggccggggggctccggcggggctgctctcccccagcccccgccggctccccccgggctgggctgcagccgctcagggccacgatccccttccagctgcagcagccgcaccagcgccgggacgggggtggccgtgcagccagcgtcccatgctcggtggccccagaaaagtcagtgtgtaggcctcagccacttcaggtccggcgtacattctccctggacaccatcctcagctcctaccttctgggccagtggccacgagatgctgatggggccttcacctgctgcaccaatgacaaggccacccagacgcccctgtcctggcaagagctagaaggtgagcgtgccagttcctgtgcacacaagcgctcagcatcctggggcagcacagaccaccgaaaagagatttccaagttgaagcaacaactgcagaggacgaagctgagccgcagtgggaaagagaaggagcgaggttcaccactcctaggggaccacgcagtgcggggagcactgagggcgtcccctcccagcttcccctcagggtcccctgtcttgcgactcagcccctgcctgcacaggagcctggaagggctcaaccaagagctggaggaggtatttgtgaaggagcagggagaagaggagctgctgaggatccttgatatccctgatgggcaccgggccccagctcctccccagagtggcagctgtgatcatcccctcctcctcctggagcctggcaaccttgccagctctccttccatgtccttggcatctccccagccttgtggcctggccagtcatgaggaacatcggggtgccgccgaggagctggcatccacccccaacgacaaagcctcctctccaggacacccagcctttcttgaagatggcagcccatctccagtccttgcctttgctgcctcccctcgacctaatcatagctacatcttcaaacgggagcccccagaaggctgtgagaaagtgcgtgtgtttgaagaagccacgtctccaggtcctgacctggccttcctgacttcctgtcctgacaagaacaaagtccatttcaacccgactggctcagccttctgccccgtcaacctgatgaagcccctcttccccggcatgggcttcatcttccgtaactgcccctcaaacccgggatctccccttcccccggccagccccaggccaccacctcggaaggatccggaagcctccaaggcctccccactgccattcgagccatggcagcgcaccccaccatcagaagagcctgtgcttttccagagctccctgatggtctgagggtcccacccctgccccactttaccatagagaccagtgccttggtggcaggtccctccccaggtcccctgagatggggtatggaggggcccttccctctcggccttcgagcactttctttcacttactgtgtcaaagccctgggtcctctttttgatgggcaccggcccctctgaacgtgatgggacctgccttctccactagtagctgggcagctcacaattcacacctgtgtacctgccacatccctcacttggtggaaaacacccagaaggtcttgagtcccccacccctgggtgtcagtccaaatgactgtataggaggcccttatttttgtcacagagcaagctggccatgaacgaaggagagaagacgccacagatttccttccctctcctccaggagaccataagatagatcccccatcctctcagccctattcccatgcctccctctcattggaggagctgaccaaagcagccctaacgggccataacacttgaccaattcagctgctggcagagggaggaaacaagtgttttcccaagtggcattttcatctcgctttcaccctgactaaagattgtcttaagtagcagcccagcccgcccagccccaggtgggtagtggggaggagagctggcattcctccaggtggcaaatggcgactctatactctccgcccgccccagggctggatggattagaaaaatgcctatttttcttgtatcgatgtagagactctattttctcccaaagacactatttttgcagctgtttgaagtttgtatattttccgtactgcagagcttacacaaaattgaagaatgttaatgttcgagttttcttatcttgtgtttagaggttgttttttgcagatcttggtgttaatagaccaaataaataaataaatattcccagca

SEQ ID NO: 418954 - DNA, 2190 bp, Homo sapiens
tgggaagttcgatccttttggtgaagctagtgggcgccattttgaagttgggcagaaagtgactccagtggtggaacccggagccaaccatttttagttacccagcgtcccatgctcggtggccccagaaaagtcagtgtgtaggcctcagccacttcaggtccggcgtacattctccctggacaccatcctcagctcctaccttctgggccagtggccacgagatgctgatggggccttcacctgctgcaccaatgacaaggccacccagacgcccctgtcctggcaagagctagaaggtgagcgtgccagttcctgtgcacacaagcgctcagcatcctggggcagcacagaccaccgaaaagagatttccaagttgaagcaacaactgcagaggacgaagctgagccgcagtgggaaagagaaggagcgaggttcaccactcctaggggaccacgcagtgcggggagcactgagggcgtcccctcccagcttcccctcagggtcccctgtcttgcgactcagcccctgcctgcacaggagcctggaagggctcaaccaagagctggaggaggtatttgtgaaggagcagggagaagaggagctgctgaggatccttgatatccctgatgggcaccgggccccagctcctccccagagtggcagctgtgatcatcccctcctcctcctggagcctggcaaccttgccagctctccttccatgtccttggcatctccccagccttgtggcctggccagtcatgaggaacatcggggtgccgccgaggagctggcatccacccccaacgacaaagcctcctctccaggacacccagcctttcttgaagatggcagcccatctccagtccttgcctttgctgcctcccctcgacctaatcatagctacatcttcaaacgggagcccccagaaggctgtgagaaagtgcgtgtgtttgaagaagccacgtctccaggtcctgacctggccttcctgacttcctgtcctgacaagaacaaagtccatttcaacccgactggctcagccttctgccccgtcaacctgatgaagcccctcttccccggcatgggcttcatcttccgtaactgcccctcaaacccgggatctccccttcccccggccagccccaggccaccacctcggaaggatccggaagcctccaaggcctccccactgccattcgagccatggcagcgcaccccaccatcagaagagcctgtgcttttccagagctccctgatggtctgagggtcccacccctgccccactttaccatagagaccagtgccttggtggcaggtccctccccaggtcccctgagatggggtatggaggggcccttccctctcggccttcgagcactttctttcacttactgtgtcaaagccctgggtcctctttttgatgggcaccggcccctctgaacgtgatgggacctgccttctccactagtagctgggcagctcacaattcacacctgtgtacctgccacatccctcacttggtggaaaacacccagaaggtcttgagtcccccacccctgggtgtcagtccaaatgactgtataggaggcccttatttttgtcacagagcaagctggccatgaacgaaggagagaagacgccacagatttccttccctctcctccaggagaccataagatagatcccccatcctctcagccctattcccatgcctccctctcattggaggagctgaccaaagcagccctaacgggccataacacttgaccaattcagctgctggcagagggaggaaacaagtgttttcccaagtggcattttcatctcgctttcaccctgactaaagattgtcttaagtagcagcccagcccgcccagccccaggtgggtagtggggaggagagctggcattcctccaggtggcaaatggcgactctatactctccgcccgccccagggctggatggattagaaaaatgcctatttttcttgtatcgatgtagagactctattttctcccaaagacactatttttgcagctgtttgaagtttgtatattttccgtactgcagagcttacacaaaattgaagaatgttaatgttcgagttttcttatcttgtgtttagaggttgttttttgcagatcttggtgttaatagaccaaataaataaataaatattcccagca

SEQ ID NO: 418955 - DNA, 2184 bp, Homo sapiens
aggtgaccgttgagcccaaacaggcggcgtcaccagccaatcaatatgcttccagacgtttcagcgaccaattaataagaacgcctccgatccagccagcgtcccatgctcggtggccccagaaaagtcagtgtgtaggcctcagccacttcaggtccggcgtacattctccctggacaccatcctcagctcctaccttctgggccagtggccacgagatgctgatggggccttcacctgctgcaccaatgacaaggccacccagacgcccctgtcctggcaagagctagaaggtgagcgtgccagttcctgtgcacacaagcgctcagcatcctggggcagcacagaccaccgaaaagagatttccaagttgaagcaacaactgcagaggacgaagctgagccgcagtgggaaagagaaggagcgaggttcaccactcctaggggaccacgcagtgcggggagcactgagggcgtcccctcccagcttcccctcagggtcccctgtcttgcgactcagcccctgcctgcacaggagcctggaagggctcaaccaagagctggaggaggtatttgtgaaggagcagggagaagaggagctgctgaggatccttgatatccctgatgggcaccgggccccagctcctccccagagtggcagctgtgatcatcccctcctcctcctggagcctggcaaccttgccagctctccttccatgtccttggcatctccccagccttgtggcctggccagtcatgaggaacatcggggtgccgccgaggagctggcatccacccccaacgacaaagcctcctctccaggacacccagcctttcttgaagatggcagcccatctccagtccttgcctttgctgcctcccctcgacctaatcatagctacatcttcaaacgggagcccccagaaggctgtgagaaagtgcgtgtgtttgaagaagccacgtctccaggtcctgacctggccttcctgacttcctgtcctgacaagaacaaagtccatttcaacccgactggctcagccttctgccccgtcaacctgatgaagcccctcttccccggcatgggcttcatcttccgtaactgcccctcaaacccgggatctccccttcccccggccagccccaggccaccacctcggaaggatccggaagcctccaaggcctccccactgccattcgagccatggcagcgcaccccaccatcagaagagcctgtgcttttccagagctccctgatggtctgagggtcccacccctgccccactttaccatagagaccagtgccttggtggcaggtccctccccaggtcccctgagatggggtatggaggggcccttccctctcggccttcgagcactttctttcacttactgtgtcaaagccctgggtcctctttttgatgggcaccggcccctctgaacgtgatgggacctgccttctccactagtagctgggcagctcacaattcacacctgtgtacctgccacatccctcacttggtggaaaacacccagaaggtcttgagtcccccacccctgggtgtcagtccaaatgactgtataggaggcccttatttttgtcacagagcaagctggccatgaacgaaggagagaagacgccacagatttccttccctctcctccaggagaccataagatagatcccccatcctctcagccctattcccatgcctccctctcattggaggagctgaccaaagcagccctaacgggccataacacttgaccaattcagctgctggcagagggaggaaacaagtgttttcccaagtggcattttcatctcgctttcaccctgactaaagattgtcttaagtagcagcccagcccgcccagccccaggtgggtagtggggaggagagctggcattcctccaggtggcaaatggcgactctatactctccgcccgccccagggctggatggattagaaaaatgcctatttttcttgtatcgatgtagagactctattttctcccaaagacactatttttgcagctgtttgaagtttgtatattttccgtactgcagagcttacacaaaattgaagaatgttaatgttcgagttttcttatcttgtgtttagaggttgttttttgcagatcttggtgttaatagaccaaataaataaataaatattcccagca

SEQ ID NO: 418956 - DNA, 2118 bp, Homo sapiens
cacaacgacagctgtttgatcagcctagaccagcgtcccatgctcggtggccccagaaaagtcagtgtgtaggcctcagccacttcaggtccggcgtacattctccctggacaccatcctcagctcctaccttctgggccagtggccacgagatgctgatggggccttcacctgctgcaccaatgacaaggccacccagacgcccctgtcctggcaagagctagaaggtgagcgtgccagttcctgtgcacacaagcgctcagcatcctggggcagcacagaccaccgaaaagagatttccaagttgaagcaacaactgcagaggacgaagctgagccgcagtgggaaagagaaggagcgaggttcaccactcctaggggaccacgcagtgcggggagcactgagggcgtcccctcccagcttcccctcagggtcccctgtcttgcgactcagcccctgcctgcacaggagcctggaagggctcaaccaagagctggaggaggtatttgtgaaggagcagggagaagaggagctgctgaggatccttgatatccctgatgggcaccgggccccagctcctccccagagtggcagctgtgatcatcccctcctcctcctggagcctggcaaccttgccagctctccttccatgtccttggcatctccccagccttgtggcctggccagtcatgaggaacatcggggtgccgccgaggagctggcatccacccccaacgacaaagcctcctctccaggacacccagcctttcttgaagatggcagcccatctccagtccttgcctttgctgcctcccctcgacctaatcatagctacatcttcaaacgggagcccccagaaggctgtgagaaagtgcgtgtgtttgaagaagccacgtctccaggtcctgacctggccttcctgacttcctgtcctgacaagaacaaagtccatttcaacccgactggctcagccttctgccccgtcaacctgatgaagcccctcttccccggcatgggcttcatcttccgtaactgcccctcaaacccgggatctccccttcccccggccagccccaggccaccacctcggaaggatccggaagcctccaaggcctccccactgccattcgagccatggcagcgcaccccaccatcagaagagcctgtgcttttccagagctccctgatggtctgagggtcccacccctgccccactttaccatagagaccagtgccttggtggcaggtccctccccaggtcccctgagatggggtatggaggggcccttccctctcggccttcgagcactttctttcacttactgtgtcaaagccctgggtcctctttttgatgggcaccggcccctctgaacgtgatgggacctgccttctccactagtagctgggcagctcacaattcacacctgtgtacctgccacatccctcacttggtggaaaacacccagaaggtcttgagtcccccacccctgggtgtcagtccaaatgactgtataggaggcccttatttttgtcacagagcaagctggccatgaacgaaggagagaagacgccacagatttccttccctctcctccaggagaccataagatagatcccccatcctctcagccctattcccatgcctccctctcattggaggagctgaccaaagcagccctaacgggccataacacttgaccaattcagctgctggcagagggaggaaacaagtgttttcccaagtggcattttcatctcgctttcaccctgactaaagattgtcttaagtagcagcccagcccgcccagccccaggtgggtagtggggaggagagctggcattcctccaggtggcaaatggcgactctatactctccgcccgccccagggctggatggattagaaaaatgcctatttttcttgtatcgatgtagagactctattttctcccaaagacactatttttgcagctgtttgaagtttgtatattttccgtactgcagagcttacacaaaattgaagaatgttaatgttcgagttttcttatcttgtgtttagaggttgttttttgcagatcttggtgttaatagaccaaataaataaataaatattcccagca

SEQ ID NO: 418957 - DNA, 2053 bp, Homo sapiens
ctagcctgcatttctctttccatcctctcgcatatcccagaagaaagaggtacttgaagagtttgcaagagatattagtagtacccgtggcggcctgaatgtggctgttttttcctctctgttaccacccacctacgcccctgtcctggcaagagctagaaggtgagcgtgccagttcctgtgcacacaagcgctcagcatcctggggcagcacagaccaccgaaaagagatttccaagttgaagcaacaactgcagaggacgaagctgagccgcagtgggaaagagaaggagcgaggttcaccactcctaggggaccacgcagtgcggggagcactgagggcgtcccctcccagcttcccctcagggtcccctgtcttgcgactcagcccctgcctgcacaggagcctggaagggctcaaccaagagctggaggaggtatttgtgaaggagcagggagaagaggagctgctgaggatccttgatatccctgatgggcaccgggccccagctcctccccagagtggcagctgtgatcatcccctcctcctcctggagcctggcaaccttgccagctctccttccatgtccttggcatctccccagccttgtggcctggccagtcatgaggaacatcggggtgccgccgaggagctggcatccacccccaacgacaaagcctcctctccaggacacccagcctttcttgaagatggcagcccatctccagtccttgcctttgctgcctcccctcgacctaatcatagctacatcttcaaacgggagcccccagaaggctgtgagaaagtgcgtgtgtttgaagaagccacgtctccaggtcctgacctggccttcctgacttcctgtcctgacaagaacaaagtccatttcaacccgactggctcagccttctgccccgtcaacctgatgaagcccctcttccccggcatgggcttcatcttccgtaactgcccctcaaacccgggatctccccttcccccggccagccccaggccaccacctcggaaggatccggaagcctccaaggcctccccactgccattcgagccatggcagcgcaccccaccatcagaagagcctgtgcttttccagagctccctgatggtctgagggtcccacccctgccccactttaccatagagaccagtgccttggtggcaggtccctccccaggtcccctgagatggggtatggaggggcccttccctctcggccttcgagcactttctttcacttactgtgtcaaagccctgggtcctctttttgatgggcaccggcccctctgaacgtgatgggacctgccttctccactagtagctgggcagctcacaattcacacctgtgtacctgccacatccctcacttggtggaaaacacccagaaggtcttgagtcccccacccctgggtgtcagtccaaatgactgtataggaggcccttatttttgtcacagagcaagctggccatgaacgaaggagagaagacgccacagatttccttccctctcctccaggagaccataagatagatcccccatcctctcagccctattcccatgcctccctctcattggaggagctgaccaaagcagccctaacgggccataacacttgaccaattcagctgctggcagagggaggaaacaagtgttttcccaagtggcattttcatctcgctttcaccctgactaaagattgtcttaagtagcagcccagcccgcccagccccaggtgggtagtggggaggagagctggcattcctccaggtggcaaatggcgactctatactctccgcccgccccagggctggatggattagaaaaatgcctatttttcttgtatcgatgtagagactctattttctcccaaagacactatttttgcagctgtttgaagtttgtatattttccgtactgcagagcttacacaaaattgaagaatgttaatgttcgagttttcttatcttgtgtttagaggttgttttttgcagatcttggtgttaatagaccaaataaataaataaatattcccagca

SEQ ID NO: 418958 - DNA, 2254 bp, Homo sapiens
ggcttggtacggtgccgaaggtcgttttctcgcagtggggctgagtgcaggcagccgggagagccatggcgggggccgcagcgggcggcagaggcggaggtgcctgggggccggggcgcggaggggccggggggctccggcggggctgctctcccccagcccccgccggctccccccgggctgggctgcagccgctcagggccacgatccccttccagctgcagcagccgcaccagcgccgggacgggggtggccgtgcagccagcgtcccatgctcggtggccccagaaaagtcagtgtgtaggcctcagccacttcaggtccggcgtacattctccctggacaccatcctcagctcctaccttctgggccagtggccacgagatgctgatggggccttcacctgctgcaccaatgacaaggccacccagatttccaagttgaagcaacaactgcagaggacgaagctgagccgcagtgggaaagagaaggagcgaggttcaccactcctaggggaccacgcagtgcggggagcactgagggcgtcccctcccagcttcccctcagggtcccctgtcttgcgactcagcccctgcctgcacaggagcctggaagggctcaaccaagagctggaggaggtatttgtgaaggagcagggagaagaggagctgctgaggatccttgatatccctgatgggcaccgggccccagctcctccccagagtggcagctgtgatcatcccctcctcctcctggagcctggcaaccttgccagctctccttccatgtccttggcatctccccagccttgtggcctggccagtcatgaggaacatcggggtgccgccgaggagctggcatccacccccaacgacaaagcctcctctccaggacacccagcctttcttgaagatggcagcccatctccagtccttgcctttgctgcctcccctcgacctaatcatagctacatcttcaaacgggagcccccagaaggctgtgagaaagtgcgtgtgtttgaagaagccacgtctccaggtcctgacctggccttcctgacttcctgtcctgacaagaacaaagtccatttcaacccgactggctcagccttctgccccgtcaacctgatgaagcccctcttccccggcatgggcttcatcttccgtaactgcccctcaaacccgggatctccccttcccccggccagccccaggccaccacctcggaaggatccggaagcctccaaggcctccccactgccattcgagccatggcagcgcaccccaccatcagaagagcctgtgcttttccagagctccctgatggtctgagggtcccacccctgccccactttaccatagagaccagtgccttggtggcaggtccctccccaggtcccctgagatggggtatggaggggcccttccctctcggccttcgagcactttctttcacttactgtgtcaaagccctgggtcctctttttgatgggcaccggcccctctgaacgtgatgggacctgccttctccactagtagctgggcagctcacaattcacacctgtgtacctgccacatccctcacttggtggaaaacacccagaaggtcttgagtcccccacccctgggtgtcagtccaaatgactgtataggaggcccttatttttgtcacagagcaagctggccatgaacgaaggagagaagacgccacagatttccttccctctcctccaggagaccataagatagatcccccatcctctcagccctattcccatgcctccctctcattggaggagctgaccaaagcagccctaacgggccataacacttgaccaattcagctgctggcagagggaggaaacaagtgttttcccaagtggcattttcatctcgctttcaccctgactaaagattgtcttaagtagcagcccagcccgcccagccccaggtgggtagtggggaggagagctggcattcctccaggtggcaaatggcgactctatactctccgcccgccccagggctggatggattagaaaaatgcctatttttcttgtatcgatgtagagactctattttctcccaaagacactatttttgcagctgtttgaagtttgtatattttccgtactgcagagcttacacaaaattgaagaatgttaatgttcgagttttcttatcttgtgtttagaggttgttttttgcagatcttggtgttaatagaccaaataaataaataaatattcccagca

SEQ ID NO: 418959 - DNA, 2101 bp, Homo sapiens
ggcttggtacggtgccgaaggtcgttttctcgcagtggggctgagtgcaggcagccgggagagccatggcgggggccgcagcgggcggcagaggcggaggtgcctgggggccggggcgcggaggggccggggggctccggcggggctgctctcccccagcccccgccggctccccccgggctgggctgcagccgctcagggccacgatccccttccagctgcagcagccgcaccagcgccgggacgggggtggccgtgcagccagcgtcccatgctcggtggccccagaaaagtcagtgtgtaggcctcagccacttcaggtccggcgtacattctccctggacaccatcctcagctcctaccttctgggccagtggccacgagatgctgatggggccttcacctgctgcaccaatgacaaggccacccagacgcccctgtcctggcaagagctagaaggtgagcgtgccagttcctgtgcacacaagcgctcagcatcctggggcagcacagaccaccgaaaagagatttccaagttgaagcaacaactgcagaggacgaagctgagccgcagtgggaaagagaaggagcgaggttcaccactcctaggggaccacgcagtgcggggagcactgagggcgtcccctcccagcttcccctcagggtcccctgtcttgcgactcagcccctgcctgcacaggagcctggaagggctcaaccaagagctggaggaggtatttgtgaaggagcagggagaagaggagctgctgaggatccttgatatccctgatgggcaccgggccccagctcctccccagagtggcagctgtgatcatcccctcctcctcctggagcctggcaaccttgccagctctccttccatgtccttggcatctccccagccttgtggcctggccagtcatgaggaacatcggggtgccgccgaggagctggcatccacccccaacgacaaagcctcctctccaggacacccagcctttcttgaagatggcagcccatctccagtccttgcctttgctgcctcccctcgacctaatcatagctacatcttcaaacgggagcccccagaaggctgtgagaaagtgcgtgtgtttgaagaagccacgtctccaggtcctgacctggccttcctgacttcctgtcctgacaagaacaaagtccatttcaacccgactggctcagccttctgccccgtcaacctgatgaagcccctcttccccggcatgggcttcatcttccgtaactgcccttccctctcggccttcgagcactttctttcacttactgtgtcaaagccctgggtcctctttttgatgggcaccggcccctctgaacgtgatgggacctgccttctccactagtagctgggcagctcacaattcacacctgtgtacctgccacatccctcacttggtggaaaacacccagaaggtcttgagtcccccacccctgggtgtcagtccaaatgactgtataggaggcccttatttttgtcacagagcaagctggccatgaacgaaggagagaagacgccacagatttccttccctctcctccaggagaccataagatagatcccccatcctctcagccctattcccatgcctccctctcattggaggagctgaccaaagcagccctaacgggccataacacttgaccaattcagctgctggcagagggaggaaacaagtgttttcccaagtggcattttcatctcgctttcaccctgactaaagattgtcttaagtagcagcccagcccgcccagccccaggtgggtagtggggaggagagctggcattcctccaggtggcaaatggcgactctatactctccgcccgccccagggctggatggattagaaaaatgcctatttttcttgtatcgatgtagagactctattttctcccaaagacactatttttgcagctgtttgaagtttgtatattttccgtactgcagagcttacacaaaattgaagaatgttaatgttcgagttttcttatcttgtgtttagaggttgttttttgcagatcttggtgttaatagaccaaataaataaataaatattcccagca

SEQ ID NO: 418960 - DNA, 2353 bp, Homo sapiens
  misc_feature (2329)..(2329): n is a, c, g, or t
ggcttggtacggtgccgaaggtcgttttctcgcagtggggctgagtgcaggcagccgggagagccatggcgggggccgcagcgggcggcagaggcggaggtgcctgggggccggggcgcggaggggccggggggctccggcggggctgctctcccccagcccccgccggctccccccgggctgggctgcagccgctcagggccacgatccccttccagctgcagcagccgcaccagcgccgggacgggggtggccgtgcagccagcgtcccatgctcggtggccccagaaaagtcagtgtgtaggcctcagccacttcaggtccggcgtacattctccctggacaccatcctcagctcctaccttctgggccagtggccacgagatgctgatggggccttcacctgctgcaccaatgacaaggccacccagacgcccctgtcctggcaagagctagaaggtgagcgtgccagttcctgtgcacacaagcgctcagcatcctggggcagcacagaccaccgaaaagagatttccaagttgaagcaacaactgcagaggacgaagctgagccgcagtgggaaagagaaggagcgaggttcaccactcctaggggaccacgcagtgcggggagcactgagggcgtcccctcccagcttcccctcagggtcccctgtcttgcgactcagcccctgcctgcacaggagcctggaagggctcaaccaagagctggaggaggtatttgtgaaggagcagggagaagaggagctgctgaggatccttgatatccctgatgggcaccgggccccagctcctccccagagtggcagctgtgatcatcccctcctcctcctggagcctggcaaccttgccagctctccttccatgtccttggcatctccccagccttgtggcctggccagtcatgaggaacatcggggtgccgccgaggagctggcatccacccccaacgacaaagcctcctctccaggacacccagcctttcttgaagatggcagcccatctccagtccttgcctttgctgcctcccctcgacctaatcatagctacatcttcaaacgggagcccccagaaggctgtgagaaagtgcgtgtgtttgaagaagccacgtctccaggtcctgacctggccttcctgacttcctgtcctgacaagaacaaagtccatttcaacccgactggctcagccttctgccccgtcaacctgatgaagcccctcttccccggcatgggcttcatcttccgtaactgcccctcaaacccgggatctccccttcccccggccagccccaggccaccacctcggaaggatccggaagcctccaaggcctccccactgccattcgagccatggcagcgcaccccaccatcagaagagcctgtgcttttccagagctccctgatggtctgagggtcccacccctgccccactttaccatagagaccagtgccttggtggcaggtccctccccaggtcccctgagatggggtatggaggggcccttccctctcggccttcgagcactttctttcacttactgtgtcaaagccctgggtcctctttttgatgggcaccggcccctctgaacgtgatgggacctgccttctccactagtagctgggcagctcacaattcacacctgtgtacctgccacatccctcacttggtggaaaacacccagaaggtcttgagtcccccacccctgggtgtcagtccaaatgactgtataggaggcccttatttttgtcacagagcaagctggccatgaacgaaggagagaagacgccacagatttccttccctctcctccaggagaccataagatagatcccccatcctctcagccctattcccatgcctccctctcattggaggagctgaccaaagcagccctaacgggccataacacttgaccaattcagctgctggcagagggaggaaacaagtgttttcccaagtggcattttcatctcgctttcaccctgactaaagattgtcttaagtagcagcccagcccgcccagccccaggtgggtagtggggaggagagctggcattcctccaggtggcaaatggcgactctatactctccgcccgccccagggctggatggattagaaaaatgcctatttttcttgtatcgatgtagagactctattttctcccaaagacactatttttgcagctgtttgaagtttgtatattttccgtactgcagagcttacacaaaattgaagaatgttaatgttcgagttttcttatcttgtgtttagaggtgtgggtgcagtctcgggtatatacaacctcacgggncattgtactaatattccccagcgc

SEQ ID NO: 418961 - DNA, 511 bp, Homo sapiens
aaacagggctaaaacgataataattagcagaataaagacatatcggattttcatttcctttcctccttttcccaaccccttcacaaccaaacagcgagaccgcggtcggcacatgctttaactcctcccggacccccgaggaccgctccatgccccccactttctgctccagcgtttttattttcacccaataaagttcgaggattattttttattttttttgtttttttaatgaaccctctcgttttacttggatgtgatcagctgtaagtaaaataaaagcaaaacaaaaaagaggcgaagatcgagtaggaactgcaggggaaatggaaagtccctgacaggctggatgaaatgagatccccatgtagcaattgccatggaaacctgtgactcccctcctatctcaaggcaggaaaatgggcagagcacatcaaagctatgtggaacgacacaacttgataatgaggtgccagagaaagttgcagggatggagcctgacagggaaaac

SEQ ID NO: 418962 - DNA, 449 bp, Homo sapiens
tcacgattctttgcctgttctattgttttgcttttattttacttacagtctgatcactatccaagtaaaacgagagggttcattaataaaaacaaaaagaaataaaaaataatcctctaactttattgggtgaaaataaaaacgctggagcagaaagtggggggcatggagcggtcctcgggggtccgggaggagttaatagcatgtgccgaccgcggtctcgctgtcaggttgtgaaggggtagaccccgaggaggaaaggaaatggaaagtccctgacaggctggatgaaatgagatccccatgtagcaattgccatggaaacctgtgactcccctcctatctcaaggcaggaaaatgggcagagcacatcaaagctatgtggaacgacacaacttgataatgaggtgccagagaaagttgcagggatggagcctgacagggaaaac

SEQ ID NO: 418963 - DNA, 530 bp, Homo sapiens
gatatttaaaagataggagatagtacagcacgtttgtacgctgatggtaatgattaagtaaagaatgagaacgggatgattcagaagaaagggcataacttgaggagtgaaaccctgcaacctgttttcaaggccgggcaggagaaggaatgcttacaacggaggggaggcagaggtgtgggcacagatgcaggcgggccggcggatctggggaggaaggatgaagggagttctcttctctttgtttctaatttttcagaaagcaggaagccaagtcaccaggcagaactgatagcatgggaagtgggttcccaccagtcgcatgcagctgctctggtatggccatggtgctggggatgagtcagaaatctcaggtaggtacaacagaggaacaggcagatatggtagttaagggtattttgaaagaattattatatttgataatttgagctgcttaaggagggaagaaaggacatgagaggggtacggtaaaaaaggcagggaggtctccatgtggccagagaattact

SEQ ID NO: 418964 - DNA, 558 bp, Homo sapiens
ctagatttggaaatctctgtctacgtgtatgaaaggagggaagcagctataaattagaaaggagataggaaagtgaagatatttactagactctgcctttgcttgcagttctctggcttgattgaggaggttctcactttcatctttatgggactttggctaaaaaaataaactgtcaaaggaactggcatttgctgactggactacagcacatctcgaagaatctgcagactgaaaccttcaaggcattcatgaaatggtcttcccttagttcccctgccttttccactctttctgccatttggatttcacactggaagttcaagagatgacatcagaaaacagaaaagccagtgggaaaggcaaggagatttggaagagtgtttgaaaattttggcaatcaagaataagaaggtgttgaaatcaaatagttcctgctgggcactgtggagtatttatcagaagtcagttatattgccaattcccgaccagttttacttaagacacttgggtgtggaaagataatgctgtctatgaaataaataggtaatgttagaa

SEQ ID NO: 418965 - DNA, 941 bp, Homo sapiens
ctagatttggaaatctctgtctacgtgtatgaaaggagggaagcagctataaattagaaaggagataggaaagtgaagatatttactagactctgcctttgcttgcagttctctggcttgattgaggaggttctcactttcatctttatgggactttggctaaaaaaataaactgtcaaaggaactggcatttgctgactggactacagcacatctcgaagaatctgcagactgaaaccttcaaggcattcatgaaatggtcttcccttagttcccctgccttttccactctttctgccatttggatttcacactggaagttcaagagatgacatcagaaaacagaaaagccagtgggaaaggcaagaaagcaggaagccaagtcaccaggcagaactgatagcatgggaagtgggttcccaccagtcgcatgcagctgctctggtatggccatggtgctggggatgagtcagaaatctcagtcttttctggcttaaagaaaaggaagaatggaacccatcttctccagatatgttgttatggggtaggtgtaggtctagagacagaaaagaatcacatttgaacatcctcttaatgcaagaacatttttaaagaaacaattttccctgaatatccatcaagcctaatacagtgtgactatctgagatcaattattcttatctttacaaagactgggagttatacagcaaaagcaatactgtaaaatatgtgtattaaaatatgtaaaagaagggagttgaaaaaaggttggtattatttacctctcacagaactgttttccttttacagtgttctttaccccttctgtaagttctctctgggtgactgcgggagaacactgctaacaccctgaagtcagagacaaacttcaaagctgtgtgctaatagcactgtatataagcttatttgcagtagatgaa

SEQ ID NO: 418966 - DNA, 684 bp, Homo sapiens
tctagatgaactttctcttttgagctcctcttttggaaaaagaaacagtcctccctggcctccccacccggttccgcgtccttagacagctctcccggaacggagctcccagtgccctccttggcctcctcagcacccctggcacccaccaagcctcacccccggcccagggtgagtcgtctgcgcctgcgcactcgcgcgtgggcctgagctcccaggagtctccggggcggcccgttagtcgccgcgcggtgctagctgccggcgctcccctccgtttgcacccacggccgccctattgcggctggcactacgcttctgccaggaccccggctcccttttccgttgacctggtgttcgttttccatgtggtgagttgaggtgacccgggtctggatgcgagaagagctcacggcaggggacctgggttcatgggacgcggagagggtttgtggaggcagaagccccaggcctgtgtgcaagtcacctgctggggagggagactgtgtgattgtgtttgtgtgtgccgttctgtggctgcgtccgtgtgtggtggtgtgagtgggcgcgcctgtgatggtcccgggggggcggggggtgtgcacagcagggggtgtgtgtgcacagcaggtgcacagcccgggacagccctgactgtccccgattgggcccgcgggactgagt

SEQ ID NO: 418967 - DNA, 2801 bp, Homo sapiens
atacagactttctgtttttctatttcattttgagtcaagagttttgagaagctgtgcttttaaaggaatggatgaatttcatctaaaatgtcaaatttattggcataaaattgttcataatattgccttatcattttactgtctataggatccgtagtggcatcttcatttttattcctgacatgggcaatttgtgttttctattttattaattatgcttactagggatttatccatttttaaaataccttcacataaacttgttgttttgttcattttcttaatggtctgctttctatttctatttaattgatttatgctcatcttttttttttttttttttttaagatggagtctcgctctgtcacccagcctggagtgcagtggcgcgatctcggctcactgcaagctcctcctcccggatttaggccattctcctgcctcagcctcccgagtagctgggactacaggcggcgcctgccacaactcctggctaattttttgcatttttagtagagatggggtttcaccatgttagtcaggatggtctcgatctcctgacctcgtgatctgcccgtctcagcctcccacagtgctgggattacaggcgtgagccaccgcgcccagccgatttatgcccatctttacttcttttttttgacttttggtttagcatatagcatgtttattattcttgtttaagcctttcctcatttttaaaaatggtggcaaagtatacatgtaacataaaatttaccatcttaactatttgagtatacagctcagcagcattaagtatattcccatttttgtacaaccaacatccacaactttttcatcctgtaaatgtgaaactatatccatgaaataataactacccttttccccctgcccccagcccctggcaaccacgacaagaaacctacaaactctcactacaagcgttaatagcctaaaagtgggagaccagtaatactttctgattttatgaggtggactactctagatacttcatatgagtggaatcataagtagttatctttttgtgattggcttattagaatatcctcaaggttcagccacattgtagcatatgtcaaaatttccttccaaggctgaataatattacattgtatgtatatgccacatgtattagtctgttttgtgttgctataaaggaatacctgaggctgggtaatttataaagaaaaatggtttatttagcttatggttctataggctgtacaagaagcatagtgccagcatctgcttctggtgaggcctcaggaagcttacaattatggcagaaggcaaagggagagctagcatatcacatggcaagagggaacaaaagggagagggaggaggtgccaggctcttttaaacaactagctataggatgaactcatatccatgtggaggacaccaagccattcatgagatccaccccataatccaacacctcccactaggcgccacctccaacactgggggtcacatgtccgtgtgagattttgagggaacaaatatccaaatcatattaccacattttgtttatccattcatccactgatgaacatctgggttgtacgtatttcttggttattgtgaataatgctgctatgaatttctcctttttttatttaagtacttaacattcctctcaactctgctttagctgtatccttccaattttgatatgctgttgtcactttttcatatttcaaaacattttccccttatttattcaatgatctgtagatctagaagtgtgttatttaatttccatgtattgaaggactgtataggtttcttattattggtttctaatgcacattccctgtaatgtggcaatcttttgaagtttattgtgacttatggtccagccaatagtctatcatggggactgttcaggtacatgaaaagaatgtaatttttcaattgtgggtatggtgttctgtaaacaacaattaggtcatgttgactggtgtggttcatatcttctatacagttgtcccttgctatccacaggggactggttccaggacaccttgtggataccaaaacctacagatgcccaagtttgttatataaaatggtgtagtagttgcatataacctatgcacaaccttctgtatattttaaaccatctctagattttttataatacttaatacaatgtaaatgctatgtaaataattttatactgtattttaaaatttgtatttttttactgtcattgtgttttttctgaatatttgtgcattgctattggttgaatctgcatatatgaagagctgattacatatactactaaatttcttgcctacaagtgctatcaattactgagatataattgtggatttccaattatgcttgtggatctatttcttttgttctgttagtttttgcttcataaaatttaacactctcattataggttcatactagcatacatattcctgatgaacacagtcatgtgtcatgtaataacattttactcaatgatggacacatatacaatggtggtcccataagattacaatggagctgaaaaattcctatcacttgtggacgttgtcatgcaacatatcactcaggtgtttgtggtgacgctgctgtaaataaacctactgtgcttccagttgtataaaagtatagcacatgcaattatgtatagtacgtaataggtgataataataagtgattacattactagtttatgtaatttattgtactatttgtattattattttagactgtactccttctacttattaaaaaaaaaagtaactgtaaaa

SEQ ID NO: 418968 - DNA, 2911 bp, Homo sapiens
tctagatgaactttctcttttgagctcctcttttggaaaaagaaacagtcctccctggcctccccacccggttccgcgtccttagacagctctcccggaacggagctcccagtgccctccttggcctcctcagcacccctggcacccaccaagcctcacccccggcccagggtgagtcgtctgcgcctgcgcactcgcgcgtgggcctgagctcccaggagtctccggggcggcccgttagtcgccgcgcggtgctagctgccggcgctcccctccgtttgcacccacggccgccctattgcggctggcactacgcttctgccaggaccccggctcccttttccgttgacctggtgttcgttttccatgtgttgctgagagatggatgttaaaaatcaacaccaggactacagtaaggctgaaatcattgaagtgcttggagtgcagaactgaaagagatggagtctcgctctgtcacccagcctggagtgcagtggcgcgatctcggctcactgcaagctcctcctcccggatttaggccattctcctgcctcagcctcccgagtagctgggactacaggcggcgcctgccacaactcctggctaattttttgcatttttagtagagatggggtttcaccatgttagtcaggatggtctcgatctcctgacctcgtgatctgcccgtctcagcctcccacagtgctgggattacaggcgtgagccaccgcgcccagccgatttatgcccatctttacttcttttttttgacttttggtttagcatatagcatgtttattattcttgtttaagcctttcctcatttttaaaaatggtggcaaagtatacatgtaacataaaatttaccatcttaactatttgagtatacagctcagcagcattaagtatattcccatttttgtacaaccaacatccacaactttttcatcctgtaaatgtgaaactatatccatgaaataataactacccttttccccctgcccccagcccctggcaaccacgacaagaaacctacaaactctcactacaagcgttaatagcctaaaagtgggagaccagtaatactttctgattttatgaggtggactactctagatacttcatatgagtggaatcataagtagttatctttttgtgattggcttattagaatatcctcaaggttcagccacattgtagcatatgtcaaaatttccttccaaggctgaataatattacattgtatgtatatgccacatgtattagtctgttttgtgttgctataaaggaatacctgaggctgggtaatttataaagaaaaatggtttatttagcttatggttctataggctgtacaagaagcatagtgccagcatctgcttctggtgaggcctcaggaagcttacaattatggcagaaggcaaagggagagctagcatatcacatggcaagagggaacaaaagggagagggaggaggtgccaggctcttttaaacaactagctataggatgaactcatatccatgtggaggacaccaagccattcatgagatccaccccataatccaacacctcccactaggcgccacctccaacactgggggtcacatgtccgtgtgagattttgagggaacaaatatccaaatcatattaccacattttgtttatccattcatccactgatgaacatctgggttgtacgtatttcttggttattgtgaataatgctgctatgaatttctcctttttttatttaagtacttaacattcctctcaactctgctttagctgtatccttccaattttgatatgctgttgtcactttttcatatttcaaaacattttccccttatttattcaatgatctgtagatctagaagtgtgttatttaatttccatgtattgaaggactgtataggtttcttattattggtttctaatgcacattccctgtaatgtggcaatcttttgaagtttattgtgacttatggtccagccaatagtctatcatggggactgttcaggtacatgaaaagaatgtaatttttcaattgtgggtatggtgttctgtaaacaacaattaggtcatgttgactggtgtggttcatatcttctatacagttgtcccttgctatccacaggggactggttccaggacaccttgtggataccaaaacctacagatgcccaagtttgttatataaaatggtgtagtagttgcatataacctatgcacaaccttctgtatattttaaaccatctctagattttttataatacttaatacaatgtaaatgctatgtaaataattttatactgtattttaaaatttgtatttttttactgtcattgtgttttttctgaatatttgtgcattgctattggttgaatctgcatatatgaagagctgattacatatactactaaatttcttgcctacaagtgctatcaattactgagatataattgtggatttccaattatgcttgtggatctatttcttttgttctgttagtttttgcttcataaaatttaacactctcattataggttcatactagcatacatattcctgatgaacacagtcatgtgtcatgtaataacattttactcaatgatggacacatatacaatggtggtcccataagattacaatggagctgaaaaattcctatcacttgtggacgttgtcatgcaacatatcactcaggtgtttgtggtgacgctgctgtaaataaacctactgtgcttccagttgtataaaagtatagcacatgcaattatgtatagtacgtaataggtgataataataagtgattacattactagtttatgtaatttattgtactatttgtattattattttagactgtactccttctacttattaaaaaaaaaagtaactgtaaaa

SEQ ID NO: 418969 - DNA, 3228 bp, Homo sapiens
atacagactttctgtttttctatttcattttgagtcaagagttttgagaagctgtgcttttaaaggaatggatgaatttcatctaaaatgtcaaatttattggcataaaattgttcataatattgccttatcattttactgtctataggatccgtagtggcatcttcatttttattcctgacatgggcaatttgtgttttctattttattaattatgcttactagggatttatccatttttaaaataccttcacataaacttgttgttttgttcattttcttaatggtctgctttctatttctatttaattgatttatgctcatcttttttttttttttttttttaagatggagtctcgctctgtcacccagcctggagtgcagtggcgcgatctcggctcactgcaagctcctcctcccggatttaggccattctcctgcctcagcctcccgagtagctgggactacaggcggcgcctgccacaactcctggctaattttttgcatttttagtagagatggggtttcaccatgttagtcaggatggtctcgatctcctgacctcgtgatctgcccgtctcagcctcccacagtgctgggattacaggcgtgagccaccgcgcccagccgatttatgcccatctttacttcttttttttgacttttggtttagcatatagcatgtttattattcttgtttaagcctttcctcatttttaaaaatggtggcaaagtatacatgtaacataaaatttaccatcttaactatttgagtatacagctcagcagcattaagtatattcccatttttgtacaaccaacatccacaactttttcatcctgtaaatgtgaaactatatccatgaaataataactacccttttccccctgcccccagcccctggcaaccacgacaagaaacctacaaactctcactacaagcgttaatagcctaaaagtgggagaccagtaatactttctgattttatgaggtggactactctagatacttcatatgagtggaatcataagtagttatctttttgtgattggcttattagaatatcctcaaggttcagccacattgtagcatatgtcaaaatttccttccaaggctgaataatattacattgtatgtatatgccacatgtattagtctgttttgtgttgctataaaggaatacctgaggctgggtaatttataaagaaaaatggtttatttagcttatggttctataggctgtacaagaagcatagtgccagcatctgcttctggtgaggcctcaggaagcttacaattatggcagaaggcaaagggagagctagcatatcacatggcaagagggaacaaaagggagagggaggaggtgccaggctcttttaaacaactagctataggatgaactcatatccatgtggaggacaccaagccattcatgagatccaccccataatccaacacctcccactaggcgccacctccaacactgggggtcacatgtccgtgtgagattttgagggaacaaatatccaaatcatattaccacattttgtttatccattcatccactgatgaacatctgggttgtacgtatttcttggttattgtgaataatgctgctatgaatttctcctttttttatttaagtacttaacattcctctcaactctgctttagctgtatccttccaattttgatatgctgttgtcactttttcatatttcaaaacattttccccttatttattcaatgatctgtagatctagaagtgtgttatttaatttccatgtattgaaggactgtataggtttcttattattggtttctaatgcacattccctgtaatgtggcaatcttttgaagtttattgtgacttatggtccagccaatagtctatcatggggactgttcaggtacatgaaaagaatgtaatttttcaattgtgggtatggtgttctgtaaacaacaattaggtcatgttgactggtgtggttcatatcttctatacagttgtcccttgctatccacaggggactggttccaggacaccttgtggataccaaaacctacagatgcccaagtttgttatataaaatggtgtagtagttgcatataacctatgcacaaccttctgtatattttaaaccatctctagattttttataatacttaatacaatgtaaatgctatgtaaataattttatactgtattttaaaatttgtatttttttactgtcattgtgttttttctgaatatttgtgcattgctattggttgaatctgcatatatgaagagctgattacatatactactaaatttcttgcctacaagtgctatcaattactgagatataattgtggatttccaattatgcttgtggatctatttcttttgttctgttagtttttgcttcataaaatttaacactctcattataggttcatactagcatacatattcctgatgaacacagtcatgtgtcatgtaataacattttactcaatgatggacacatatacaatggtggtcccataagattacaatggagctgaaaaattcctatcacttgtggacgttgtcatgcaacatatcactcaggtgtttgtggtgacgctgctgtaaataaacctactgtgcttccagttgtataaaagtatagcacatgcaattatgtatagtacgtaataggtgataataataagtgattacattactagtttatgtaatttattgtactatttgtattattattttagactgtactccttctacttattaaaaaaaaaagtaactgtaaaaaaaaaaaaaaaaaaaaaaaaaaaaaaaaaaaaaaaaaaaaaaaaaaaaaaaaaaaaaaaaaaaaaaaaaaaaaaaaaaaaaaaaaaaaaaaaaaaaaaaaaaaaaaaaaaaaaaaagggggggggggggaaaacgggggggacaacagcaaccacccacacaccacactgtgaaagaaaggaacgagtcgcacactacagaggagtgtgagaaaaaaaaaaagaaagagaacgacgggacgacttaaaaaagacgcactaggaagagaagaacaaacgccagaatactgaacagagagaaaccacaccttggcggggagaaaaaacgagccacccacaacgaaagaaacccagcgaggaaaaaaaaccaggaggagcggagaaacccaactgctacgcgacagaaagcgccatgagtaaaaaaaacg

SEQ ID NO: 418970 - DNA, 2747 bp, Homo sapiens
atacagactttctgtttttctatttcattttgagtcaagagttttgagaagctgtgcttttaaaggaatggatgaatttcatctaaaatgtcaaatttattggcataaaattgttcataatattgccttatcattttactgtctataggatccgtagtggcatcttcatttttattcctgacatgggcaatttgtgttttctattttattaattatgcttactagggatttatccatttttaaaataccttcacataaacttgttgttttgttcattttcttaatggtctgctttctatttctatttaattgatttatgctcatcttttttttttttttttttttaagatggagtctcgctctgtcacccagcctggagtgcagtggcgcgatctcggctcactgcaagctcctcctcccggatttaggccattctcctgcctcagcctcccgagtagctgggactacaggcggcgcctgccacaactcctggctaattttttgcatttttagtagagatggggtttcaccatgttagtcaggatggtctcgatctcctgacctcgtgatctgcccgtctcagcctcccacagtgctgggattacaggcgtgagccaccgcgcccagccgatttatgcccatctttacttcttttttttgacttttggtttagcatatagcatgtttattattcttgtttaagcctttcctcatttttaaaaatggtggcaaagtatacatgtaacataaaatttaccatcttaactatttgagtatacagctcagcagcattaagtatattcccatttttgtacaaccaacatccacaactttttcatcctgtaaatgtgaaactatatccatgaaataataactacccttttccccctgcccccagcccctggcaaccacgacaagaaacctacaaactctcactacaagcgttaatagcctaaaagtgggagaccagtaatactttctgattttatgaggtggactactctagatacttcatatgagtggaatcataagtagttatctttttgtgattggcttattagaatatcctcaaggttcagccacattgtagcatatgtcaaaatttccttccaaggctgaataatattacattgtatgtatatgccacatgtattagtctgttttgtgttgctataaaggaatacctgaggctgggtaatttataaagaaaaatggtttatttagcttatggttctataggctgtacaagaagcatagtgccagcatctgcttctggtgaggcctcaggaagcttacaattatggcagaaggcaaagggagagctagcaaaacaactagctataggatgaactcatatccatgtggaggacaccaagccattcatgagatccaccccataatccaacacctcccactaggcgccacctccaacactgggggtcacatgtccgtgtgagattttgagggaacaaatatccaaatcatattaccacattttgtttatccattcatccactgatgaacatctgggttgtacgtatttcttggttattgtgaataatgctgctatgaatttctcctttttttatttaagtacttaacattcctctcaactctgctttagctgtatccttccaattttgatatgctgttgtcactttttcatatttcaaaacattttccccttatttattcaatgatctgtagatctagaagtgtgttatttaatttccatgtattgaaggactgtataggtttcttattattggtttctaatgcacattccctgtaatgtggcaatcttttgaagtttattgtgacttatggtccagccaatagtctatcatggggactgttcaggtacatgaaaagaatgtaatttttcaattgtgggtatggtgttctgtaaacaacaattaggtcatgttgactggtgtggttcatatcttctatacagttgtcccttgctatccacaggggactggttccaggacaccttgtggataccaaaacctacagatgcccaagtttgttatataaaatggtgtagtagttgcatataacctatgcacaaccttctgtatattttaaaccatctctagattttttataatacttaatacaatgtaaatgctatgtaaataattttatactgtattttaaaatttgtatttttttactgtcattgtgttttttctgaatatttgtgcattgctattggttgaatctgcatatatgaagagctgattacatatactactaaatttcttgcctacaagtgctatcaattactgagatataattgtggatttccaattatgcttgtggatctatttcttttgttctgttagtttttgcttcataaaatttaacactctcattataggttcatactagcatacatattcctgatgaacacagtcatgtgtcatgtaataacattttactcaatgatggacacatatacaatggtggtcccataagattacaatggagctgaaaaattcctatcacttgtggacgttgtcatgcaacatatcactcaggtgtttgtggtgacgctgctgtaaataaacctactgtgcttccagttgtataaaagtatagcacatgcaattatgtatagtacgtaataggtgataataataagtgattacattactagtttatgtaatttattgtactatttgtattattattttagactgtactccttctacttattaaaaaaaaaagtaactgtaaaa

SEQ ID NO: 418971 - DNA, 2232 bp, Homo sapiens
acttctcacacgcctttcttattggataccggcttttcatggggccgagcgccgctgggtaggcggaagtagccgcaggcatggcggcggctatgccgcttgctctgctcgtcctgttgctcctggggcccggcggctggtgccttgcagaacccccacgcgacagcctgcgggaggaacttgtcatcaccccgctgccttccggggacgtagccgccacattccagttccgcacgcgctgggattcggagcttcagcgggaaggagtgtcccattacaggctctttcccaaagccctggggcagctgatctccaagtattctctacgggagctgcacctgtcattcacacaaggcttttggaggacccgatactgggggccacccttcctgcaggccccatcaggtgcagagctgtgggtctggttccaagacactgtcactgatgtggataaatcttggaaggagctcagtaatgtcctctcagggatcttctgcgcctctctcaacttcatcgactccaccaacacagtcactcccactgcctccttcaaacccctgggtctggccaatgacactgaccactactttctgcgctatgctgtgctgccgcgggaggtggtctgcaccgaaaacctcaccccctggaagaagctcttgccctgtagttccaaggcaggcctctctgtgctgctgaaggcagatcgcttgttccacaccagctaccactcccaggcagtgcatatccgccctgtttgcagaaatgcacgctgtactagcatctcctgggagctgaggcagaccctgtcagttgtatttgatgccttcatcacggggcagggaaagaaagactggtccctcttccggatgttctcccgaaccctcacggagccctgccccctggcttcagagagccgagtctatgtggacatcaccacctacaaccaggacaacgagacattagaggtgcacccacccccgaccactacatatcaggacgtcatcctaggcactcggaagacctatgccatctatgacttgcttgacaccgccatgatcaacaactctcgaaacctcaacatccagctcaagtggaagagacccccagagaatgaggcccccccagtgcccttcctgcatgcccagcggtacgtgagtggctatgggctgcagaagggggagctgagcacactgctgtacaacacccacccataccgggccttcccggtgctgctgctggacaccgtaccctggtatctgcggctgtatgtgcacaccctcaccatcacctccaagggcaaggagaacaaaccaagttacatccactaccagcctgcccaggaccggctgcaaccccacctcctggagatgctgattcagctgccggccaactcagtcaccaaggtttccatccagtttgagcgggcgctgctgaagtggaccgagtacacgccagatcctaaccatggcttctatgtcagcccatctgtcctcagcgcccttgtgcccagcatggtagcagccaagccagtggactgggaagagagtcccctcttcaacagcctgttcccagtctctgatggctctaactactttgtgcggctctacacggagccgctgctggtgaacctgccgacaccggacttcagcatgccctacaacgtgatctgcctcacgtgcactgtggtggccgtgtgctacggctccttctacaatctcctcacccgaaccttccacatcgaggagccccgcacaggtggcctggccaagcggctggccaaccttatccggcgcgcccgaggtgtccccccactctgattcttgccctttccagcagctgcagctgccgtttctctctggggaggggagcccaagggctgtttctgccacttgctctcctcagagttggcttttgaaccaaagtgccctggaccaggtcagggcctacagctgtgttgtccagtacaggagccacgagccaaatgtggcatttgaatttgaattaacttagaaattcatttcctcacctgtagtggccacctctatattgaggtgctcaataagcaaaagtggtcggtggctgctgtattggacagcacagaaaaagatttccatcaccacagaaaggtcggctggcagcactggccaaggtgatggggtgtgctacacagtgtatgtcactgtgtagtggatggagtttactgtttgtggaataaaaacggctgtttccgtg

SEQ ID NO: 418972 - DNA, 2961 bp, Homo sapiens
  misc_feature (2255)..(2255): n is a, c, g, or t
acttctcacacgcctttcttattggataccggcttttcatggggccgagcgccgctgggtaggcggaagtagccgcaggcatggcggcggctatgccgcttgctctgctcgtcctgttgctcctggggcccggcggctggtgccttgcagaacccccacgcgacagcctgcgggaggaacttgtcatcaccccgctgccttccggggacgtagccgccacattccagttccgcacgcgctgggattcggagcttcagcgggaaggagtgtcccattacaggctctttcccaaagccctggggcagctgatctccaagtattctctacgggagctgcacctgtcattcacacaaggcttttggaggacccgatactgggggccacccttcctgcaggccccatcaggtgcagagctgtgggtctggttccaagacactgtcactgatgtggataaatcttggaaggagctcagtaatgtcctctcagggatcttctgcgcctctctcaacttcatcgactccaccaacacagtcactcccactgcctccttcaaacccctgggtctggccaatgacactgaccactactttctgcgctatgctgtgctgccgcgggaggtggtctgcaccgaaaacctcaccccctggaagaagctcttgccctgtagttccaaggcaggcctctctgtgctgctgaaggcagatcgcttgttccacaccagctaccactcccaggcagtgcatatccgccctgtttgcagaaatgcacgctgtactagcatctcctgggagctgaggcagaccctgtcagttgtatttgatgccttcatcacggggcagggaaagaaagactggtccctcttccggatgttctcccgaaccctcacggagccctgccccctggcttcagagagccgagtctatgtggacatcaccacctacaaccaggacaacgagacattagaggtgcacccacccccgaccactacatatcaggacgtcatcctaggcactcggaagacctatgccatctatgacttgcttgacaccgccatgatcaacaactctcgaaacctcaacatccagctcaagtggaagagacccccagagaatgaggcccccccagtgcccttcctgcatgcccagcggtacgtgagtggctatgggctgcagaagggggagctgagcacactgctgtacaacacccacccataccgggccttcccggtgctgctgctggacaccgtaccctggtatctgcggctgtatgtgcacaccctcaccatcacctccaagggcaaggagaacaaaccaagttacatccactaccagcctgcccaggaccggctgcaaccccacctcctggagatgctgattcagctgccggccaactcagtcaccaaggtttccatccagtttgagcgggcgctgctgaagtggaccgagtacacgccagatcctaaccatggcttctatgtcagcccatctgtcctcagcgcccttgtgcccagcatggtagcagccaagccagtggactgggaagagagtcccctcttcaacagcctgttcccagtctctgatggctctaactactttgtgcggctctacacggagccgctgctggtgaacctgccgacaccggacttcagcatgccctacaacgtgatctgcctcacgtgcactgtggtggccgtgtgctacggctccttctacaatctcctcacccgaaccttccacatcgaggagccccgcacaggtggcctggccaagcggctggccaaccttatccggcgcgcccgaggtgtccccccactctgattcttgccctttccagcagctgcagctgccgtttctctctggggaggggagcccaagggctgtttctgccacttgctctcctcagagttggcttttgaaccaaagtgccctggaccaggtcagggcctacagctgtgttgtccagtacaggagccacgagccaaatgtggcatttgaatttgaattaacttagaaattcatttcctcacctgtagtggccacctctatattgaggtgctcaataagcaaaagtggtcggtggctgctgtattggacagcacagaaaaagatttccatcaccacagaaaggtcggctggcagcactggccaaggtgatggggtgtgctacacagtgtatgtcactgtgtagtggatggagtttactgtttgtggaataaaaacggctgtttccgtgaaaaaaaaaaacaaaaacaaaanaaaaaaaaaaaaaaaaaaccgggggcagaatcacaatggcgggggtggacggacaaaagcacggtgacagacgaaaacgggccagaggcggccagacaagttgagtacttccgacgcccccacttttctttgtggagcacgagggggaaggaaacagcgggcgggacccccccaaagaggggaggaacgagaataaagatcaggcagacaacacccgggtaagcagctgggattaatagtgatgccgacgggcaaaaggaccagcgaggcacacaaccgcagacaacggcaaactgacgaccgacgaggagcgaaacgacgtcgcgacaatcaatcccacaactgggacagagagacgcgggagacaggacacacacagaaacacacaggaacaccaagcgaagagcacggcgagacgaacaggacagccagcatcacggcaggagtcgggaccagcagacacgaaccgccagaacgtagccatcaggggcaacaaggaggccacagaccaccgcgaaaccgagggtcaaagcgagctacgcgtgccgagagccgcgaagcaacgcggaaccgcacgagaccgaagaacgcagaccaacgcaacacgcagagcgcccacagcgagaccccagtcacaacgatagcaacaagaagaaggagaaggataaaccggaagtacggacgaagaggcacaacatgctcaact

SEQ ID NO: 418973 - DNA, 2770 bp, Homo sapiens
  misc_feature (2255)..(2255): n is a, c, g, or t
acttctcacacgcctttcttattggataccggcttttcatggggccgagcgccgctgggtaggcggaagtagccgcaggcatggcggcggctatgccgcttgctctgctcgtcctgttgctcctggggcccggcggctggtgccttgcagaacccccacgcgacagcctgcgggaggaacttgtcatcaccccgctgccttccggggacgtagccgccacattccagttccgcacgcgctgggattcggagcttcagcgggaaggagtgtcccattacaggctctttcccaaagccctggggcagctgatctccaagtattctctacgggagctgcacctgtcattcacacaaggcttttggaggacccgatactgggggccacccttcctgcaggccccatcaggtgcagagctgtgggtctggttccaagacactgtcactgatgtggataaatcttggaaggagctcagtaatgtcctctcagggatcttctgcgcctctctcaacttcatcgactccaccaacacagtcactcccactgcctccttcaaacccctgggtctggccaatgacactgaccactactttctgcgctatgctgtgctgccgcgggaggtggtctgcaccgaaaacctcaccccctggaagaagctcttgccctgtagttccaaggcaggcctctctgtgctgctgaaggcagatcgcttgttccacaccagctaccactcccaggcagtgcatatccgccctgtttgcagaaatgcacgctgtactagcatctcctgggagctgaggcagaccctgtcagttgtatttgatgccttcatcacggggcagggaaagaaagactggtccctcttccggatgttctcccgaaccctcacggagccctgccccctggcttcagagagccgagtctatgtggacatcaccacctacaaccaggacaacgagacattagaggtgcacccacccccgaccactacatatcaggacgtcatcctaggcactcggaagacctatgccatctatgacttgcttgacaccgccatgatcaacaactctcgaaacctcaacatccagctcaagtggaagagacccccagagaatgaggcccccccagtgcccttcctgcatgcccagcggtacgtgagtggctatgggctgcagaagggggagctgagcacactgctgtacaacacccacccataccgggccttcccggtgctgctgctggacaccgtaccctggtatctgcggctgtatgtgcacaccctcaccatcacctccaagggcaaggagaacaaaccaagttacatccactaccagcctgcccaggaccggctgcaaccccacctcctggagatgctgattcagctgccggccaactcagtcaccaaggtttccatccagtttgagcgggcgctgctgaagtggaccgagtacacgccagatcctaaccatggcttctatgtcagcccatctgtcctcagcgcccttgtgcccagcatggtagcagccaagccagtggactgggaagagagtcccctcttcaacagcctgttcccagtctctgatggctctaactactttgtgcggctctacacggagccgctgctggtgaacctgccgacaccggacttcagcatgccctacaacgtgatctgcctcacgtgcactgtggtggccgtgtgctacggctccttctacaatctcctcacccgaaccttccacatcgaggagccccgcacaggtggcctggccaagcggctggccaaccttatccggcgcgcccgaggtgtccccccactctgattcttgccctttccagcagctgcagctgccgtttctctctggggaggggagcccaagggctgtttctgccacttgctctcctcagagttggcttttgaaccaaagtgccctggaccaggtcagggcctacagctgtgttgtccagtacaggagccacgagccaaatgtggcatttgaatttgaattaacttagaaattcatttcctcacctgtagtggccacctctatattgaggtgctcaataagcaaaagtggtcggtggctgctgtattggacagcacagaaaaagatttccatcaccacagaaaggtcggctggcagcactggccaaggtgatggggtgtgctacacagtgtatgtcactgtgtagtggatggagtttactgtttgtggaataaaaacggctgtttccgtgaaaaaaaaaaacaaaaacaaaanaaaaaaaaggggggggcgccgcccaaataagaatttcccccgggggggccccaatttttagcgccttatcccccggttttttttgtgttacccaggggggggccccctatgagggggaggccgtctattatatatagccatgggccagcgggccgcgcggcttttaaccaccgcggctgtggacgctggagaacaaaacctcgctcaagcgcgtgggggacacccttggggggagggggaccccctttatctctccgcggggggcggggggcggcccacattttgtgcggggcccacacacctccccctttagcgaggggggcttttttaaaggggcccctcaaagggggccccctattacttacacctttttcacgggggtctcctttaagcgggcgggcttcaaccctgtccggcgcgcaaataattcttgctgccgcgcgctttgagaaaaaccttctggcgcctccaccggggcgttcttgctctcttccgcacactttttttcttccgtg

SEQ ID NO: 418974 - DNA, 2098 bp, Homo sapiens
acttctcacacgcctttcttattggataccggcttttcatggggccgagcgccgctgggtaggcggaagtagccgcaggcatggcggcggctatgccgcttgctctgctcgtcctgttgctcctggggcccggcggctggtgccttgcagaacccccacgcgacagcctgcgggaggaacttgtcatcaccccgctgccttccggggacgtagccgccacattccagttccgcacgcgctgggattcggagcttcagcgggaaggagtgtcccattacaggctctttcccaaagccctggggcagctgatctccaagtattctctacgggagctgcacctgtcattcacacaaggcttttggaggacccgatactgggggccacccttcctgcaggccccatcaggtgcagagctgtgggtctggttccaagacactgtcactgatgtggataaatcttggaaggagctcagtaatgtcctctcagggatcttctgcgcctctctcaacttcatcgactccaccaacacagtcactcccactgcctccttcaaacccctgggtctggccaatgacactgaccactactttctgcgctatgctgtgctgccgcgggaggtggtctgcaccgaaaacctcaccccctggaagaagctcttgccctgtagttccaaggcaggcctctctgtgctgctgaaggcagatcgcttgttccacaccagctaccactcccaggcagtgcatatccgccctgtttgcagaaatgcacgctgtactagcatctcctgggagctgaggcagaccctgtcagttgtatttgatgccttcatcacggggcagggaaagaaagactggtccctcttccggatgttctcccgaaccctcacggagccctgccccctggcttcagagagccgagtctatgtggacatcaccacctacaaccaggacaacgagacattagaggtgcacccacccccgaccactacatatcaggacgtcatcctaggcactcggaagacctatgccatctatgacttgcttgacaccgccatgatcaacaactctcgaaacctcaacatccagctcaagtggaagagacccccagagaatgaggcccccccagtgcccttcctgcatgcccagcggtacgtgagtggctatgggctgcagaagggggagctgagcacactgctgtacaacacccacccataccgggccttcccggtgctgctgctggacaccgtaccctggtatctgcggctgtatgtgcacaccctcaccatcacctccaagggcaaggagaacaaaccaagttacatccactaccagcctgcccaggaccggctgcaaccccacctcctggagatgctgattcagctgccggccaactcagtcaccaaggtttccatccagtttgagcgggcgctgctgaagtggaccgagtacacgccagatcctaaccatggcttctatgtcagcccatctgtcctcagcgcccttgtgcccagcatggtagcagccaagccagtggactgggaagagagtcccctcttcaacagcctgttcccagtctctgatggctctaactactttgtgcggctctacacggagccgctgctggtgaacctgccgacaccggacttcagcatgccctacaacgtgatctgcctcacgtgcactgtggtggccgtgtgctacggctccttctacaatctcctcacccgaaccttccacatcgaggagccccgcacaggtggcctggccaagcggctggccaaccttatccggcgcgcccgaggtgtccccccactctgattcttgccctttccagcagctgcagctgccgtttctctctggggaggggagcccaagggctgtttctgccacttgctctcctcagagttggcttttgaaccaaagtgccctggaccaggtcagggcctacagtgtattggacagcacagaaaaagatttccatcaccacagaaaggtcggctggcagcactggccaaggtgatggggtgtgctacacagtgtatgtcactgtgtagtggatggagtttactgtttgtggaataaaaacggctgtttccgtg

SEQ ID NO: 418975 - DNA, 5593 bp, Homo sapiens
  misc_feature (2786)..(2786): n is a, c, g, or t
  misc_feature (3009)..(3009): n is a, c, g, or t
  misc_feature (4887)..(4887): n is a, c, g, or t
acttctcacacgcctttcttattggataccggcttttcatggggccgagcgccgctgggtaggcggaagtagccgcaggcatggcggcggctatgccgcttgctctgctcgtcctgttgctcctggggcccggcggctggtgccttgcagaacccccacgcgacagcctgcgggaggaacttgtcatcaccccgctgccttccggggacgtagccgccacattccagttccgcacgcgctgggattcggagcttcagcgggaaggagtgtcccattacaggctctttcccaaagccctggggcagctgatctccaagtattctctacgggagctgcacctgtcattcacacaaggcttttggaggacccgatactgggggccacccttcctgcaggccccatcaggtgcagagctgtgggtctggttccaagacactgtcactgatgtggataaatcttggaaggagctcagtaatgtcctctcagggatcttctgcgcctctctcaacttcatcgactccaccaacacagtcactcccactgcctccttcaaacccctgggtctggccaatgacactgaccactactttctgcgctatgctgtgctgccgcgggaggtggtctgcaccgaaaacctcaccccctggaagaagctcttgccctgtagttccaaggcaggcctctctgtgctgctgaaggcagatcgcttgttccacaccagctaccactcccaggcagtgcatatccgccctgtttgcagaaatgcacgctgtactagcatctcctgggagctgaggcagaccctgtcagttgtatttgatgccttcatcacggggcagggaaagaaagactggtccctcttccggatgttctcccgaaccctcacggagccctgccccctggcttcagagagccgagtctatgtggacatcaccacctacaaccaggacaacgagacattagaggtgcacccacccccgaccactacatatcaggacgtcatcctaggcactcggaagacctatgccatctatgacttgcttgacaccgccatgatcaacaactctcgaaacctcaacatccagctcaagtggaagagacccccagagaatgaggcccccccagtgcccttcctgcatgcccagcggtacgtgagtggctatgggctgcagaagggggagctgagcacactgctgtacaacacccacccataccgggccttcccggtgctgctgctggacaccgtaccctggtatctgcggctgtatgtgcacaccctcaccatcacctccaagggcaaggagaacaaaccaagtgaggacctgagtcctgaaccaggcccccagcccgccctctcatgtcctctccaggtcccccaaactctcatttcccagggtagttcctgaagtacctctgaaaagctacacaggcataaagagtaaggaatagtttctcaaaactggaacgggagcctcactgtgccaggttcagaagtaatttataaaacagcaataattaaaacacataatactggtgattcttaataggactgtacaaggacagtagcttcctttttcacttacttttgcctcctttctggagcattgggttttgtgatgattcatagactctttaaggtagggaaagggtttggcaacgttaggcttttgaagctaggaagatagcagagctggagtagatggtgttttgcttccttgggaggggtaaagaggtacagttaattaaatttttttatttctatttttattaaaatttatttttattttctattatttttctaaggagaagataatattagtgcttcctattaggtgccaggcatagcactaaagcacttgcctttctttggtgtagggggagactagtagtaaagtaaaagacctctgaggaagaggttgtaccatatcccaaacggccaaacttaaaaacctttcagtactttagttgattcctatattttcaaacatacggtgaatagtttcacttattttcagcaccattatttgtaccaccttcaaaatctctatttcagacatcctaactgcatattctataggtttttctgttattattcttttaaatcttctcctttggaaaatttcaaacccaaacccaaacagaatagtgtaataatcccctgtacacaccctgcagccttttttttttttttttaagagacagactgttgctctgtcagctatgccggagtgcagtggcatgatcatggctcattgcagtctcagactgctcggctcaagcaatcctcctacctccgcttccctaggactgcaggcatgaaccgccatgcctttaattttttcacagaggcagggtcttgttatgttgcacaggctggtctcaaactcctggcctcaagcgattctcctgcctcagtctcctaaagtgctgggattataggtgtaagccgctgcctgctggcatatcttaaagcaaatcttagacattgcatcaattaacctttaaatactttaaggatttttaaaaatgtaaccatatcattaccacttctgttttcccctgtggtcttaaaaatgtctttttataactggtttgtttaaattgggataaacaaggttctcacattgcatttgctttatactaagttcctctcttgggtgggcacagtggtgcacacctgtaatctcagcactttgggaggccaacacagaaggaccacttgagtccaggagttcgaaaccagcctggacaacattgtgaggctccccctacctatacaaaaaaantttttttttttttttttttttttttttgagacggatcctcactctgtcacccaggctggagtgcagtggcgcgatcttagctcactgcaacctccacctcccgggttcaagcgattctcctgcctccacctcccgagtagctgggactacaggcgcgtgccaccacgcctggctaattttttctgtttttagtagagatgcggtttcactgtgttagccaggntggtctcgatcttctgaccttgtgatctgcccgccttggcctcccaaagtgctgggattaaaataaattgtttttaattagctgggggtggtgttgcacgcctgtagtcccagctactcaagaggctgaggtgggaggatcgcttgaacccaggaggtcaaggctatagtgagccatgatcatactattgcacttcagcatgggcgacagtgtgagaccctgtcacgaaaaaaaaaaaagtttctttttctttaaaattactagactattcttagagcagttttaggtttacagaaaaactgagcacaaagcacagagttcccatatactccctgtctccacacccagaatgtcccttattataaatgtcttgtctttggtgtggtactcttcagtctctcttcatctgtagcagtgcccatgccttttttttttttttttaatgtcatttatttgttgaagaaactgggtcatttgttgtgtagaatgttccacattctgggtttgtccttgtgctagtgtttaacacacccctcctctcctatatttcttgtgtgttggtggttagatttagaaacctgattagattcatgtcccacatttttggcaagaaaaattcccaggtggttctgtgaacttcttcttgcgtcacatcaggcacttggtgtctggtgccccagttgtagtgatgtgaagattgattagccatctgcagcactcctaacaacctctcttgatcgcatcctgggatcactgccctggaaacatcctctcccttttcttagcccctgctttcttcccttgcctgcctggcttctatgctcccaagcccatcttctaggcacccagattgaggctccatggcaagcagcagggacaggggcagcaggtagcctgaccccaggaaagagatgtgggtgaccttgcatgtctccaggttacatccactaccagcctgcccaggaccggctgcaaccccacctcctggagatgctgattcagctgccggccaactcagtcaccaaggtttccatccagtttgagcgggcgctgctgaagtggaccgagtacacgccagatcctaaccatggcttctatgtcagcccatctgtcctcagcgcccttgtgcccagcatggtagcagccaagccagtggactgggaagagagtcccctcttcaacagcctgttcccagtctctgatggctctaactactttgtgcggctctacacggagccgctgctggtgaacctgccgacaccggacttcagcatgccctacaacgtgatctgcctcacgtgcactgtggtggccgtgtgctacggctccttctacaatctcctcacccgaaccttccacatcgaggagccccgcacaggtggcctggccaagcggctggccaaccttatccggcgcgcccgaggtgtccccccactctgattcttgccctttccagcagctgcagctgccgtttctctctggggaggggagcccaagggctgtttctgccacttgctctcctcagagttggcttttgaaccaaagtgccctggaccaggtcagggcctacagctgtgttgtccagtacaggagccacgagccaaatgtggcatttgaatttgaattaacttagaaattcatttcctcacctgtagtggccacctctatattgaggtgctcaataagcaaaagtggtcggtggctgctgtattggacagcacagaaaaagatttccatcaccacagaaaggtcggctggcagcactggccaaggtgatggggtgtgctacacagtgtatgtcactgtgtagtggatggagtttactgtttgtggaataaaaacggctgtttccgtgaaaaaaaaaaacaaaaacaaaanaaaaaaaaaaaaaaaaaaccgggggcagaatcacaatggcgggggtggacggacaaaagcacggtgacagacgaaaacgggccagaggcggccagacaagttgagtacttccgacgcccccacttttctttgtggagcacgagggggaaggaaacagcgggcgggacccccccaaagaggggaggaacgagaataaagatcaggcagacaacacccgggtaagcagctgggattaatagtgatgccgacgggcaaaaggaccagcgaggcacacaaccgcagacaacggcaaactgacgaccgacgaggagcgaaacgacgtcgcgacaatcaatcccacaactgggacagagagacgcgggagacaggacacacacagaaacacacaggaacaccaagcgaagagcacggcgagacgaacaggacagccagcatcacggcaggagtcgggaccagcagacacgaaccgccagaacgtagccatcaggggcaacaaggaggccacagaccaccgcgaaaccgagggtcaaagcgagctacgcgtgccgagagccgcgaagcaacgcggaaccgcacgagaccgaagaacgcagaccaacgcaacacgcagagcgcccacagcgagaccccagtcacaacgatagcaacaagaagaaggagaaggataaaccggaagtacggacgaagaggcacaacatgctcaact

SEQ ID NO: 418976 - DNA, 2760 bp, Homo sapiens
  misc_feature (2054)..(2054): n is a, c, g, or t
acttctcacacgcctttcttattggataccggcttttcatggggccgagcgccgctgggtaggcggaagtagccgcaggcatggcggcggctatgccgcttgctctgctcgtcctgttgctcctggggcccggcggctggtgccttgcagaacccccacgcgacagcctgcgggaggaacttgtcatcaccccgctgccttccggggacgtagccgccacattccagttccgcacgcgctgggattcggagcttcagcgggaaggagtgtcccattacaggctctttcccaaagccctggggcagctgatctccaagtattctctacgggagctgcacctgtcattcacacaaggcttttggaggacccgatactgggggccacccttcctgcaggccccatcaggtgcagagctgtgggtctggttccaagacactgtcactgatgtggataaatcttggaaggagctcagtaatgtcctctcagggatcttctgcgcctctctcaacttcatcgactccaccaacacagtcactcccactgcctccttcaaacccctgggtctggccaatgacactgaccactactttctgcgctatgctgtgctgccgcgggaggtggtctgcaccgaaaacctcaccccctggaagaagctcttgccctgtagttccaaggcaggcctctctgtgctgctgaaggcagatcgcttgttccacaccagctaccactcccaggcagtgcatatccgccctgtttgcagaaatgcacgctgtactagcatctcctgggagctgaggcagaccctgtcagttgtatttgatgccttcatcacggggcagggaaagaaagactggtccctcttccggatgttctcccgaaccctcacggagccctgccccctggcttcagagagccgagtctatgtggacatcaccacctacaaccaggacaacgagacattagaggtgcacccacccccgaccactacatatcaggacgtcatcctaggcactcggaagacctatgccatctatgacttgcttgacaccgccatgatcaacaactctcgaaacctcaacatccagctcaagtggaagagacccccagagaatggttacatccactaccagcctgcccaggaccggctgcaaccccacctcctggagatgctgattcagctgccggccaactcagtcaccaaggtttccatccagtttgagcgggcgctgctgaagtggaccgagtacacgccagatcctaaccatggcttctatgtcagcccatctgtcctcagcgcccttgtgcccagcatggtagcagccaagccagtggactgggaagagagtcccctcttcaacagcctgttcccagtctctgatggctctaactactttgtgcggctctacacggagccgctgctggtgaacctgccgacaccggacttcagcatgccctacaacgtgatctgcctcacgtgcactgtggtggccgtgtgctacggctccttctacaatctcctcacccgaaccttccacatcgaggagccccgcacaggtggcctggccaagcggctggccaaccttatccggcgcgcccgaggtgtccccccactctgattcttgccctttccagcagctgcagctgccgtttctctctggggaggggagcccaagggctgtttctgccacttgctctcctcagagttggcttttgaaccaaagtgccctggaccaggtcagggcctacagctgtgttgtccagtacaggagccacgagccaaatgtggcatttgaatttgaattaacttagaaattcatttcctcacctgtagtggccacctctatattgaggtgctcaataagcaaaagtggtcggtggctgctgtattggacagcacagaaaaagatttccatcaccacagaaaggtcggctggcagcactggccaaggtgatggggtgtgctacacagtgtatgtcactgtgtagtggatggagtttactgtttgtggaataaaaacggctgtttccgtgaaaaaaaaaaacaaaaacaaaanaaaaaaaaaaaaaaaaaaccgggggcagaatcacaatggcgggggtggacggacaaaagcacggtgacagacgaaaacgggccagaggcggccagacaagttgagtacttccgacgcccccacttttctttgtggagcacgagggggaaggaaacagcgggcgggacccccccaaagaggggaggaacgagaataaagatcaggcagacaacacccgggtaagcagctgggattaatagtgatgccgacgggcaaaaggaccagcgaggcacacaaccgcagacaacggcaaactgacgaccgacgaggagcgaaacgacgtcgcgacaatcaatcccacaactgggacagagagacgcgggagacaggacacacacagaaacacacaggaacaccaagcgaagagcacggcgagacgaacaggacagccagcatcacggcaggagtcgggaccagcagacacgaaccgccagaacgtagccatcaggggcaacaaggaggccacagaccaccgcgaaaccgagggtcaaagcgagctacgcgtgccgagagccgcgaagcaacgcggaaccgcacgagaccgaagaacgcagaccaacgcaacacgcagagcgcccacagcgagaccccagtcacaacgatagcaacaagaagaaggagaaggataaaccggaagtacggacgaagaggcacaacatgctcaact

SEQ ID NO: 418977 - DNA, 5509 bp, Homo sapiens
  misc_feature (2786)..(2786): n is a, c, g, or t
  misc_feature (3009)..(3009): n is a, c, g, or t
  misc_feature (4803)..(4803): n is a, c, g, or t
acttctcacacgcctttcttattggataccggcttttcatggggccgagcgccgctgggtaggcggaagtagccgcaggcatggcggcggctatgccgcttgctctgctcgtcctgttgctcctggggcccggcggctggtgccttgcagaacccccacgcgacagcctgcgggaggaacttgtcatcaccccgctgccttccggggacgtagccgccacattccagttccgcacgcgctgggattcggagcttcagcgggaaggagtgtcccattacaggctctttcccaaagccctggggcagctgatctccaagtattctctacgggagctgcacctgtcattcacacaaggcttttggaggacccgatactgggggccacccttcctgcaggccccatcaggtgcagagctgtgggtctggttccaagacactgtcactgatgtggataaatcttggaaggagctcagtaatgtcctctcagggatcttctgcgcctctctcaacttcatcgactccaccaacacagtcactcccactgcctccttcaaacccctgggtctggccaatgacactgaccactactttctgcgctatgctgtgctgccgcgggaggtggtctgcaccgaaaacctcaccccctggaagaagctcttgccctgtagttccaaggcaggcctctctgtgctgctgaaggcagatcgcttgttccacaccagctaccactcccaggcagtgcatatccgccctgtttgcagaaatgcacgctgtactagcatctcctgggagctgaggcagaccctgtcagttgtatttgatgccttcatcacggggcagggaaagaaagactggtccctcttccggatgttctcccgaaccctcacggagccctgccccctggcttcagagagccgagtctatgtggacatcaccacctacaaccaggacaacgagacattagaggtgcacccacccccgaccactacatatcaggacgtcatcctaggcactcggaagacctatgccatctatgacttgcttgacaccgccatgatcaacaactctcgaaacctcaacatccagctcaagtggaagagacccccagagaatgaggcccccccagtgcccttcctgcatgcccagcggtacgtgagtggctatgggctgcagaagggggagctgagcacactgctgtacaacacccacccataccgggccttcccggtgctgctgctggacaccgtaccctggtatctgcggctgtatgtgcacaccctcaccatcacctccaagggcaaggagaacaaaccaagtgaggacctgagtcctgaaccaggcccccagcccgccctctcatgtcctctccaggtcccccaaactctcatttcccagggtagttcctgaagtacctctgaaaagctacacaggcataaagagtaaggaatagtttctcaaaactggaacgggagcctcactgtgccaggttcagaagtaatttataaaacagcaataattaaaacacataatactggtgattcttaataggactgtacaaggacagtagcttcctttttcacttacttttgcctcctttctggagcattgggttttgtgatgattcatagactctttaaggtagggaaagggtttggcaacgttaggcttttgaagctaggaagatagcagagctggagtagatggtgttttgcttccttgggaggggtaaagaggtacagttaattaaatttttttatttctatttttattaaaatttatttttattttctattatttttctaaggagaagataatattagtgcttcctattaggtgccaggcatagcactaaagcacttgcctttctttggtgtagggggagactagtagtaaagtaaaagacctctgaggaagaggttgtaccatatcccaaacggccaaacttaaaaacctttcagtactttagttgattcctatattttcaaacatacggtgaatagtttcacttattttcagcaccattatttgtaccaccttcaaaatctctatttcagacatcctaactgcatattctataggtttttctgttattattcttttaaatcttctcctttggaaaatttcaaacccaaacccaaacagaatagtgtaataatcccctgtacacaccctgcagccttttttttttttttttaagagacagactgttgctctgtcagctatgccggagtgcagtggcatgatcatggctcattgcagtctcagactgctcggctcaagcaatcctcctacctccgcttccctaggactgcaggcatgaaccgccatgcctttaattttttcacagaggcagggtcttgttatgttgcacaggctggtctcaaactcctggcctcaagcgattctcctgcctcagtctcctaaagtgctgggattataggtgtaagccgctgcctgctggcatatcttaaagcaaatcttagacattgcatcaattaacctttaaatactttaaggatttttaaaaatgtaaccatatcattaccacttctgttttcccctgtggtcttaaaaatgtctttttataactggtttgtttaaattgggataaacaaggttctcacattgcatttgctttatactaagttcctctcttgggtgggcacagtggtgcacacctgtaatctcagcactttgggaggccaacacagaaggaccacttgagtccaggagttcgaaaccagcctggacaacattgtgaggctccccctacctatacaaaaaaantttttttttttttttttttttttttttgagacggatcctcactctgtcacccaggctggagtgcagtggcgcgatcttagctcactgcaacctccacctcccgggttcaagcgattctcctgcctccacctcccgagtagctgggactacaggcgcgtgccaccacgcctggctaattttttctgtttttagtagagatgcggtttcactgtgttagccaggntggtctcgatcttctgaccttgtgatctgcccgccttggcctcccaaagtgctgggattaaaataaattgtttttaattagctgggggtggtgttgcacgcctgtagtcccagctactcaagaggctgaggtgggaggatcgcttgaacccaggaggtcaaggctatagtgagccatgatcatactattgcacttcagcatgggcgacagtgtgagaccctgtcacgaaaaaaaaaaaagtttctttttctttaaaattactagactattcttagagcagttttaggtttacagaaaaactgagcacaaagcacagagttcccatatactccctgtctccacacccagaatgtcccttattataaatgtcttgtctttggtgtggtactcttcagtctctcttcatctgtagcagtgcccatgccttttttttttttttttaatgtcatttatttgttgaagaaactgggtcatttgttgtgtagaatgttccacattctgggtttgtccttgtgctagtgtttaacacacccctcctctcctatatttcttgtgtgttggtggttagatttagaaacctgattagattcatgtcccacatttttggcaagaaaaattcccaggtggttctgtgaacttcttcttgcgtcacatcaggcacttggtgtctggtgccccagttgtagtgatgtgaagattgattagccatctgcagcactcctaacaacctctcttgatcgcatcctgggatcactgccctggaaacatcctctcccttttcttagcccctgctttcttcccttgcctgcctggcttctatgctcccaagcccatcttctaggcacccagattgaggctccatggcaagcagcagggacaggggcagcaggtagcctgaccccaggaaagagatgtgggtgaccttgcatgtctccaggttacatccactaccagcctgcccaggaccggctgcaaccccacctcctggagatgctgattcagctgccggccaactcagtcaccaaggtttccatccagtttgagcgggcgctgctgaagtggaccgagtacacgccagatcctaaccatggcttctatgtcaggttcccagtctctgatggctctaactactttgtgcggctctacacggagccgctgctggtgaacctgccgacaccggacttcagcatgccctacaacgtgatctgcctcacgtgcactgtggtggccgtgtgctacggctccttctacaatctcctcacccgaaccttccacatcgaggagccccgcacaggtggcctggccaagcggctggccaaccttatccggcgcgcccgaggtgtccccccactctgattcttgccctttccagcagctgcagctgccgtttctctctggggaggggagcccaagggctgtttctgccacttgctctcctcagagttggcttttgaaccaaagtgccctggaccaggtcagggcctacagctgtgttgtccagtacaggagccacgagccaaatgtggcatttgaatttgaattaacttagaaattcatttcctcacctgtagtggccacctctatattgaggtgctcaataagcaaaagtggtcggtggctgctgtattggacagcacagaaaaagatttccatcaccacagaaaggtcggctggcagcactggccaaggtgatggggtgtgctacacagtgtatgtcactgtgtagtggatggagtttactgtttgtggaataaaaacggctgtttccgtgaaaaaaaaaaacaaaaacaaaanaaaaaaaaaaaaaaaaaaccgggggcagaatcacaatggcgggggtggacggacaaaagcacggtgacagacgaaaacgggccagaggcggccagacaagttgagtacttccgacgcccccacttttctttgtggagcacgagggggaaggaaacagcgggcgggacccccccaaagaggggaggaacgagaataaagatcaggcagacaacacccgggtaagcagctgggattaatagtgatgccgacgggcaaaaggaccagcgaggcacacaaccgcagacaacggcaaactgacgaccgacgaggagcgaaacgacgtcgcgacaatcaatcccacaactgggacagagagacgcgggagacaggacacacacagaaacacacaggaacaccaagcgaagagcacggcgagacgaacaggacagccagcatcacggcaggagtcgggaccagcagacacgaaccgccagaacgtagccatcaggggcaacaaggaggccacagaccaccgcgaaaccgagggtcaaagcgagctacgcgtgccgagagccgcgaagcaacgcggaaccgcacgagaccgaagaacgcagaccaacgcaacacgcagagcgcccacagcgagaccccagtcacaacgatagcaacaagaagaaggagaaggataaaccggaagtacggacgaagaggcacaacatgctcaact

SEQ ID NO: 418978 - DNA, 1709 bp, Homo sapiens
  misc_feature (1676)..(1676): n is a, c, g, or t
  misc_feature (1680)..(1680): n is a, c, g, or t
  misc_feature (1682)..(1683): n is a, c, g, or t
  misc_feature (1687)..(1688): n is a, c, g, or t
  misc_feature (1690)..(1690): n is a, c, g, or t
  misc_feature (1697)..(1697): n is a, c, g, or t
  misc_feature (1700)..(1700): n is a, c, g, or t
  misc_feature (1707)..(1707): n is a, c, g, or t
acttctcacacgcctttcttattggataccggcttttcatggggccgagcgccgctgggtaggcggaagtagccgcaggcatggcggcggctatgccgcttgctctgctcgtcctgttgctcctggggcccggcggctggtgccttgcagaacccccacgcgacagcctgcgggaggaacttgtcatcaccccgctgccttccggggacgtagccgccacattccagttccgcacgcgctgggattcggagcttcagcgggaaggagtgtcccattacaggctctttcccaaagccctggggcagctgatctccaagtattctctacgggagctgcacctgtcattcacacaaggcttttggaggacccgatactgggggccacccttcctgcaggccccatcaggtgcagagctgtgggtctggttccaagacactgtcactgatgtggataaatcttggaaggagctcagtaatgtcctctcagggatcttctgcgcctctctcaacttcatcgactccaccaacacagtcactcccactgcctccttcaaacccctgggtctggccaatgacactgaccactactttctgcgctatgctgtgctgccgcgggaggtggtctgcaccgaaaacctcaccccctggaagaagctcttgccctgtagttccaaggcaggcctctctgtgctgctgaaggcagatcgcttgttccacaccagctaccactcccaggcagtgcatatccgccctgtttgcagaaatgcacgctgtactagcatctcctgggagctgaggcagaccctgtcagttgtatttgatgccttcatcacggggcagggaaagaaagactggtccctcttccggatgttctcccgaaccctcacggagccctgccccctggcttcagagagccgagtctatgtggacatcaccacctacaaccaggacaacgagacattagaggtgcacccacccccgaccactacatatcaggacgtcatcctaggcactcggaagacctatgccatctatgacttgcttgacaccgccatgatcaacaactctcgaaacctcaacatccagctcaagtggaagagacccccagagaatgaggcccccccagtgcccttcctgcatgcccagcggtacgtgagtggctatgggctgcagaagggggagctgagcacactgctgtacaacacccacccataccgggccttcccggtgctgctgctggacaccgtaccctggtatctgcggctgtatgtgcacaccctcaccatcacctccaagggcaaggagaacaaaccaagttacatccactaccagcctgcccaggaccggctgcaaccccacctcctggagatgctgattcagctgccggccaactcagtcaccaaggtttccatccagtttgagcgggcgctgctgaagtggaccgagtacacgccagatcctaaccatggcttctatgtcagcccatctgtcctcagcgcccttgtgcccagcatggtagcagccaagccagtggactgggaagagagtcccctcttcaacagcctgttcccagtctctgatggctctaactactttgtgcggctctacacggagccgctgctggtgaacctgccgacaccggacttcagcaagcaggtttgagaagtgtggttttcngggngnnttcnnanaaatccnganggtttcntt

SEQ ID NO: 418979 - DNA, 2079 bp, Homo sapiens
acttctcacacgcctttcttattggataccggcttttcatggggccgagcgccgctgggtaggcggaagtagccgcaggcatggcggcggctatgccgcttgctctgctcgtcctgttgctcctggggcccggcggctggtgccttgcagaacccccacgcgacagcctgcgggaggaacttgtcatcaccccgctgccttccggggacgtagccgccacattccagttccgcacgcgctgggattcggagcttcagcgggaaggagtgtcccattacaggctctttcccaaagccctggggcagctgatctccaagtattctctacgggagctgcacctgtcattcacacaaggcttttggaggacccgatactgggggccacccttcctgcaggccccatcaggtgcagagctgtgggtctggttccaagacactgtcactgatgtggataaatcttggaaggagctcagtaatgtcctctcagggatcttctgcgcctctctcaacttcatcgactccaccaacacagtcactcccactgcctccttcaaacccctgggtctggccaatgacactgaccactactttctgcgctatgctgtgctgccgcgggaggtggtctgcaccgaaaacctcaccccctggaagaagctcttgccctgtagttccaaggcaggcctctctgtgctgctgaaggcagatcgcttgttccacaccagctaccactcccaggcagtgcatatccgccctgtttgcagaaatgcacgctgtactagcatctcctgggagctgaggcagaccctgtcagttgtatttgatgccttcatcacggggcagggaaagaaagactggtccctcttccggatgttctcccgaaccctcacggagccctgccccctggcttcagagagccgagtctatgtggacatcaccacctacaaccaggacaacgagacattagaggtgcacccacccccgaccactacatatcaggacgtcatcctaggcactcggaagacctatgccatctatgacttgcttgacaccgccatgatcaacaactctcgaaacctcaacatccagctcaagtggaagagacccccagagaatgaggcccccccagtgcccttcctgcatgcccagcggtacgtgagtggctatgggctgcagaagggggagctgagcacactgctgtacaacacccacccataccgggccttcccggtgctgctgctggacaccgtaccctggtatctgcggctgtatgtgcacaccctcaccatcacctccaagggcaaggagaacaaaccaagttacatccactaccagcctgcccaggaccggctgcaaccccacctcctggagatgctgattcagctgccggccaactcagtcaccaaggtttccatccagtttgagcgggcgctgctgaagtggaccgagtacacgccagatcctaaccatggcttctatgtcagcccatctgtcctcagcgcccttgtgcccagcatggtagcagccaagccagtggactgggaagagagtcccctcttcaacagcctattgccttggacttaacacgtggtgttccttatcagctggctgctgtcctttgacttccaccagatggtgtgcttcctggaggcacaggttctgtctttcattaagacctgacccatctcaggacatgacaaaggaaatatcttgtttttgatttcttggaagaggaagcactctgggccagaggtatgagccgggatgaagtggactccttgtctggaggtggtgctacacaccttggaggggctcctgggagctactgagaatgtcccctaagtcagtattcctgcctcagctgaaatgccagtcttcagcctcatctactgcacacttgagtccatgagattttagagtgaaatgaaatcttgttatgttgtccagggtggtcttcaacacctagcctcaagcaatcctcccaccttggcctcccaaagcactgggattacaggtgtgaacactgaaccactgaacccagcctaatgtcttattttattaaagtttttgttttttaagctga

SEQ ID NO: 418980 - DNA, 1761 bp, Homo sapiens
  misc_feature (1659)..(1659): n is a, c, g, or t
acttctcacacgcctttcttattggataccggcttttcatggggccgagcgccgctgggtaggcggaagtagccgcaggcatggcggcggctatgccgcttgctctgctcgtcctgttgctcctggggcccggcggctggtgccttgcagaacccccacgcgacagcctgcgggaggaacttgtcatcaccccgctgccttccggggacgtagccgccacattccagttccgcacgcgctgggattcggagcttcagcgggaaggagtgtcccattacaggctctttcccaaagccctggggcagctgatctccaagtattctctacgggagctgcacctgtcattcacacaaggcttttggaggacccgatactgggggccacccttcctgcaggccccatcaggtgcagagctgtgggtctggttccaagacactgtcactgatgtggataaatcttggaaggagctcagtaatgtcctctcagggatcttctgcgcctctctcaacttcatcgactccaccaacacagtcactcccactgcctccttcaaacccctgggtctggccaatgacactgaccactactttctgcgctatgctgtgctgccgcgggaggtggtctgcaccgaaaacctcaccccctggaagaagctcttgccctgtagttccaaggcaggcctctctgtgctgctgaaggcagatcgcttgttccacaccagctaccactcccaggcagtgcatatccgccctgtttgcagaaatgcacgctgtactagcatctcctgggagctgaggcagaccctgtcagttgtatttgatgccttcatcacggggcagggaaagaaagactggtccctcttccggatgttctcccgaaccctcacggagccctgccccctggcttcagagagccgagtctatgtggacatcaccacctacaaccaggacaacgagacattagaggtgcacccacccccgaccactacatatcaggacgtcatcctaggcactcggaagacctatgccatctatgacttgcttgacaccgccatgatcaacaactctcgaaacctcaacatccagctcaagtggaagagacccccagagaatgaggcccccccagtgcccttcctgcatgcccagcggtacgtgagtggctatgggctgcagaagggggagctgagcacactgctgtacaacacccacccataccgggccttcccggtgctgctgctggacaccgtaccctggtatctgcggctgtatgtgcacaccctcaccatcacctccaagggcaaggagaacaaaccaagttacatccactaccagcctgcccaggaccggctgcaaccccacctcctggagatgctgattcagctgccggccaactcagtcaccaaggtttccatccagtttgagcgggcgctgctgaagtggaccgagtacacgccagatcctaaccatggcttctatgtcagcccatctgtcctcagcgcccttgtgcccagcatggtagcagccaagccagtggactgggaagagagtcccctcttcaacagcctttttggctataggctgggactaacccgtgttccttataagtgggggcgggcctggagtccaccaaagggtggcttccggagggacggtcgggctncataagaacggccactcgggatagaaggcccggcgcagttaacggggaatgaccatggggggggcgcacccgtggggcggggcatagaggcacaccccggag

SEQ ID NO: 418981 - DNA, 2972 bp, Homo sapiens
  misc_feature (2266)..(2266): n is a, c, g, or t
aggttcgggagacatccggaagagggaccagtctttctttccctgccccgtgatgaaggcatcaaatacaactgacagggtctgcctcagctcccaggagatgctagtacagcgtgcatttctgcaaacagggcggatatgcactgcctgggagtggtagctggtgtggaacaagcgatctgccttcagcagcacagagaggcctgctttggaactacagggcaagagcttattccagttccgcacgcgctgggattcggagcttcagcgggaaggagtgtcccattacaggctctttcccaaagccctggggcagctgatctccaagtattctctacgggagctgcacctgtcattcacacaaggcttttggaggacccgatactgggggccacccttcctgcaggccccatcaggtgcagagctgtgggtctggttccaagacactgtcactgatgtggataaatcttggaaggagctcagtaatgtcctctcagggatcttctgcgcctctctcaacttcatcgactccaccaacacagtcactcccactgcctccttcaaacccctgggtctggccaatgacactgaccactactttctgcgctatgctgtgctgccgcgggaggtggtctgcaccgaaaacctcaccccctggaagaagctcttgccctgtagttccaaggcaggcctctctgtgctgctgaaggcagatcgcttgttccacaccagctaccactcccaggcagtgcatatccgccctgtttgcagaaatgcacgctgtactagcatctcctgggagctgaggcagaccctgtcagttgtatttgatgccttcatcacggggcagggaaagaaagactggtccctcttccggatgttctcccgaaccctcacggagccctgccccctggcttcagagagccgagtctatgtggacatcaccacctacaaccaggacaacgagacattagaggtgcacccacccccgaccactacatatcaggacgtcatcctaggcactcggaagacctatgccatctatgacttgcttgacaccgccatgatcaacaactctcgaaacctcaacatccagctcaagtggaagagacccccagagaatgaggcccccccagtgcccttcctgcatgcccagcggtacgtgagtggctatgggctgcagaagggggagctgagcacactgctgtacaacacccacccataccgggccttcccggtgctgctgctggacaccgtaccctggtatctgcggctgtatgtgcacaccctcaccatcacctccaagggcaaggagaacaaaccaagttacatccactaccagcctgcccaggaccggctgcaaccccacctcctggagatgctgattcagctgccggccaactcagtcaccaaggtttccatccagtttgagcgggcgctgctgaagtggaccgagtacacgccagatcctaaccatggcttctatgtcagcccatctgtcctcagcgcccttgtgcccagcatggtagcagccaagccagtggactgggaagagagtcccctcttcaacagcctgttcccagtctctgatggctctaactactttgtgcggctctacacggagccgctgctggtgaacctgccgacaccggacttcagcatgccctacaacgtgatctgcctcacgtgcactgtggtggccgtgtgctacggctccttctacaatctcctcacccgaaccttccacatcgaggagccccgcacaggtggcctggccaagcggctggccaaccttatccggcgcgcccgaggtgtccccccactctgattcttgccctttccagcagctgcagctgccgtttctctctggggaggggagcccaagggctgtttctgccacttgctctcctcagagttggcttttgaaccaaagtgccctggaccaggtcagggcctacagctgtgttgtccagtacaggagccacgagccaaatgtggcatttgaatttgaattaacttagaaattcatttcctcacctgtagtggccacctctatattgaggtgctcaataagcaaaagtggtcggtggctgctgtattggacagcacagaaaaagatttccatcaccacagaaaggtcggctggcagcactggccaaggtgatggggtgtgctacacagtgtatgtcactgtgtagtggatggagtttactgtttgtggaataaaaacggctgtttccgtgaaaaaaaaaaacaaaaacaaaanaaaaaaaaaaaaaaaaaaccgggggcagaatcacaatggcgggggtggacggacaaaagcacggtgacagacgaaaacgggccagaggcggccagacaagttgagtacttccgacgcccccacttttctttgtggagcacgagggggaaggaaacagcgggcgggacccccccaaagaggggaggaacgagaataaagatcaggcagacaacacccgggtaagcagctgggattaatagtgatgccgacgggcaaaaggaccagcgaggcacacaaccgcagacaacggcaaactgacgaccgacgaggagcgaaacgacgtcgcgacaatcaatcccacaactgggacagagagacgcgggagacaggacacacacagaaacacacaggaacaccaagcgaagagcacggcgagacgaacaggacagccagcatcacggcaggagtcgggaccagcagacacgaaccgccagaacgtagccatcaggggcaacaaggaggccacagaccaccgcgaaaccgagggtcaaagcgagctacgcgtgccgagagccgcgaagcaacgcggaaccgcacgagaccgaagaacgcagaccaacgcaacacgcagagcgcccacagcgagaccccagtcacaacgatagcaacaagaagaaggagaaggataaaccggaagtacggacgaagaggcacaacatgctcaact

SEQ ID NO: 418982 - DNA, 2724 bp, Homo sapiens
  misc_feature (2018)..(2018): n is a, c, g, or t
catgggtaaccgttcgtacgagaatcgctgtcctctccttgcggccgccagtgtggtggaattcgcagctgatctccaagtattctctacgggagctgcacctgtcattcacacaaggcttttggaggacccgatactgggggccacccttcctgcaggccccatcaggtgcagagctgtgggtctggttccaagacactgtcactgatgtggataaatcttggaaggagctcagtaatgtcctctcagggatcttctgcgcctctctcaacttcatcgactccaccaacacagtcactcccactgcctccttcaaacccctgggtctggccaatgacactgaccactactttctgcgctatgctgtgctgccgcgggaggtggtctgcaccgaaaacctcaccccctggaagaagctcttgccctgtagttccaaggcaggcctctctgtgctgctgaaggcagatcgcttgttccacaccagctaccactcccaggcagtgcatatccgccctgtttgcagaaatgcacgctgtactagcatctcctgggagctgaggcagaccctgtcagttgtatttgatgccttcatcacggggcagggaaagaaagactggtccctcttccggatgttctcccgaaccctcacggagccctgccccctggcttcagagagccgagtctatgtggacatcaccacctacaaccaggacaacgagacattagaggtgcacccacccccgaccactacatatcaggacgtcatcctaggcactcggaagacctatgccatctatgacttgcttgacaccgccatgatcaacaactctcgaaacctcaacatccagctcaagtggaagagacccccagagaatgaggcccccccagtgcccttcctgcatgcccagcggtacgtgagtggctatgggctgcagaagggggagctgagcacactgctgtacaacacccacccataccgggccttcccggtgctgctgctggacaccgtaccctggtatctgcggctgtatgtgcacaccctcaccatcacctccaagggcaaggagaacaaaccaagttacatccactaccagcctgcccaggaccggctgcaaccccacctcctggagatgctgattcagctgccggccaactcagtcaccaaggtttccatccagtttgagcgggcgctgctgaagtggaccgagtacacgccagatcctaaccatggcttctatgtcagcccatctgtcctcagcgcccttgtgcccagcatggtagcagccaagccagtggactgggaagagagtcccctcttcaacagcctgttcccagtctctgatggctctaactactttgtgcggctctacacggagccgctgctggtgaacctgccgacaccggacttcagcatgccctacaacgtgatctgcctcacgtgcactgtggtggccgtgtgctacggctccttctacaatctcctcacccgaaccttccacatcgaggagccccgcacaggtggcctggccaagcggctggccaaccttatccggcgcgcccgaggtgtccccccactctgattcttgccctttccagcagctgcagctgccgtttctctctggggaggggagcccaagggctgtttctgccacttgctctcctcagagttggcttttgaaccaaagtgccctggaccaggtcagggcctacagctgtgttgtccagtacaggagccacgagccaaatgtggcatttgaatttgaattaacttagaaattcatttcctcacctgtagtggccacctctatattgaggtgctcaataagcaaaagtggtcggtggctgctgtattggacagcacagaaaaagatttccatcaccacagaaaggtcggctggcagcactggccaaggtgatggggtgtgctacacagtgtatgtcactgtgtagtggatggagtttactgtttgtggaataaaaacggctgtttccgtgaaaaaaaaaaacaaaaacaaaanaaaaaaaaaaaaaaaaaaccgggggcagaatcacaatggcgggggtggacggacaaaagcacggtgacagacgaaaacgggccagaggcggccagacaagttgagtacttccgacgcccccacttttctttgtggagcacgagggggaaggaaacagcgggcgggacccccccaaagaggggaggaacgagaataaagatcaggcagacaacacccgggtaagcagctgggattaatagtgatgccgacgggcaaaaggaccagcgaggcacacaaccgcagacaacggcaaactgacgaccgacgaggagcgaaacgacgtcgcgacaatcaatcccacaactgggacagagagacgcgggagacaggacacacacagaaacacacaggaacaccaagcgaagagcacggcgagacgaacaggacagccagcatcacggcaggagtcgggaccagcagacacgaaccgccagaacgtagccatcaggggcaacaaggaggccacagaccaccgcgaaaccgagggtcaaagcgagctacgcgtgccgagagccgcgaagcaacgcggaaccgcacgagaccgaagaacgcagaccaacgcaacacgcagagcgcccacagcgagaccccagtcacaacgatagcaacaagaagaaggagaaggataaaccggaagtacggacgaagaggcacaacatgctcaact

SEQ ID NO: 418983 - DNA, 2678 bp, Homo sapiens
  misc_feature (1972)..(1972): n is a, c, g, or t
acggatagcggatctgcacacaaggcttttggaggacccgatactggacggatagcgaatctgcacacaaggcttttggaggacccgatactgggggccacccttcctgcaggccccatcaggtgcagagctgtgggtctggttccaagacactgtcactgatgtggataaatcttggaaggagctcagtaatgtcctctcagggatcttctgcgcctctctcaacttcatcgactccaccaacacagtcactcccactgcctccttcaaacccctgggtctggccaatgacactgaccactactttctgcgctatgctgtgctgccgcgggaggtggtctgcaccgaaaacctcaccccctggaagaagctcttgccctgtagttccaaggcaggcctctctgtgctgctgaaggcagatcgcttgttccacaccagctaccactcccaggcagtgcatatccgccctgtttgcagaaatgcacgctgtactagcatctcctgggagctgaggcagaccctgtcagttgtatttgatgccttcatcacggggcagggaaagaaagactggtccctcttccggatgttctcccgaaccctcacggagccctgccccctggcttcagagagccgagtctatgtggacatcaccacctacaaccaggacaacgagacattagaggtgcacccacccccgaccactacatatcaggacgtcatcctaggcactcggaagacctatgccatctatgacttgcttgacaccgccatgatcaacaactctcgaaacctcaacatccagctcaagtggaagagacccccagagaatgaggcccccccagtgcccttcctgcatgcccagcggtacgtgagtggctatgggctgcagaagggggagctgagcacactgctgtacaacacccacccataccgggccttcccggtgctgctgctggacaccgtaccctggtatctgcggctgtatgtgcacaccctcaccatcacctccaagggcaaggagaacaaaccaagttacatccactaccagcctgcccaggaccggctgcaaccccacctcctggagatgctgattcagctgccggccaactcagtcaccaaggtttccatccagtttgagcgggcgctgctgaagtggaccgagtacacgccagatcctaaccatggcttctatgtcagcccatctgtcctcagcgcccttgtgcccagcatggtagcagccaagccagtggactgggaagagagtcccctcttcaacagcctgttcccagtctctgatggctctaactactttgtgcggctctacacggagccgctgctggtgaacctgccgacaccggacttcagcatgccctacaacgtgatctgcctcacgtgcactgtggtggccgtgtgctacggctccttctacaatctcctcacccgaaccttccacatcgaggagccccgcacaggtggcctggccaagcggctggccaaccttatccggcgcgcccgaggtgtccccccactctgattcttgccctttccagcagctgcagctgccgtttctctctggggaggggagcccaagggctgtttctgccacttgctctcctcagagttggcttttgaaccaaagtgccctggaccaggtcagggcctacagctgtgttgtccagtacaggagccacgagccaaatgtggcatttgaatttgaattaacttagaaattcatttcctcacctgtagtggccacctctatattgaggtgctcaataagcaaaagtggtcggtggctgctgtattggacagcacagaaaaagatttccatcaccacagaaaggtcggctggcagcactggccaaggtgatggggtgtgctacacagtgtatgtcactgtgtagtggatggagtttactgtttgtggaataaaaacggctgtttccgtgaaaaaaaaaaacaaaaacaaaanaaaaaaaaaaaaaaaaaaccgggggcagaatcacaatggcgggggtggacggacaaaagcacggtgacagacgaaaacgggccagaggcggccagacaagttgagtacttccgacgcccccacttttctttgtggagcacgagggggaaggaaacagcgggcgggacccccccaaagaggggaggaacgagaataaagatcaggcagacaacacccgggtaagcagctgggattaatagtgatgccgacgggcaaaaggaccagcgaggcacacaaccgcagacaacggcaaactgacgaccgacgaggagcgaaacgacgtcgcgacaatcaatcccacaactgggacagagagacgcgggagacaggacacacacagaaacacacaggaacaccaagcgaagagcacggcgagacgaacaggacagccagcatcacggcaggagtcgggaccagcagacacgaaccgccagaacgtagccatcaggggcaacaaggaggccacagaccaccgcgaaaccgagggtcaaagcgagctacgcgtgccgagagccgcgaagcaacgcggaaccgcacgagaccgaagaacgcagaccaacgcaacacgcagagcgcccacagcgagaccccagtcacaacgatagcaacaagaagaaggagaaggataaaccggaagtacggacgaagaggcacaacatgctcaact

SEQ ID NO: 418984 - DNA, 1649 bp, Homo sapiens
acttctcacacgcctttcttattggataccggcttttcatggggccgagcgccgctgggtaggcggaagtagccgcaggcatggcggcggctatgccgcttgctctgctcgtcctgttgctcctggggcccggcggctggtgccttgcagaacccccacgcgacagcctgcgggaggaacttgtcatcaccccgctgccttccggggacgtagccgccacattccagttccgcacgcgctgggattcggagcttcagcgggaaggagtgtcccattacaggctctttcccaaagccctggggcagctgatctccaagtattctctacgggagctgcacctgtcattcacacaaggcttttggaggacccgatactgggggccacccttcctgcaggccccatcaggtgcagagctgtgggtctggttccaagacactgtcactgatgtggataaatcttggaaggagctcagtaatgtcctctcagggatcttctgcgcctctctcaacttcatcgactccaccaacacagtcactcccactgcctccttcaaacccctgggtctggccaatgacactgaccactactttctgcgctatgctgtgctgccgcgggaggtggtctgcaccgaaaacctcaccccctggaagaagctcttgccctgtagttccaaggcaggcctctctgtgctgctgaaggcagatcgcttgttccacaccagctaccactcccaggcagtgcatatccgccctgtttgcagaaatgcacgctgtactagcatctcctgggagctgaggcagaccctgtcagttgtatttgatgccttcatcacggggcagggaaagaaagactggtccctcttccggatgttctcccgaaccctcacggagccctgccccctggcttcagagagccgagtctatgtggacatcaccacctacaaccaggacaacgagacattagaggtgcacccacccccgaccactacatatcaggacgtcatcctaggcactcggaagacctatgccatctatgacttgcttgacaccgccatgatcaacaactctcgaaacctcaacatccagctcaagtggaagagacccccagagaatgggtgagtgggtggttggttggactgctgggttgcaacggctacagagaaaagactcacaatcccacgtctttgccgttagatgattgggttgtatttagaccagatttccagagtcatatgctgctgactgtagctattccaagctctacgattttgggtaggttcctaaactccccaagcttcagcatccacatctgaaaaatagagtatacttagcaaattggatgagatgatgtgaaaaatggagttagttcatgcatttgcttaatcaaccaaatacttttgaattcatactaagtgccaggcatagagtgttgaataagacagaggacactgcactcaagaaatataagtctactagctagggcaggtgtcagttaattaattacagttgtgttcagttcccttaccaagggaaagagcagaatatcctgagaggacctggattgggttcgaagggggcacggtgttcgtcacgtaagcacttctatactagcaacctattgtcatcatcgcttgttgctggggaagacag

SEQ ID NO: 418985 - DNA, 2629 bp, Homo sapiens
  misc_feature (1923)..(1923): n is a, c, g, or t
catgggtaaccgttcgtacgagaatcgctgtcctctccttgcggccgccagtgtggtggaattcgcagatcaggtgcagagctgtgggtctggttccaagacactgtcactgatgtggataaatcttggaaggagctcagtaatgtcctctcagggatcttctgcgcctctctcaacttcatcgactccaccaacacagtcactcccactgcctccttcaaacccctgggtctggccaatgacactgaccactactttctgcgctatgctgtgctgccgcgggaggtggtctgcaccgaaaacctcaccccctggaagaagctcttgccctgtagttccaaggcaggcctctctgtgctgctgaaggcagatcgcttgttccacaccagctaccactcccaggcagtgcatatccgccctgtttgcagaaatgcacgctgtactagcatctcctgggagctgaggcagaccctgtcagttgtatttgatgccttcatcacggggcagggaaagaaagactggtccctcttccggatgttctcccgaaccctcacggagccctgccccctggcttcagagagccgagtctatgtggacatcaccacctacaaccaggacaacgagacattagaggtgcacccacccccgaccactacatatcaggacgtcatcctaggcactcggaagacctatgccatctatgacttgcttgacaccgccatgatcaacaactctcgaaacctcaacatccagctcaagtggaagagacccccagagaatgaggcccccccagtgcccttcctgcatgcccagcggtacgtgagtggctatgggctgcagaagggggagctgagcacactgctgtacaacacccacccataccgggccttcccggtgctgctgctggacaccgtaccctggtatctgcggctgtatgtgcacaccctcaccatcacctccaagggcaaggagaacaaaccaagttacatccactaccagcctgcccaggaccggctgcaaccccacctcctggagatgctgattcagctgccggccaactcagtcaccaaggtttccatccagtttgagcgggcgctgctgaagtggaccgagtacacgccagatcctaaccatggcttctatgtcagcccatctgtcctcagcgcccttgtgcccagcatggtagcagccaagccagtggactgggaagagagtcccctcttcaacagcctgttcccagtctctgatggctctaactactttgtgcggctctacacggagccgctgctggtgaacctgccgacaccggacttcagcatgccctacaacgtgatctgcctcacgtgcactgtggtggccgtgtgctacggctccttctacaatctcctcacccgaaccttccacatcgaggagccccgcacaggtggcctggccaagcggctggccaaccttatccggcgcgcccgaggtgtccccccactctgattcttgccctttccagcagctgcagctgccgtttctctctggggaggggagcccaagggctgtttctgccacttgctctcctcagagttggcttttgaaccaaagtgccctggaccaggtcagggcctacagctgtgttgtccagtacaggagccacgagccaaatgtggcatttgaatttgaattaacttagaaattcatttcctcacctgtagtggccacctctatattgaggtgctcaataagcaaaagtggtcggtggctgctgtattggacagcacagaaaaagatttccatcaccacagaaaggtcggctggcagcactggccaaggtgatggggtgtgctacacagtgtatgtcactgtgtagtggatggagtttactgtttgtggaataaaaacggctgtttccgtgaaaaaaaaaaacaaaaacaaaanaaaaaaaaaaaaaaaaaaccgggggcagaatcacaatggcgggggtggacggacaaaagcacggtgacagacgaaaacgggccagaggcggccagacaagttgagtacttccgacgcccccacttttctttgtggagcacgagggggaaggaaacagcgggcgggacccccccaaagaggggaggaacgagaataaagatcaggcagacaacacccgggtaagcagctgggattaatagtgatgccgacgggcaaaaggaccagcgaggcacacaaccgcagacaacggcaaactgacgaccgacgaggagcgaaacgacgtcgcgacaatcaatcccacaactgggacagagagacgcgggagacaggacacacacagaaacacacaggaacaccaagcgaagagcacggcgagacgaacaggacagccagcatcacggcaggagtcgggaccagcagacacgaaccgccagaacgtagccatcaggggcaacaaggaggccacagaccaccgcgaaaccgagggtcaaagcgagctacgcgtgccgagagccgcgaagcaacgcggaaccgcacgagaccgaagaacgcagaccaacgcaacacgcagagcgcccacagcgagaccccagtcacaacgatagcaacaagaagaaggagaaggataaaccggaagtacggacgaagaggcacaacatgctcaact

SEQ ID NO: 418986 - DNA, 2783 bp, Homo sapiens
  misc_feature (2077)..(2077): n is a, c, g, or t
acttctcacacgcctttcttattggataccggcttttcatggggccgagcgccgctgggtaggcggaagtagccgcaggcatggcggcggctatgccgcttgctctgctcgtcctgttgctcctggggcccggcggctggtgccttgcagaacccccacgcgacagcctgcgggaggaacttgtcatcaccccgctgccttccggggacgtagccgccacattccagttccgcacgcgctgggattcggagcttcagcgggaaggagtgtggataaatcttggaaggagctcagtaatgtcctctcagggatcttctgcgcctctctcaacttcatcgactccaccaacacagtcactcccactgcctccttcaaacccctgggtctggccaatgacactgaccactactttctgcgctatgctgtgctgccgcgggaggtggtctgcaccgaaaacctcaccccctggaagaagctcttgccctgtagttccaaggcaggcctctctgtgctgctgaaggcagatcgcttgttccacaccagctaccactcccaggcagtgcatatccgccctgtttgcagaaatgcacgctgtactagcatctcctgggagctgaggcagaccctgtcagttgtatttgatgccttcatcacggggcagggaaagaaagactggtccctcttccggatgttctcccgaaccctcacggagccctgccccctggcttcagagagccgagtctatgtggacatcaccacctacaaccaggacaacgagacattagaggtgcacccacccccgaccactacatatcaggacgtcatcctaggcactcggaagacctatgccatctatgacttgcttgacaccgccatgatcaacaactctcgaaacctcaacatccagctcaagtggaagagacccccagagaatgaggcccccccagtgcccttcctgcatgcccagcggtacgtgagtggctatgggctgcagaagggggagctgagcacactgctgtacaacacccacccataccgggccttcccggtgctgctgctggacaccgtaccctggtatctgcggctgtatgtgcacaccctcaccatcacctccaagggcaaggagaacaaaccaagttacatccactaccagcctgcccaggaccggctgcaaccccacctcctggagatgctgattcagctgccggccaactcagtcaccaaggtttccatccagtttgagcgggcgctgctgaagtggaccgagtacacgccagatcctaaccatggcttctatgtcagcccatctgtcctcagcgcccttgtgcccagcatggtagcagccaagccagtggactgggaagagagtcccctcttcaacagcctgttcccagtctctgatggctctaactactttgtgcggctctacacggagccgctgctggtgaacctgccgacaccggacttcagcatgccctacaacgtgatctgcctcacgtgcactgtggtggccgtgtgctacggctccttctacaatctcctcacccgaaccttccacatcgaggagccccgcacaggtggcctggccaagcggctggccaaccttatccggcgcgcccgaggtgtccccccactctgattcttgccctttccagcagctgcagctgccgtttctctctggggaggggagcccaagggctgtttctgccacttgctctcctcagagttggcttttgaaccaaagtgccctggaccaggtcagggcctacagctgtgttgtccagtacaggagccacgagccaaatgtggcatttgaatttgaattaacttagaaattcatttcctcacctgtagtggccacctctatattgaggtgctcaataagcaaaagtggtcggtggctgctgtattggacagcacagaaaaagatttccatcaccacagaaaggtcggctggcagcactggccaaggtgatggggtgtgctacacagtgtatgtcactgtgtagtggatggagtttactgtttgtggaataaaaacggctgtttccgtgaaaaaaaaaaacaaaaacaaaanaaaaaaaaaaaaaaaaaaccgggggcagaatcacaatggcgggggtggacggacaaaagcacggtgacagacgaaaacgggccagaggcggccagacaagttgagtacttccgacgcccccacttttctttgtggagcacgagggggaaggaaacagcgggcgggacccccccaaagaggggaggaacgagaataaagatcaggcagacaacacccgggtaagcagctgggattaatagtgatgccgacgggcaaaaggaccagcgaggcacacaaccgcagacaacggcaaactgacgaccgacgaggagcgaaacgacgtcgcgacaatcaatcccacaactgggacagagagacgcgggagacaggacacacacagaaacacacaggaacaccaagcgaagagcacggcgagacgaacaggacagccagcatcacggcaggagtcgggaccagcagacacgaaccgccagaacgtagccatcaggggcaacaaggaggccacagaccaccgcgaaaccgagggtcaaagcgagctacgcgtgccgagagccgcgaagcaacgcggaaccgcacgagaccgaagaacgcagaccaacgcaacacgcagagcgcccacagcgagaccccagtcacaacgatagcaacaagaagaaggagaaggataaaccggaagtacggacgaagaggcacaacatgctcaact

SEQ ID NO: 418987 - DNA, 2655 bp, Homo sapiens
  misc_feature (1949)..(1949): n is a, c, g, or t
acttctcacacgcctttcttattggataccggcttttcatggggccgagcgccgctgggtaggcggaagtagccgcaggcatggcggcggctatgccgcttgctctgctcgtcctgttgctcctggggcccggcggctggtgccttgcagaacccccacgcgacagcctgcgggaggaacttgtcatcaccccgctgccttccggggacgtagccgccacattccagttccgcacgcgctgggattcggagcttcagcgggaaggagacactgaccactactttctgcgctatgctgtgctgccgcgggaggtggtctgcaccgaaaacctcaccccctggaagaagctcttgccctgtagttccaaggcaggcctctctgtgctgctgaaggcagatcgcttgttccacaccagctaccactcccaggcagtgcatatccgccctgtttgcagaaatgcacgctgtactagcatctcctgggagctgaggcagaccctgtcagttgtatttgatgccttcatcacggggcagggaaagaaagactggtccctcttccggatgttctcccgaaccctcacggagccctgccccctggcttcagagagccgagtctatgtggacatcaccacctacaaccaggacaacgagacattagaggtgcacccacccccgaccactacatatcaggacgtcatcctaggcactcggaagacctatgccatctatgacttgcttgacaccgccatgatcaacaactctcgaaacctcaacatccagctcaagtggaagagacccccagagaatgaggcccccccagtgcccttcctgcatgcccagcggtacgtgagtggctatgggctgcagaagggggagctgagcacactgctgtacaacacccacccataccgggccttcccggtgctgctgctggacaccgtaccctggtatctgcggctgtatgtgcacaccctcaccatcacctccaagggcaaggagaacaaaccaagttacatccactaccagcctgcccaggaccggctgcaaccccacctcctggagatgctgattcagctgccggccaactcagtcaccaaggtttccatccagtttgagcgggcgctgctgaagtggaccgagtacacgccagatcctaaccatggcttctatgtcagcccatctgtcctcagcgcccttgtgcccagcatggtagcagccaagccagtggactgggaagagagtcccctcttcaacagcctgttcccagtctctgatggctctaactactttgtgcggctctacacggagccgctgctggtgaacctgccgacaccggacttcagcatgccctacaacgtgatctgcctcacgtgcactgtggtggccgtgtgctacggctccttctacaatctcctcacccgaaccttccacatcgaggagccccgcacaggtggcctggccaagcggctggccaaccttatccggcgcgcccgaggtgtccccccactctgattcttgccctttccagcagctgcagctgccgtttctctctggggaggggagcccaagggctgtttctgccacttgctctcctcagagttggcttttgaaccaaagtgccctggaccaggtcagggcctacagctgtgttgtccagtacaggagccacgagccaaatgtggcatttgaatttgaattaacttagaaattcatttcctcacctgtagtggccacctctatattgaggtgctcaataagcaaaagtggtcggtggctgctgtattggacagcacagaaaaagatttccatcaccacagaaaggtcggctggcagcactggccaaggtgatggggtgtgctacacagtgtatgtcactgtgtagtggatggagtttactgtttgtggaataaaaacggctgtttccgtgaaaaaaaaaaacaaaaacaaaanaaaaaaaaaaaaaaaaaaccgggggcagaatcacaatggcgggggtggacggacaaaagcacggtgacagacgaaaacgggccagaggcggccagacaagttgagtacttccgacgcccccacttttctttgtggagcacgagggggaaggaaacagcgggcgggacccccccaaagaggggaggaacgagaataaagatcaggcagacaacacccgggtaagcagctgggattaatagtgatgccgacgggcaaaaggaccagcgaggcacacaaccgcagacaacggcaaactgacgaccgacgaggagcgaaacgacgtcgcgacaatcaatcccacaactgggacagagagacgcgggagacaggacacacacagaaacacacaggaacaccaagcgaagagcacggcgagacgaacaggacagccagcatcacggcaggagtcgggaccagcagacacgaaccgccagaacgtagccatcaggggcaacaaggaggccacagaccaccgcgaaaccgagggtcaaagcgagctacgcgtgccgagagccgcgaagcaacgcggaaccgcacgagaccgaagaacgcagaccaacgcaacacgcagagcgcccacagcgagaccccagtcacaacgatagcaacaagaagaaggagaaggataaaccggaagtacggacgaagaggcacaacatgctcaact

SEQ ID NO: 418988 - DNA, 2833 bp, Homo sapiens
  misc_feature (2127)..(2127): n is a, c, g, or t
acttctcacacgcctttcttattggataccggcttttcatggggccgagcgccgctgggtaggcggaagtagccgcaggcatggcggcggctatgccgcttgctctgctcgtcctgttgctcctggggcccggcggctggtgccttgcagaacccccacgcgacagcctgcgggaggaacttgtcatcaccccgctgccttccggggacgtagccgccacattccagttccgcacgcgctgggattcggagcttcagcgggaaggagtgtcccattacaggctctttcccaaagccctggggcagctgatctccaagtattctctacgggagctgcacctgtcattcacacaaggcttttggaggacccgatactgggggccacccttcctgcaggccccatcaggtgcagagctgtgggtctggttccaagacactgtcactgaacactgaccactactttctgcgctatgctgtgctgccgcgggaggtggtctgcaccgaaaacctcaccccctggaagaagctcttgccctgtagttccaaggcaggcctctctgtgctgctgaaggcagatcgcttgttccacaccagctaccactcccaggcagtgcatatccgccctgtttgcagaaatgcacgctgtactagcatctcctgggagctgaggcagaccctgtcagttgtatttgatgccttcatcacggggcagggaaagaaagactggtccctcttccggatgttctcccgaaccctcacggagccctgccccctggcttcagagagccgagtctatgtggacatcaccacctacaaccaggacaacgagacattagaggtgcacccacccccgaccactacatatcaggacgtcatcctaggcactcggaagacctatgccatctatgacttgcttgacaccgccatgatcaacaactctcgaaacctcaacatccagctcaagtggaagagacccccagagaatgaggcccccccagtgcccttcctgcatgcccagcggtacgtgagtggctatgggctgcagaagggggagctgagcacactgctgtacaacacccacccataccgggccttcccggtgctgctgctggacaccgtaccctggtatctgcggctgtatgtgcacaccctcaccatcacctccaagggcaaggagaacaaaccaagttacatccactaccagcctgcccaggaccggctgcaaccccacctcctggagatgctgattcagctgccggccaactcagtcaccaaggtttccatccagtttgagcgggcgctgctgaagtggaccgagtacacgccagatcctaaccatggcttctatgtcagcccatctgtcctcagcgcccttgtgcccagcatggtagcagccaagccagtggactgggaagagagtcccctcttcaacagcctgttcccagtctctgatggctctaactactttgtgcggctctacacggagccgctgctggtgaacctgccgacaccggacttcagcatgccctacaacgtgatctgcctcacgtgcactgtggtggccgtgtgctacggctccttctacaatctcctcacccgaaccttccacatcgaggagccccgcacaggtggcctggccaagcggctggccaaccttatccggcgcgcccgaggtgtccccccactctgattcttgccctttccagcagctgcagctgccgtttctctctggggaggggagcccaagggctgtttctgccacttgctctcctcagagttggcttttgaaccaaagtgccctggaccaggtcagggcctacagctgtgttgtccagtacaggagccacgagccaaatgtggcatttgaatttgaattaacttagaaattcatttcctcacctgtagtggccacctctatattgaggtgctcaataagcaaaagtggtcggtggctgctgtattggacagcacagaaaaagatttccatcaccacagaaaggtcggctggcagcactggccaaggtgatggggtgtgctacacagtgtatgtcactgtgtagtggatggagtttactgtttgtggaataaaaacggctgtttccgtgaaaaaaaaaaacaaaaacaaaanaaaaaaaaaaaaaaaaaaccgggggcagaatcacaatggcgggggtggacggacaaaagcacggtgacagacgaaaacgggccagaggcggccagacaagttgagtacttccgacgcccccacttttctttgtggagcacgagggggaaggaaacagcgggcgggacccccccaaagaggggaggaacgagaataaagatcaggcagacaacacccgggtaagcagctgggattaatagtgatgccgacgggcaaaaggaccagcgaggcacacaaccgcagacaacggcaaactgacgaccgacgaggagcgaaacgacgtcgcgacaatcaatcccacaactgggacagagagacgcgggagacaggacacacacagaaacacacaggaacaccaagcgaagagcacggcgagacgaacaggacagccagcatcacggcaggagtcgggaccagcagacacgaaccgccagaacgtagccatcaggggcaacaaggaggccacagaccaccgcgaaaccgagggtcaaagcgagctacgcgtgccgagagccgcgaagcaacgcggaaccgcacgagaccgaagaacgcagaccaacgcaacacgcagagcgcccacagcgagaccccagtcacaacgatagcaacaagaagaaggagaaggataaaccggaagtacggacgaagaggcacaacatgctcaact

SEQ ID NO: 418989 - DNA, 2788 bp, Homo sapiens
  misc_feature (2082)..(2082): n is a, c, g, or t
acttctcacacgcctttcttattggataccggcttttcatggggccgagcgccgctgggtaggcggaagtagccgcaggcatggcggcggctatgccgcttgctctgctcgtcctgttgctcctggggcccggcggctggtgccttgcagaacccccacgcgacagcctgcgggaggaacttgtcatcaccccgctgccttccggggacgtagccgccacattccagttccgcacgcgctgggattcggagcttcagcgggaaggagtgtcccattacaggctctttcccaaagccctggggcagctgatctccaagtattctctacgggagctgcacctgtcattcacacaaggcttttggaggacccgatactgggggccacccttcctgcaggccccacactgaccactactttctgcgctatgctgtgctgccgcgggaggtggtctgcaccgaaaacctcaccccctggaagaagctcttgccctgtagttccaaggcaggcctctctgtgctgctgaaggcagatcgcttgttccacaccagctaccactcccaggcagtgcatatccgccctgtttgcagaaatgcacgctgtactagcatctcctgggagctgaggcagaccctgtcagttgtatttgatgccttcatcacggggcagggaaagaaagactggtccctcttccggatgttctcccgaaccctcacggagccctgccccctggcttcagagagccgagtctatgtggacatcaccacctacaaccaggacaacgagacattagaggtgcacccacccccgaccactacatatcaggacgtcatcctaggcactcggaagacctatgccatctatgacttgcttgacaccgccatgatcaacaactctcgaaacctcaacatccagctcaagtggaagagacccccagagaatgaggcccccccagtgcccttcctgcatgcccagcggtacgtgagtggctatgggctgcagaagggggagctgagcacactgctgtacaacacccacccataccgggccttcccggtgctgctgctggacaccgtaccctggtatctgcggctgtatgtgcacaccctcaccatcacctccaagggcaaggagaacaaaccaagttacatccactaccagcctgcccaggaccggctgcaaccccacctcctggagatgctgattcagctgccggccaactcagtcaccaaggtttccatccagtttgagcgggcgctgctgaagtggaccgagtacacgccagatcctaaccatggcttctatgtcagcccatctgtcctcagcgcccttgtgcccagcatggtagcagccaagccagtggactgggaagagagtcccctcttcaacagcctgttcccagtctctgatggctctaactactttgtgcggctctacacggagccgctgctggtgaacctgccgacaccggacttcagcatgccctacaacgtgatctgcctcacgtgcactgtggtggccgtgtgctacggctccttctacaatctcctcacccgaaccttccacatcgaggagccccgcacaggtggcctggccaagcggctggccaaccttatccggcgcgcccgaggtgtccccccactctgattcttgccctttccagcagctgcagctgccgtttctctctggggaggggagcccaagggctgtttctgccacttgctctcctcagagttggcttttgaaccaaagtgccctggaccaggtcagggcctacagctgtgttgtccagtacaggagccacgagccaaatgtggcatttgaatttgaattaacttagaaattcatttcctcacctgtagtggccacctctatattgaggtgctcaataagcaaaagtggtcggtggctgctgtattggacagcacagaaaaagatttccatcaccacagaaaggtcggctggcagcactggccaaggtgatggggtgtgctacacagtgtatgtcactgtgtagtggatggagtttactgtttgtggaataaaaacggctgtttccgtgaaaaaaaaaaacaaaaacaaaanaaaaaaaaaaaaaaaaaaccgggggcagaatcacaatggcgggggtggacggacaaaagcacggtgacagacgaaaacgggccagaggcggccagacaagttgagtacttccgacgcccccacttttctttgtggagcacgagggggaaggaaacagcgggcgggacccccccaaagaggggaggaacgagaataaagatcaggcagacaacacccgggtaagcagctgggattaatagtgatgccgacgggcaaaaggaccagcgaggcacacaaccgcagacaacggcaaactgacgaccgacgaggagcgaaacgacgtcgcgacaatcaatcccacaactgggacagagagacgcgggagacaggacacacacagaaacacacaggaacaccaagcgaagagcacggcgagacgaacaggacagccagcatcacggcaggagtcgggaccagcagacacgaaccgccagaacgtagccatcaggggcaacaaggaggccacagaccaccgcgaaaccgagggtcaaagcgagctacgcgtgccgagagccgcgaagcaacgcggaaccgcacgagaccgaagaacgcagaccaacgcaacacgcagagcgcccacagcgagaccccagtcacaacgatagcaacaagaagaaggagaaggataaaccggaagtacggacgaagaggcacaacatgctcaact

SEQ ID NO: 418990 - DNA, 2860 bp, Homo sapiens
  misc_feature (2154)..(2154): n is a, c, g, or t
acttctcacacgcctttcttattggataccggcttttcatggggccgagcgccgctgggtaggcggaagtagccgcaggcatggcggcggctatgccgcttgctctgctcgtcctgttgctcctggggcccggcggctggtgccttgcagaacccccacgcgacagcctgcgggaggaacttgtcatcaccccgctgccttccggggacgtagccgccacattccagttccgcacgcgctgggattcggagcttcagcgggaaggagtgtcccattacaggctctttcccaaagccctggggcagctgatctccaagtattctctacgggagctgcacctgtcattcacacaaggcttttggaggacccgatactgggggccacccttcctgcaggccccatcaggtgcagagctgtgggtctggttccaagacactgtcactgatgtggataaatcttggaaggagctcagtaatgtcctctcagggatcttctgcgcctctctcaacttcatcgactccaccaacacagtcactcccactgcctccttcaaacccctgggtctggccaatggcaggcctctctgtgctgctgaaggcagatcgcttgttccacaccagctaccactcccaggcagtgcatatccgccctgtttgcagaaatgcacgctgtactagcatctcctgggagctgaggcagaccctgtcagttgtatttgatgccttcatcacggggcagggaaagaaagactggtccctcttccggatgttctcccgaaccctcacggagccctgccccctggcttcagagagccgagtctatgtggacatcaccacctacaaccaggacaacgagacattagaggtgcacccacccccgaccactacatatcaggacgtcatcctaggcactcggaagacctatgccatctatgacttgcttgacaccgccatgatcaacaactctcgaaacctcaacatccagctcaagtggaagagacccccagagaatgaggcccccccagtgcccttcctgcatgcccagcggtacgtgagtggctatgggctgcagaagggggagctgagcacactgctgtacaacacccacccataccgggccttcccggtgctgctgctggacaccgtaccctggtatctgcggctgtatgtgcacaccctcaccatcacctccaagggcaaggagaacaaaccaagttacatccactaccagcctgcccaggaccggctgcaaccccacctcctggagatgctgattcagctgccggccaactcagtcaccaaggtttccatccagtttgagcgggcgctgctgaagtggaccgagtacacgccagatcctaaccatggcttctatgtcagcccatctgtcctcagcgcccttgtgcccagcatggtagcagccaagccagtggactgggaagagagtcccctcttcaacagcctgttcccagtctctgatggctctaactactttgtgcggctctacacggagccgctgctggtgaacctgccgacaccggacttcagcatgccctacaacgtgatctgcctcacgtgcactgtggtggccgtgtgctacggctccttctacaatctcctcacccgaaccttccacatcgaggagccccgcacaggtggcctggccaagcggctggccaaccttatccggcgcgcccgaggtgtccccccactctgattcttgccctttccagcagctgcagctgccgtttctctctggggaggggagcccaagggctgtttctgccacttgctctcctcagagttggcttttgaaccaaagtgccctggaccaggtcagggcctacagctgtgttgtccagtacaggagccacgagccaaatgtggcatttgaatttgaattaacttagaaattcatttcctcacctgtagtggccacctctatattgaggtgctcaataagcaaaagtggtcggtggctgctgtattggacagcacagaaaaagatttccatcaccacagaaaggtcggctggcagcactggccaaggtgatggggtgtgctacacagtgtatgtcactgtgtagtggatggagtttactgtttgtggaataaaaacggctgtttccgtgaaaaaaaaaaacaaaaacaaaanaaaaaaaaaaaaaaaaaaccgggggcagaatcacaatggcgggggtggacggacaaaagcacggtgacagacgaaaacgggccagaggcggccagacaagttgagtacttccgacgcccccacttttctttgtggagcacgagggggaaggaaacagcgggcgggacccccccaaagaggggaggaacgagaataaagatcaggcagacaacacccgggtaagcagctgggattaatagtgatgccgacgggcaaaaggaccagcgaggcacacaaccgcagacaacggcaaactgacgaccgacgaggagcgaaacgacgtcgcgacaatcaatcccacaactgggacagagagacgcgggagacaggacacacacagaaacacacaggaacaccaagcgaagagcacggcgagacgaacaggacagccagcatcacggcaggagtcgggaccagcagacacgaaccgccagaacgtagccatcaggggcaacaaggaggccacagaccaccgcgaaaccgagggtcaaagcgagctacgcgtgccgagagccgcgaagcaacgcggaaccgcacgagaccgaagaacgcagaccaacgcaacacgcagagcgcccacagcgagaccccagtcacaacgatagcaacaagaagaaggagaaggataaaccggaagtacggacgaagaggcacaacatgctcaact

SEQ ID NO: 418991 - DNA, 2864 bp, Homo sapiens
  misc_feature (2158)..(2158): n is a, c, g, or t
acttctcacacgcctttcttattggataccggcttttcatggggccgagcgccgctgggtaggcggaagtagccgcaggcatggcggcggctatgccgcttgctctgctcgtcctgttgctcctggggcccggcggctggtgccttgcagaacccccacgcgacagcctgcgggaggaacttgtcatcaccccgctgccttccggggacgtagccgccacattccagttccgcacgcgctgggattcggagcttcagcgggaaggagtgtcccattacaggctctttcccaaagccctggggcagctgatctccaagtattctctacgggagctgcacctgtcattcacacaaggcttttggaggacccgatactgggggccacccttcctgcaggccccatcaggtgcagagctgtgggtctggttccaagacactgtcactgaacactgaccactactttctgcgctatgctgtgctgccgcgggaggtggtctgcaccgaaaacctcaccccctggaagaagctcttgccctgtagttccaagggcttctcttatctctttccatctcctccaggcaggcctctctgtgctgctgaaggcagatcgcttgttccacaccagctaccactcccaggcagtgcatatccgccctgtttgcagaaatgcacgctgtactagcatctcctgggagctgaggcagaccctgtcagttgtatttgatgccttcatcacggggcagggaaagaaagactggtccctcttccggatgttctcccgaaccctcacggagccctgccccctggcttcagagagccgagtctatgtggacatcaccacctacaaccaggacaacgagacattagaggtgcacccacccccgaccactacatatcaggacgtcatcctaggcactcggaagacctatgccatctatgacttgcttgacaccgccatgatcaacaactctcgaaacctcaacatccagctcaagtggaagagacccccagagaatgaggcccccccagtgcccttcctgcatgcccagcggtacgtgagtggctatgggctgcagaagggggagctgagcacactgctgtacaacacccacccataccgggccttcccggtgctgctgctggacaccgtaccctggtatctgcggctgtatgtgcacaccctcaccatcacctccaagggcaaggagaacaaaccaagttacatccactaccagcctgcccaggaccggctgcaaccccacctcctggagatgctgattcagctgccggccaactcagtcaccaaggtttccatccagtttgagcgggcgctgctgaagtggaccgagtacacgccagatcctaaccatggcttctatgtcagcccatctgtcctcagcgcccttgtgcccagcatggtagcagccaagccagtggactgggaagagagtcccctcttcaacagcctgttcccagtctctgatggctctaactactttgtgcggctctacacggagccgctgctggtgaacctgccgacaccggacttcagcatgccctacaacgtgatctgcctcacgtgcactgtggtggccgtgtgctacggctccttctacaatctcctcacccgaaccttccacatcgaggagccccgcacaggtggcctggccaagcggctggccaaccttatccggcgcgcccgaggtgtccccccactctgattcttgccctttccagcagctgcagctgccgtttctctctggggaggggagcccaagggctgtttctgccacttgctctcctcagagttggcttttgaaccaaagtgccctggaccaggtcagggcctacagctgtgttgtccagtacaggagccacgagccaaatgtggcatttgaatttgaattaacttagaaattcatttcctcacctgtagtggccacctctatattgaggtgctcaataagcaaaagtggtcggtggctgctgtattggacagcacagaaaaagatttccatcaccacagaaaggtcggctggcagcactggccaaggtgatggggtgtgctacacagtgtatgtcactgtgtagtggatggagtttactgtttgtggaataaaaacggctgtttccgtgaaaaaaaaaaacaaaaacaaaanaaaaaaaaaaaaaaaaaaccgggggcagaatcacaatggcgggggtggacggacaaaagcacggtgacagacgaaaacgggccagaggcggccagacaagttgagtacttccgacgcccccacttttctttgtggagcacgagggggaaggaaacagcgggcgggacccccccaaagaggggaggaacgagaataaagatcaggcagacaacacccgggtaagcagctgggattaatagtgatgccgacgggcaaaaggaccagcgaggcacacaaccgcagacaacggcaaactgacgaccgacgaggagcgaaacgacgtcgcgacaatcaatcccacaactgggacagagagacgcgggagacaggacacacacagaaacacacaggaacaccaagcgaagagcacggcgagacgaacaggacagccagcatcacggcaggagtcgggaccagcagacacgaaccgccagaacgtagccatcaggggcaacaaggaggccacagaccaccgcgaaaccgagggtcaaagcgagctacgcgtgccgagagccgcgaagcaacgcggaaccgcacgagaccgaagaacgcagaccaacgcaacacgcagagcgcccacagcgagaccccagtcacaacgatagcaacaagaagaaggagaaggataaaccggaagtacggacgaagaggcacaacatgctcaact

SEQ ID NO: 418992 - DNA, 2557 bp, Homo sapiens
  misc_feature (1851)..(1851): n is a, c, g, or t
acttctcacacgcctttcttattggataccggcttttcatggggccgagcgccgctgggtaggcggaagtagccgcaggcatggcggcggctatgccgcttgctctgctcgtcctgttgctcctggggcccggcggctggtgccttgcagaacccccacgcgacagcctgcgggaggaacttgtcatcaccccgctgccttccggggacgtagccgccacattccagttccgcacgcgctgggattcggagcttcagcgggaaggagtgtcccattacaggctctttcccaaagccctggggcagctgatctccaagtattctctacgggagctgcacctgtcattcacacaaggcttttggaggacccgatactgggggccacccttcctgcaggccccatcaggtgcagagctgtgggtctggttccaagacactgtcactgaactggtccctcttccggatgttctcccgaaccctcacggagccctgccccctggcttcagagagccgagtctatgtggacatcaccacctacaaccaggacaacgagacattagaggtgcacccacccccgaccactacatatcaggacgtcatcctaggcactcggaagacctatgccatctatgacttgcttgacaccgccatgatcaacaactctcgaaacctcaacatccagctcaagtggaagagacccccagagaatgaggcccccccagtgcccttcctgcatgcccagcggtacgtgagtggctatgggctgcagaagggggagctgagcacactgctgtacaacacccacccataccgggccttcccggtgctgctgctggacaccgtaccctggtatctgcggctgtatgtgcacaccctcaccatcacctccaagggcaaggagaacaaaccaagttacatccactaccagcctgcccaggaccggctgcaaccccacctcctggagatgctgattcagctgccggccaactcagtcaccaaggtttccatccagtttgagcgggcgctgctgaagtggaccgagtacacgccagatcctaaccatggcttctatgtcagcccatctgtcctcagcgcccttgtgcccagcatggtagcagccaagccagtggactgggaagagagtcccctcttcaacagcctgttcccagtctctgatggctctaactactttgtgcggctctacacggagccgctgctggtgaacctgccgacaccggacttcagcatgccctacaacgtgatctgcctcacgtgcactgtggtggccgtgtgctacggctccttctacaatctcctcacccgaaccttccacatcgaggagccccgcacaggtggcctggccaagcggctggccaaccttatccggcgcgcccgaggtgtccccccactctgattcttgccctttccagcagctgcagctgccgtttctctctggggaggggagcccaagggctgtttctgccacttgctctcctcagagttggcttttgaaccaaagtgccctggaccaggtcagggcctacagctgtgttgtccagtacaggagccacgagccaaatgtggcatttgaatttgaattaacttagaaattcatttcctcacctgtagtggccacctctatattgaggtgctcaataagcaaaagtggtcggtggctgctgtattggacagcacagaaaaagatttccatcaccacagaaaggtcggctggcagcactggccaaggtgatggggtgtgctacacagtgtatgtcactgtgtagtggatggagtttactgtttgtggaataaaaacggctgtttccgtgaaaaaaaaaaacaaaaacaaaanaaaaaaaaaaaaaaaaaaccgggggcagaatcacaatggcgggggtggacggacaaaagcacggtgacagacgaaaacgggccagaggcggccagacaagttgagtacttccgacgcccccacttttctttgtggagcacgagggggaaggaaacagcgggcgggacccccccaaagaggggaggaacgagaataaagatcaggcagacaacacccgggtaagcagctgggattaatagtgatgccgacgggcaaaaggaccagcgaggcacacaaccgcagacaacggcaaactgacgaccgacgaggagcgaaacgacgtcgcgacaatcaatcccacaactgggacagagagacgcgggagacaggacacacacagaaacacacaggaacaccaagcgaagagcacggcgagacgaacaggacagccagcatcacggcaggagtcgggaccagcagacacgaaccgccagaacgtagccatcaggggcaacaaggaggccacagaccaccgcgaaaccgagggtcaaagcgagctacgcgtgccgagagccgcgaagcaacgcggaaccgcacgagaccgaagaacgcagaccaacgcaacacgcagagcgcccacagcgagaccccagtcacaacgatagcaacaagaagaaggagaaggataaaccggaagtacggacgaagaggcacaacatgctcaact

SEQ ID NO: 418993 - DNA, 2379 bp, Homo sapiens
  misc_feature (1673)..(1673): n is a, c, g, or t
acttctcacacgcctttcttattggataccggcttttcatggggccgagcgccgctgggtaggcggaagtagccgcaggcatggcggcggctatgccgcttgctctgctcgtcctgttgctcctggggcccggcggctggtgccttgcagaacccccacgcgacagcctgcgggaggaacttgtcatcaccccgctgccttccggggacgtagccgccacattccagttccgcacgcgctgggattcggagcttcagcgggaaggagactggtccctcttccggatgttctcccgaaccctcacggagccctgccccctggcttcagagagccgagtctatgtggacatcaccacctacaaccaggacaacgagacattagaggtgcacccacccccgaccactacatatcaggacgtcatcctaggcactcggaagacctatgccatctatgacttgcttgacaccgccatgatcaacaactctcgaaacctcaacatccagctcaagtggaagagacccccagagaatgaggcccccccagtgcccttcctgcatgcccagcggtacgtgagtggctatgggctgcagaagggggagctgagcacactgctgtacaacacccacccataccgggccttcccggtgctgctgctggacaccgtaccctggtatctgcggctgtatgtgcacaccctcaccatcacctccaagggcaaggagaacaaaccaagttacatccactaccagcctgcccaggaccggctgcaaccccacctcctggagatgctgattcagctgccggccaactcagtcaccaaggtttccatccagtttgagcgggcgctgctgaagtggaccgagtacacgccagatcctaaccatggcttctatgtcagcccatctgtcctcagcgcccttgtgcccagcatggtagcagccaagccagtggactgggaagagagtcccctcttcaacagcctgttcccagtctctgatggctctaactactttgtgcggctctacacggagccgctgctggtgaacctgccgacaccggacttcagcatgccctacaacgtgatctgcctcacgtgcactgtggtggccgtgtgctacggctccttctacaatctcctcacccgaaccttccacatcgaggagccccgcacaggtggcctggccaagcggctggccaaccttatccggcgcgcccgaggtgtccccccactctgattcttgccctttccagcagctgcagctgccgtttctctctggggaggggagcccaagggctgtttctgccacttgctctcctcagagttggcttttgaaccaaagtgccctggaccaggtcagggcctacagctgtgttgtccagtacaggagccacgagccaaatgtggcatttgaatttgaattaacttagaaattcatttcctcacctgtagtggccacctctatattgaggtgctcaataagcaaaagtggtcggtggctgctgtattggacagcacagaaaaagatttccatcaccacagaaaggtcggctggcagcactggccaaggtgatggggtgtgctacacagtgtatgtcactgtgtagtggatggagtttactgtttgtggaataaaaacggctgtttccgtgaaaaaaaaaaacaaaaacaaaanaaaaaaaaaaaaaaaaaaccgggggcagaatcacaatggcgggggtggacggacaaaagcacggtgacagacgaaaacgggccagaggcggccagacaagttgagtacttccgacgcccccacttttctttgtggagcacgagggggaaggaaacagcgggcgggacccccccaaagaggggaggaacgagaataaagatcaggcagacaacacccgggtaagcagctgggattaatagtgatgccgacgggcaaaaggaccagcgaggcacacaaccgcagacaacggcaaactgacgaccgacgaggagcgaaacgacgtcgcgacaatcaatcccacaactgggacagagagacgcgggagacaggacacacacagaaacacacaggaacaccaagcgaagagcacggcgagacgaacaggacagccagcatcacggcaggagtcgggaccagcagacacgaaccgccagaacgtagccatcaggggcaacaaggaggccacagaccaccgcgaaaccgagggtcaaagcgagctacgcgtgccgagagccgcgaagcaacgcggaaccgcacgagaccgaagaacgcagaccaacgcaacacgcagagcgcccacagcgagaccccagtcacaacgatagcaacaagaagaaggagaaggataaaccggaagtacggacgaagaggcacaacatgctcaact

SEQ ID NO: 418994 - DNA, 2675 bp, Homo sapiens
  misc_feature (1969)..(1969): n is a, c, g, or t
acttctcacacgcctttcttattggataccggcttttcatggggccgagcgccgctgggtaggcggaagtagccgcaggcatggcggcggctatgccgcttgctctgctcgtcctgttgctcctggggcccggcggctggtgccttgcagaacccccacgcgacagcctgcgggaggaacttgtcatcaccccgctgccttccggggacgtagccgccacattccagttccgcacgcgctgggattcggagcttcagcgggaaggagacactgaccactactttctgcgctatgctgtgctgccgcgggaggtggtctgcaccgaaaacctcaccccctggaagaagctcttgccctgtagttccaaggcaggcctctctgtgctgctgaaggcagatcgcttgttccacaccagctaccactcccaggcagtgcatatccgccctgtttgcagaaatgcacgctgtactagcatctcctgggagctgaggcagaccctgtcagttgtatttgatgccttcatcacggggcagggaaagaaagactggtccctcttccggatgttctcccgaaccctcacggagccctgccccctggcttcagagagccgagtctatgtggacatcaccacctacaaccagccctgcctttgtgtccccaggacaacgagacattagaggtgcacccacccccgaccactacatatcaggacgtcatcctaggcactcggaagacctatgccatctatgacttgcttgacaccgccatgatcaacaactctcgaaacctcaacatccagctcaagtggaagagacccccagagaatgaggcccccccagtgcccttcctgcatgcccagcggtacgtgagtggctatgggctgcagaagggggagctgagcacactgctgtacaacacccacccataccgggccttcccggtgctgctgctggacaccgtaccctggtatctgcggctgtatgtgcacaccctcaccatcacctccaagggcaaggagaacaaaccaagttacatccactaccagcctgcccaggaccggctgcaaccccacctcctggagatgctgattcagctgccggccaactcagtcaccaaggtttccatccagtttgagcgggcgctgctgaagtggaccgagtacacgccagatcctaaccatggcttctatgtcagcccatctgtcctcagcgcccttgtgcccagcatggtagcagccaagccagtggactgggaagagagtcccctcttcaacagcctgttcccagtctctgatggctctaactactttgtgcggctctacacggagccgctgctggtgaacctgccgacaccggacttcagcatgccctacaacgtgatctgcctcacgtgcactgtggtggccgtgtgctacggctccttctacaatctcctcacccgaaccttccacatcgaggagccccgcacaggtggcctggccaagcggctggccaaccttatccggcgcgcccgaggtgtccccccactctgattcttgccctttccagcagctgcagctgccgtttctctctggggaggggagcccaagggctgtttctgccacttgctctcctcagagttggcttttgaaccaaagtgccctggaccaggtcagggcctacagctgtgttgtccagtacaggagccacgagccaaatgtggcatttgaatttgaattaacttagaaattcatttcctcacctgtagtggccacctctatattgaggtgctcaataagcaaaagtggtcggtggctgctgtattggacagcacagaaaaagatttccatcaccacagaaaggtcggctggcagcactggccaaggtgatggggtgtgctacacagtgtatgtcactgtgtagtggatggagtttactgtttgtggaataaaaacggctgtttccgtgaaaaaaaaaaacaaaaacaaaanaaaaaaaaaaaaaaaaaaccgggggcagaatcacaatggcgggggtggacggacaaaagcacggtgacagacgaaaacgggccagaggcggccagacaagttgagtacttccgacgcccccacttttctttgtggagcacgagggggaaggaaacagcgggcgggacccccccaaagaggggaggaacgagaataaagatcaggcagacaacacccgggtaagcagctgggattaatagtgatgccgacgggcaaaaggaccagcgaggcacacaaccgcagacaacggcaaactgacgaccgacgaggagcgaaacgacgtcgcgacaatcaatcccacaactgggacagagagacgcgggagacaggacacacacagaaacacacaggaacaccaagcgaagagcacggcgagacgaacaggacagccagcatcacggcaggagtcgggaccagcagacacgaaccgccagaacgtagccatcaggggcaacaaggaggccacagaccaccgcgaaaccgagggtcaaagcgagctacgcgtgccgagagccgcgaagcaacgcggaaccgcacgagaccgaagaacgcagaccaacgcaacacgcagagcgcccacagcgagaccccagtcacaacgatagcaacaagaagaaggagaaggataaaccggaagtacggacgaagaggcacaacatgctcaact

SEQ ID NO: 418995 - DNA, 2180 bp, Homo sapiens
  misc_feature (1474)..(1474): n is a, c, g, or t
acacaaagcctgtttggtggtctcttcacactgacgtgcatgaaatttggtgctgtgactcggatcgggggacctcccttgggagatcaatcccctgtcctcctgctctttgctccatgagaaagatccacctacgacctcaggtcctcagaccgaccagcccaaggacaacgagacattagaggtgcacccacccccgaccactacatatcaggacgtcatcctaggcactcggaagacctatgccatctatgacttgcttgacaccgccatgatcaacaactctcgaaacctcaacatccagctcaagtggaagagacccccagagaatgaggcccccccagtgcccttcctgcatgcccagcggtacgtgagtggctatgggctgcagaagggggagctgagcacactgctgtacaacacccacccataccgggccttcccggtgctgctgctggacaccgtaccctggtatctgcggctgtatgtgcacaccctcaccatcacctccaagggcaaggagaacaaaccaagttacatccactaccagcctgcccaggaccggctgcaaccccacctcctggagatgctgattcagctgccggccaactcagtcaccaaggtttccatccagtttgagcgggcgctgctgaagtggaccgagtacacgccagatcctaaccatggcttctatgtcagcccatctgtcctcagcgcccttgtgcccagcatggtagcagccaagccagtggactgggaagagagtcccctcttcaacagcctgttcccagtctctgatggctctaactactttgtgcggctctacacggagccgctgctggtgaacctgccgacaccggacttcagcatgccctacaacgtgatctgcctcacgtgcactgtggtggccgtgtgctacggctccttctacaatctcctcacccgaaccttccacatcgaggagccccgcacaggtggcctggccaagcggctggccaaccttatccggcgcgcccgaggtgtccccccactctgattcttgccctttccagcagctgcagctgccgtttctctctggggaggggagcccaagggctgtttctgccacttgctctcctcagagttggcttttgaaccaaagtgccctggaccaggtcagggcctacagctgtgttgtccagtacaggagccacgagccaaatgtggcatttgaatttgaattaacttagaaattcatttcctcacctgtagtggccacctctatattgaggtgctcaataagcaaaagtggtcggtggctgctgtattggacagcacagaaaaagatttccatcaccacagaaaggtcggctggcagcactggccaaggtgatggggtgtgctacacagtgtatgtcactgtgtagtggatggagtttactgtttgtggaataaaaacggctgtttccgtgaaaaaaaaaaacaaaaacaaaanaaaaaaaaaaaaaaaaaaccgggggcagaatcacaatggcgggggtggacggacaaaagcacggtgacagacgaaaacgggccagaggcggccagacaagttgagtacttccgacgcccccacttttctttgtggagcacgagggggaaggaaacagcgggcgggacccccccaaagaggggaggaacgagaataaagatcaggcagacaacacccgggtaagcagctgggattaatagtgatgccgacgggcaaaaggaccagcgaggcacacaaccgcagacaacggcaaactgacgaccgacgaggagcgaaacgacgtcgcgacaatcaatcccacaactgggacagagagacgcgggagacaggacacacacagaaacacacaggaacaccaagcgaagagcacggcgagacgaacaggacagccagcatcacggcaggagtcgggaccagcagacacgaaccgccagaacgtagccatcaggggcaacaaggaggccacagaccaccgcgaaaccgagggtcaaagcgagctacgcgtgccgagagccgcgaagcaacgcggaaccgcacgagaccgaagaacgcagaccaacgcaacacgcagagcgcccacagcgagaccccagtcacaacgatagcaacaagaagaaggagaaggataaaccggaagtacggacgaagaggcacaacatgctcaact

SEQ ID NO: 418996 - DNA, 1877 bp, Homo sapiens
  misc_feature (1171)..(1171): n is a, c, g, or t
ctgttaactgttgatatttctttacacagaggcccccccagtgcccttcctgcatgcccagcggtacgtgagtggctatgggctgcagaagggggagctgagcacactgctgtacaacacccacccataccgggccttcccggtgctgctgctggacaccgtaccctggtatctgcggctgtatgtgcacaccctcaccatcacctccaagggcaaggagaacaaaccaagttacatccactaccagcctgcccaggaccggctgcaaccccacctcctggagatgctgattcagctgccggccaactcagtcaccaaggtttccatccagtttgagcgggcgctgctgaagtggaccgagtacacgccagatcctaaccatggcttctatgtcagcccatctgtcctcagcgcccttgtgcccagcatggtagcagccaagccagtggactgggaagagagtcccctcttcaacagcctgttcccagtctctgatggctctaactactttgtgcggctctacacggagccgctgctggtgaacctgccgacaccggacttcagcatgccctacaacgtgatctgcctcacgtgcactgtggtggccgtgtgctacggctccttctacaatctcctcacccgaaccttccacatcgaggagccccgcacaggtggcctggccaagcggctggccaaccttatccggcgcgcccgaggtgtccccccactctgattcttgccctttccagcagctgcagctgccgtttctctctggggaggggagcccaagggctgtttctgccacttgctctcctcagagttggcttttgaaccaaagtgccctggaccaggtcagggcctacagctgtgttgtccagtacaggagccacgagccaaatgtggcatttgaatttgaattaacttagaaattcatttcctcacctgtagtggccacctctatattgaggtgctcaataagcaaaagtggtcggtggctgctgtattggacagcacagaaaaagatttccatcaccacagaaaggtcggctggcagcactggccaaggtgatggggtgtgctacacagtgtatgtcactgtgtagtggatggagtttactgtttgtggaataaaaacggctgtttccgtgaaaaaaaaaaacaaaaacaaaanaaaaaaaaaaaaaaaaaaccgggggcagaatcacaatggcgggggtggacggacaaaagcacggtgacagacgaaaacgggccagaggcggccagacaagttgagtacttccgacgcccccacttttctttgtggagcacgagggggaaggaaacagcgggcgggacccccccaaagaggggaggaacgagaataaagatcaggcagacaacacccgggtaagcagctgggattaatagtgatgccgacgggcaaaaggaccagcgaggcacacaaccgcagacaacggcaaactgacgaccgacgaggagcgaaacgacgtcgcgacaatcaatcccacaactgggacagagagacgcgggagacaggacacacacagaaacacacaggaacaccaagcgaagagcacggcgagacgaacaggacagccagcatcacggcaggagtcgggaccagcagacacgaaccgccagaacgtagccatcaggggcaacaaggaggccacagaccaccgcgaaaccgagggtcaaagcgagctacgcgtgccgagagccgcgaagcaacgcggaaccgcacgagaccgaagaacgcagaccaacgcaacacgcagagcgcccacagcgagaccccagtcacaacgatagcaacaagaagaaggagaaggataaaccggaagtacggacgaagaggcacaacatgctcaact

SEQ ID NO: 418997 - DNA, 4509 bp, Homo sapiens
  misc_feature (1702)..(1702): n is a, c, g, or t
  misc_feature (1925)..(1925): n is a, c, g, or t
  misc_feature (3803)..(3803): n is a, c, g, or t
ctgttaactgttgatatttctttacacagaggcccccccagtgcccttcctgcatgcccagcggtacgtgagtggctatgggctgcagaagggggagctgagcacactgctgtacaacacccacccataccgggccttcccggtgctgctgctggacaccgtaccctggtatctgcggctgtatgtgcacaccctcaccatcacctccaagggcaaggagaacaaaccaagtgaggacctgagtcctgaaccaggcccccagcccgccctctcatgtcctctccaggtcccccaaactctcatttcccagggtagttcctgaagtacctctgaaaagctacacaggcataaagagtaaggaatagtttctcaaaactggaacgggagcctcactgtgccaggttcagaagtaatttataaaacagcaataattaaaacacataatactggtgattcttaataggactgtacaaggacagtagcttcctttttcacttacttttgcctcctttctggagcattgggttttgtgatgattcatagactctttaaggtagggaaagggtttggcaacgttaggcttttgaagctaggaagatagcagagctggagtagatggtgttttgcttccttgggaggggtaaagaggtacagttaattaaatttttttatttctatttttattaaaatttatttttattttctattatttttctaaggagaagataatattagtgcttcctattaggtgccaggcatagcactaaagcacttgcctttctttggtgtagggggagactagtagtaaagtaaaagacctctgaggaagaggttgtaccatatcccaaacggccaaacttaaaaacctttcagtactttagttgattcctatattttcaaacatacggtgaatagtttcacttattttcagcaccattatttgtaccaccttcaaaatctctatttcagacatcctaactgcatattctataggtttttctgttattattcttttaaatcttctcctttggaaaatttcaaacccaaacccaaacagaatagtgtaataatcccctgtacacaccctgcagccttttttttttttttttaagagacagactgttgctctgtcagctatgccggagtgcagtggcatgatcatggctcattgcagtctcagactgctcggctcaagcaatcctcctacctccgcttccctaggactgcaggcatgaaccgccatgcctttaattttttcacagaggcagggtcttgttatgttgcacaggctggtctcaaactcctggcctcaagcgattctcctgcctcagtctcctaaagtgctgggattataggtgtaagccgctgcctgctggcatatcttaaagcaaatcttagacattgcatcaattaacctttaaatactttaaggatttttaaaaatgtaaccatatcattaccacttctgttttcccctgtggtcttaaaaatgtctttttataactggtttgtttaaattgggataaacaaggttctcacattgcatttgctttatactaagttcctctcttgggtgggcacagtggtgcacacctgtaatctcagcactttgggaggccaacacagaaggaccacttgagtccaggagttcgaaaccagcctggacaacattgtgaggctccccctacctatacaaaaaaantttttttttttttttttttttttttttgagacggatcctcactctgtcacccaggctggagtgcagtggcgcgatcttagctcactgcaacctccacctcccgggttcaagcgattctcctgcctccacctcccgagtagctgggactacaggcgcgtgccaccacgcctggctaattttttctgtttttagtagagatgcggtttcactgtgttagccaggntggtctcgatcttctgaccttgtgatctgcccgccttggcctcccaaagtgctgggattaaaataaattgtttttaattagctgggggtggtgttgcacgcctgtagtcccagctactcaagaggctgaggtgggaggatcgcttgaacccaggaggtcaaggctatagtgagccatgatcatactattgcacttcagcatgggcgacagtgtgagaccctgtcacgaaaaaaaaaaaagtttctttttctttaaaattactagactattcttagagcagttttaggtttacagaaaaactgagcacaaagcacagagttcccatatactccctgtctccacacccagaatgtcccttattataaatgtcttgtctttggtgtggtactcttcagtctctcttcatctgtagcagtgcccatgccttttttttttttttttaatgtcatttatttgttgaagaaactgggtcatttgttgtgtagaatgttccacattctgggtttgtccttgtgctagtgtttaacacacccctcctctcctatatttcttgtgtgttggtggttagatttagaaacctgattagattcatgtcccacatttttggcaagaaaaattcccaggtggttctgtgaacttcttcttgcgtcacatcaggcacttggtgtctggtgccccagttgtagtgatgtgaagattgattagccatctgcagcactcctaacaacctctcttgatcgcatcctgggatcactgccctggaaacatcctctcccttttcttagcccctgctttcttcccttgcctgcctggcttctatgctcccaagcccatcttctaggcacccagattgaggctccatggcaagcagcagggacaggggcagcaggtagcctgaccccaggaaagagatgtgggtgaccttgcatgtctccaggttacatccactaccagcctgcccaggaccggctgcaaccccacctcctggagatgctgattcagctgccggccaactcagtcaccaaggtttccatccagtttgagcgggcgctgctgaagtggaccgagtacacgccagatcctaaccatggcttctatgtcagcccatctgtcctcagcgcccttgtgcccagcatggtagcagccaagccagtggactgggaagagagtcccctcttcaacagcctgttcccagtctctgatggctctaactactttgtgcggctctacacggagccgctgctggtgaacctgccgacaccggacttcagcatgccctacaacgtgatctgcctcacgtgcactgtggtggccgtgtgctacggctccttctacaatctcctcacccgaaccttccacatcgaggagccccgcacaggtggcctggccaagcggctggccaaccttatccggcgcgcccgaggtgtccccccactctgattcttgccctttccagcagctgcagctgccgtttctctctggggaggggagcccaagggctgtttctgccacttgctctcctcagagttggcttttgaaccaaagtgccctggaccaggtcagggcctacagctgtgttgtccagtacaggagccacgagccaaatgtggcatttgaatttgaattaacttagaaattcatttcctcacctgtagtggccacctctatattgaggtgctcaataagcaaaagtggtcggtggctgctgtattggacagcacagaaaaagatttccatcaccacagaaaggtcggctggcagcactggccaaggtgatggggtgtgctacacagtgtatgtcactgtgtagtggatggagtttactgtttgtggaataaaaacggctgtttccgtgaaaaaaaaaaacaaaaacaaaanaaaaaaaaaaaaaaaaaaccgggggcagaatcacaatggcgggggtggacggacaaaagcacggtgacagacgaaaacgggccagaggcggccagacaagttgagtacttccgacgcccccacttttctttgtggagcacgagggggaaggaaacagcgggcgggacccccccaaagaggggaggaacgagaataaagatcaggcagacaacacccgggtaagcagctgggattaatagtgatgccgacgggcaaaaggaccagcgaggcacacaaccgcagacaacggcaaactgacgaccgacgaggagcgaaacgacgtcgcgacaatcaatcccacaactgggacagagagacgcgggagacaggacacacacagaaacacacaggaacaccaagcgaagagcacggcgagacgaacaggacagccagcatcacggcaggagtcgggaccagcagacacgaaccgccagaacgtagccatcaggggcaacaaggaggccacagaccaccgcgaaaccgagggtcaaagcgagctacgcgtgccgagagccgcgaagcaacgcggaaccgcacgagaccgaagaacgcagaccaacgcaacacgcagagcgcccacagcgagaccccagtcacaacgatagcaacaagaagaaggagaaggataaaccggaagtacggacgaagaggcacaacatgctcaact

SEQ ID NO: 418998 - DNA, 1686 bp, Homo sapiens
  misc_feature (980)..(980): n is a, c, g, or t
tactctagagatccgtaagaacaggtgaggtctgcacggctggggtcagtctcggcatcttcccgatgccagcttggcggtatgtctcagaacgtaactacacttccgtttgtcgctcagtcaccaaggtttccatccagtttgagcgggcgctgctgaagtggaccgagtacacgccagatcctaaccatggcttctatgtcagcccatctgtcctcagcgcccttgtgcccagcatggtagcagccaagccagtggactgggaagagagtcccctcttcaacagcctgttcccagtctctgatggctctaactactttgtgcggctctacacggagccgctgctggtgaacctgccgacaccggacttcagcatgccctacaacgtgatctgcctcacgtgcactgtggtggccgtgtgctacggctccttctacaatctcctcacccgaaccttccacatcgaggagccccgcacaggtggcctggccaagcggctggccaaccttatccggcgcgcccgaggtgtccccccactctgattcttgccctttccagcagctgcagctgccgtttctctctggggaggggagcccaagggctgtttctgccacttgctctcctcagagttggcttttgaaccaaagtgccctggaccaggtcagggcctacagctgtgttgtccagtacaggagccacgagccaaatgtggcatttgaatttgaattaacttagaaattcatttcctcacctgtagtggccacctctatattgaggtgctcaataagcaaaagtggtcggtggctgctgtattggacagcacagaaaaagatttccatcaccacagaaaggtcggctggcagcactggccaaggtgatggggtgtgctacacagtgtatgtcactgtgtagtggatggagtttactgtttgtggaataaaaacggctgtttccgtgaaaaaaaaaaacaaaaacaaaanaaaaaaaaaaaaaaaaaaccgggggcagaatcacaatggcgggggtggacggacaaaagcacggtgacagacgaaaacgggccagaggcggccagacaagttgagtacttccgacgcccccacttttctttgtggagcacgagggggaaggaaacagcgggcgggacccccccaaagaggggaggaacgagaataaagatcaggcagacaacacccgggtaagcagctgggattaatagtgatgccgacgggcaaaaggaccagcgaggcacacaaccgcagacaacggcaaactgacgaccgacgaggagcgaaacgacgtcgcgacaatcaatcccacaactgggacagagagacgcgggagacaggacacacacagaaacacacaggaacaccaagcgaagagcacggcgagacgaacaggacagccagcatcacggcaggagtcgggaccagcagacacgaaccgccagaacgtagccatcaggggcaacaaggaggccacagaccaccgcgaaaccgagggtcaaagcgagctacgcgtgccgagagccgcgaagcaacgcggaaccgcacgagaccgaagaacgcagaccaacgcaacacgcagagcgcccacagcgagaccccagtcacaacgatagcaacaagaagaaggagaaggataaaccggaagtacggacgaagaggcacaacatgctcaact

SEQ ID NO: 418999 - DNA, 1367 bp, Homo sapiens
  misc_feature (661)..(661): n is a, c, g, or t
gcggccgcctactactactactgctcgaattcaagcttctaacgatgtacggggaatgccctacaacgtgatctgcctcacgtgcactgtggtggccgtgtgctacggctccttctacaatctcctcacccgaaccttccacatcgaggagccccgcacaggtggcctggccaagcggctggccaaccttatccggcgcgcccgaggtgtccccccactctgattcttgccctttccagcagctgcagctgccgtttctctctggggaggggagcccaagggctgtttctgccacttgctctcctcagagttggcttttgaaccaaagtgccctggaccaggtcagggcctacagctgtgttgtccagtacaggagccacgagccaaatgtggcatttgaatttgaattaacttagaaattcatttcctcacctgtagtggccacctctatattgaggtgctcaataagcaaaagtggtcggtggctgctgtattggacagcacagaaaaagatttccatcaccacagaaaggtcggctggcagcactggccaaggtgatggggtgtgctacacagtgtatgtcactgtgtagtggatggagtttactgtttgtggaataaaaacggctgtttccgtgaaaaaaaaaaacaaaaacaaaanaaaaaaaaaaaaaaaaaaccgggggcagaatcacaatggcgggggtggacggacaaaagcacggtgacagacgaaaacgggccagaggcggccagacaagttgagtacttccgacgcccccacttttctttgtggagcacgagggggaaggaaacagcgggcgggacccccccaaagaggggaggaacgagaataaagatcaggcagacaacacccgggtaagcagctgggattaatagtgatgccgacgggcaaaaggaccagcgaggcacacaaccgcagacaacggcaaactgacgaccgacgaggagcgaaacgacgtcgcgacaatcaatcccacaactgggacagagagacgcgggagacaggacacacacagaaacacacaggaacaccaagcgaagagcacggcgagacgaacaggacagccagcatcacggcaggagtcgggaccagcagacacgaaccgccagaacgtagccatcaggggcaacaaggaggccacagaccaccgcgaaaccgagggtcaaagcgagctacgcgtgccgagagccgcgaagcaacgcggaaccgcacgagaccgaagaacgcagaccaacgcaacacgcagagcgcccacagcgagaccccagtcacaacgatagcaacaagaagaaggagaaggataaaccggaagtacggacgaagaggcacaacatgctcaact

SEQ ID NO: 419000 - DNA, 288 bp, Homo sapiens
agatgagggattgagtctgagtaggagtctttttgggggctgtgtggtgagagtgataccccctcactgctgccatctggcccttgtgatagaatgcacgctgtactagcatctcctgggagctgaggcagaccctgtcagttgtatttgatgccttcatcacggggcagggaaagaaaggtaagttaccttggcaactcatctgtacccacccatgccagccctgccttatctatgtggactaggcctaggcctggcccctgctcagccctgcgctctgtttctcag

SEQ ID NO: 419001 - DNA, 2454 bp, Homo sapiens
  misc_feature (1748)..(1748): n is a, c, g, or t
acttctcacacgcctttcttattggataccggcttttcatggggccgagcgccgctgggtaggcggaagtagccgcaggcatggcggcggctatgccgcttgctctgctcgtcctgttgctcctggggcccggcggctggtgccttgcagaacccccacgcgacagcctgcgggaggaacttgtcatcaccccgctgccttccggggacgtagccgccacattccagttccgcacgcgctgggattcggagcttcagcgggaaggagacactgaccactactttctgcgctatgctgtgctgccgcgggaggtggtctgcaccgaaaacctcaccccctggaagaagctcttgccctgtagttccaaggcaggcctctctgtgctgctgaaggcagatcgcttgttccacaccagctaccactcccaggcagtgcatatccgccctgtttgcagaaatgcacgctgtactagcatctcctgggagctgaggcagaccctgtcagttgtatttgatgccttcatcacggggcagggaaagaaagactggtccctcttccggatgttctcccgaaccctcacggagccctgccccctggcttcagagagccgagtctatgtggacatcaccacctacaaccaggacaacgagacattagaggtgcacccacccccgaccactacatatcaggacgtcatcctaggcactcggaagacctatgccatctatgacttgcttgacaccgccatgatcaacaactctcgaaacctcaacatccagctcaagtggaagagacccccagagaatggttacatccactaccagcctgcccaggaccggctgcaaccccacctcctggagatgctgattcagctgccggccaactcagtcaccaaggtttccatccagtttgagcgggcgctgctgaagtggaccgagtacacgccagatcctaaccatggcttctatgtcagcccatctgtcctcagcgcccttgtgcccagcatggtagcagccaagccagtggactgggaagagagtcccctcttcaacagcctgttcccagtctctgatggctctaactactttgtgcggctctacacggagccgctgctggtgaacctgccgacaccggacttcagcatgccctacaacgtgatctgcctcacgtgcactgtggtggccgtgtgctacggctccttctacaatctcctcacccgaaccttccacatcgaggagccccgcacaggtggcctggccaagcggctggccaaccttatccggcgcgcccgaggtgtccccccactctgattcttgccctttccagcagctgcagctgccgtttctctctggggaggggagcccaagggctgtttctgccacttgctctcctcagagttggcttttgaaccaaagtgccctggaccaggtcagggcctacagctgtgttgtccagtacaggagccacgagccaaatgtggcatttgaatttgaattaacttagaaattcatttcctcacctgtagtggccacctctatattgaggtgctcaataagcaaaagtggtcggtggctgctgtattggacagcacagaaaaagatttccatcaccacagaaaggtcggctggcagcactggccaaggtgatggggtgtgctacacagtgtatgtcactgtgtagtggatggagtttactgtttgtggaataaaaacggctgtttccgtgaaaaaaaaaaacaaaaacaaaanaaaaaaaaaaaaaaaaaaccgggggcagaatcacaatggcgggggtggacggacaaaagcacggtgacagacgaaaacgggccagaggcggccagacaagttgagtacttccgacgcccccacttttctttgtggagcacgagggggaaggaaacagcgggcgggacccccccaaagaggggaggaacgagaataaagatcaggcagacaacacccgggtaagcagctgggattaatagtgatgccgacgggcaaaaggaccagcgaggcacacaaccgcagacaacggcaaactgacgaccgacgaggagcgaaacgacgtcgcgacaatcaatcccacaactgggacagagagacgcgggagacaggacacacacagaaacacacaggaacaccaagcgaagagcacggcgagacgaacaggacagccagcatcacggcaggagtcgggaccagcagacacgaaccgccagaacgtagccatcaggggcaacaaggaggccacagaccaccgcgaaaccgagggtcaaagcgagctacgcgtgccgagagccgcgaagcaacgcggaaccgcacgagaccgaagaacgcagaccaacgcaacacgcagagcgcccacagcgagaccccagtcacaacgatagcaacaagaagaaggagaaggataaaccggaagtacggacgaagaggcacaacatgctcaact

SEQ ID NO: 419002 - DNA, 1519 bp, Homo sapiens
  misc_feature (37)..(37): n is a, c, g, or t
  misc_feature (813)..(813): n is a, c, g, or t
agggtcgttatgatggtcgtcgttatgaggtcgatgnccccatctgtcctcagcgcccttgtgcccagcatggtagcagccaagccagtggactgggaagagagtcccctcttcaacagcctgttcccagtctctgatggctctaactactttgtgcggctctacacggagccgctgctggtgaacctgccgacaccggacttcagcatgccctacaacgtgatctgcctcacgtgcactgtggtggccgtgtgctacggctccttctacaatctcctcacccgaaccttccacatcgaggagccccgcacaggtggcctggccaagcggctggccaaccttatccggcgcgcccgaggtgtccccccactctgattcttgccctttccagcagctgcagctgccgtttctctctggggaggggagcccaagggctgtttctgccacttgctctcctcagagttggcttttgaaccaaagtgccctggaccaggtcagggcctacagctgtgttgtccagtacaggagccacgagccaaatgtggcatttgaatttgaattaacttagaaattcatttcctcacctgtagtggccacctctatattgaggtgctcaataagcaaaagtggtcggtggctgctgtattggacagcacagaaaaagatttccatcaccacagaaaggtcggctggcagcactggccaaggtgatggggtgtgctacacagtgtatgtcactgtgtagtggatggagtttactgtttgtggaataaaaacggctgtttccgtgaaaaaaaaaaacaaaaacaaaanaaaaaaaaaaaaaaaaaaccgggggcagaatcacaatggcgggggtggacggacaaaagcacggtgacagacgaaaacgggccagaggcggccagacaagttgagtacttccgacgcccccacttttctttgtggagcacgagggggaaggaaacagcgggcgggacccccccaaagaggggaggaacgagaataaagatcaggcagacaacacccgggtaagcagctgggattaatagtgatgccgacgggcaaaaggaccagcgaggcacacaaccgcagacaacggcaaactgacgaccgacgaggagcgaaacgacgtcgcgacaatcaatcccacaactgggacagagagacgcgggagacaggacacacacagaaacacacaggaacaccaagcgaagagcacggcgagacgaacaggacagccagcatcacggcaggagtcgggaccagcagacacgaaccgccagaacgtagccatcaggggcaacaaggaggccacagaccaccgcgaaaccgagggtcaaagcgagctacgcgtgccgagagccgcgaagcaacgcggaaccgcacgagaccgaagaacgcagaccaacgcaacacgcagagcgcccacagcgagaccccagtcacaacgatagcaacaagaagaaggagaaggataaaccggaagtacggacgaagaggcacaacatgctcaact

SEQ ID NO: 419003 - DNA, 1353 bp, Homo sapiens
  misc_feature (647)..(647): n is a, c, g, or t
ccccggagaactcctgctgctcccgggagaattcctgctgctcccgctcaactggatggaaaccttggtgcactgtggtggccgtgtgctacggctccttctacaatctcctcacccgaaccttccacatcgaggagccccgcacaggtggcctggccaagcggctggccaaccttatccggcgcgcccgaggtgtccccccactctgattcttgccctttccagcagctgcagctgccgtttctctctggggaggggagcccaagggctgtttctgccacttgctctcctcagagttggcttttgaaccaaagtgccctggaccaggtcagggcctacagctgtgttgtccagtacaggagccacgagccaaatgtggcatttgaatttgaattaacttagaaattcatttcctcacctgtagtggccacctctatattgaggtgctcaataagcaaaagtggtcggtggctgctgtattggacagcacagaaaaagatttccatcaccacagaaaggtcggctggcagcactggccaaggtgatggggtgtgctacacagtgtatgtcactgtgtagtggatggagtttactgtttgtggaataaaaacggctgtttccgtgaaaaaaaaaaacaaaaacaaaanaaaaaaaaaaaaaaaaaaccgggggcagaatcacaatggcgggggtggacggacaaaagcacggtgacagacgaaaacgggccagaggcggccagacaagttgagtacttccgacgcccccacttttctttgtggagcacgagggggaaggaaacagcgggcgggacccccccaaagaggggaggaacgagaataaagatcaggcagacaacacccgggtaagcagctgggattaatagtgatgccgacgggcaaaaggaccagcgaggcacacaaccgcagacaacggcaaactgacgaccgacgaggagcgaaacgacgtcgcgacaatcaatcccacaactgggacagagagacgcgggagacaggacacacacagaaacacacaggaacaccaagcgaagagcacggcgagacgaacaggacagccagcatcacggcaggagtcgggaccagcagacacgaaccgccagaacgtagccatcaggggcaacaaggaggccacagaccaccgcgaaaccgagggtcaaagcgagctacgcgtgccgagagccgcgaagcaacgcggaaccgcacgagaccgaagaacgcagaccaacgcaacacgcagagcgcccacagcgagaccccagtcacaacgatagcaacaagaagaaggagaaggataaaccggaagtacggacgaagaggcacaacatgctcaact

SEQ ID NO: 419004 - DNA, 2447 bp, Homo sapiens
ccccgccttctcgctgcccagccccggggagggaggcggggccgcgaccccggcgcgggtggggcgaatgcgttcccagcgggtagcctggggctggtgcagagttccaagcccacggccccggtcgcggcctcgccgccctcccgcgccccgcgccgggagcgggcctagagcgctcgcctcgcccctccgcgagcagggctctggcgcccgcccctgtccgcaccgctggcagcctgaagagagtcgctggccgtggtcgccgctaggtaggatatatctgcatcttgaaaggaagataaaacaaaagccttctttggaatagatggatttttgtcactttctgtgtgaactaaagtgattcaatgtctcttttggattgcttctgcacttcaagaacacaagttgaatcactcagacctgaaaaacagtctgaaaccagtatccatcaatacttggttgatgagccaaccctttcctggtcacgtccatccactagagccagtgaagtactatgttccaccaacgtttctcactatgagctccaagtagaaataggaagaggatttgacaacttgacttctgtccatcttgcacggcatactcccacgggaacactggtaactataaaaattacaaatctggaaaactgcaatgaagaacgcctgaaagctttacagaaagccgtgattctatcccactttttccggcatcccaatattacaacttattggacagttttcactgttggcagctggctttgggttatttctccatttatggcctatggttcagcaagtcaactcttgaggacctattttcctgaaggaatgagtgaaactttaataagaaacattctctttggagccgtgagagggttgaactatctgcaccaaaatggctgtattcacaggagtattaaagccagccatatcctcatttctggtgatggcctagtgaccctctctggcctgtcccatctgcatagtttggttaagcatggacagaggcatagggctgtgtatgatttcccacagttcagcacatcagtgcagccgtggctgagtccagaactactgagacaggatttacatgggtataatgtgaagtcagatatttacagtgttgggattacagcatgtgaattagccagtgggcaggtgcctttccaggacatgcatagaactcagatgctgttacagaaactgaaaggtcctccttatagcccattggatatcagtattttccctcaatcagaatccagaatgaaaaattcccagtcaggtgtagactctgggattggagaaagtgtgcttgtctccagtggaactcacacagtaaatagtgaccgattacacacaccatcctcaaaaactttctctcctgccttctttagcttggtacagctctgtttgcaacaagatcctgagaaaaggccatcagcaagcagtttattgtcccatgttttcttcaaacagatgaaagaagaaagccaggattcaatactttcactgttgcctcctgcttataacaagccatcaatatcattgcctccagtgttaccttggactgagccagaatgtgattttcctgatgaaaaagactcatactgggaattctagggctgccaaatcattttatgtcctatatacttgacactttctccttgctgctttttcttctgtatttctaggtacaaataccagaattatacttgaaaatacagttggtgcactggagaatctattatttaaaaccactctgttcaaaggggcaccagtttgtagtccctctgtttcgcacagagtactatgacaaggaaacatcagaattactaatctagctagtgtcatttattctggaatttttttctaagctgtgactaactctttttatctctcaatataatttttgagccagttaatttttttcagtattttgctgtcccttgggaatgggccctcagaggacagtgcttccaagtacatcttctcccagattctctggcctttttaatgagctattgttaaaccaacaggctagtttatcttacatcagacccttttctggtagagggaaaatgtttgtgctttccctttttcttctgttaatacttatggtaacacctaactgagcctcactcacattaaatgattcacttgaaatatatacagaaattgtaatttgcttttttttaaaaaagggggctaaagtaacactttcctacttatgtaaattatagatcctaaattcacgcaccccgtgggagctcaataaagatttactgaattgaacacaaaaggggggcgttaaattctcgagggcaagtaccgacaggttgaaagggccatggggttaagagcggggaaaaggggaaagaggtatggaccatgggtggacacgaaggcaaaaaagggactggagggtagaaaggaacatatgaagag

SEQ ID NO: 419005 - DNA, 2169 bp, Homo sapiens
ccccgccttctcgctgcccagccccggggagggaggcggggccgcgaccccggcgcgggtggggcgaatgcgttcccagcgggtagcctggggctggtgcagagttccaagcccacggccccggtcgcggcctcgccgccctcccgcgccccgcgccgggagcgggcctagagcgctcgcctcgcccctccgcgagcagggctctggcgcccgcccctgtccgcaccgctggcagcctgaagagagtcgctggccgtggtcgccgctaggtaggatatatctgcatcttgaaaggaagataaaacaaaagccttctttggaatagatggatttttgtcactttctgtgtgaactaaagtgattcaatgtctcttttggattgcttctgcacttcaagaacacaagttgaatcactcagacctgaaaaacagtctgaaaccagtatccatcaatacttggttgatgagccaaccctttcctggtcacgtccatccactagagccagtgaagtactatgttccaccaacgtttctcactatgagctccaagtagaaataggaagaggatttgacaacttgacttctgtccatcttgcacggcatactcccacgggaacactggtaactataaaaattacaaatctggaaaactgcaatgaagaacgcctgaaagctttacagaaagccgtgattctatcccactttttccggcatcccaatattacaacttattggacagttttcactgttggcagctggctttgggttatttctccatttatggcctatggttcagcaagtcaactcttgaggacctattttcctgaaggaatgagtgaaactttaataagaaacattctctttggagccgtgagagggttgaactatctgcaccaaaatggctgtattcacaggagtattaaagccagccatatcctcatttctggtgatggcctagtgaccctctctggcctgtcccatctgcatagtttggttaagcatggacagaggcatagggctgtgtatgatttcccacagttcagcacatcagtgcagccgtggctgagtccagaactactgagacaggatttacatgggtataatgtgaagtcagatatttacagtgttgggattacagcatgtgaattagccagtgggcaggtgcctttccaggacatgcatagaactcagatgctgttacagaaactgaaaggtcctccttatagcccattggatatcagtattttccctcaatcagaatccagaatgaaaaattcccagtcaggtgtagactctgggattggagaaagtgtgcttgtctccagtggaactcacacagtaaatagtgaccgattacacacaccatcctcaaaaactttctctcctgccttctttagcttggtacagctctgtttgcaacaagatcctgagaaaaggccatcagcaagcagtttattgtcccatgttttcttcaaacagatgaaagaagaaagccaggattcaatactttcactgttgcctcctgcttataacaagccatcaatatcattgcctccagtgttaccttggactgagccagaatgtgattttcctgatgaaaaagactcatactgggaattctagggctgccaaatcattttatgtcctatatacttgacactttctccttgctgctttttcttctgtatttctaggtacaaataccagaattatacttgaaaatacagttggtgcactggagaatctattatttaaaaccactctgttcaaaggggcaccagtttgtagtccctctgtttcgcacagagtactatgacaaggaaacatcagaattactaatctagctagtgtcatttattctggaatttttttctaagctgtgactaactctttttatctctcaatataatttttgagccagttaatttttttcagtattttgctgtcccttgggaatgggccctcagaggacagtgcttccaagtacatcttctcccagattctctggcctttttaatgagctattgttaaaccaacaggctagtttatcttacatcagacccttttctggtagagggaaaatgtttgtgctttccctttttcttctgttaatacttatggtaacacctaactgagcctcactcacattaaatgattcacttgaaatata

SEQ ID NO: 419006 - DNA, 2293 bp, Homo sapiens
ccccgccttctcgctgcccagccccggggagggaggcggggccgcgaccccggcgcgggtggggcgaatgcgttcccagcgggtagcctggggctggtgcagagttccaagcccacggccccggtcgcggcctcgccgccctcccgcgccccgcgccgggagcgggcctagagcgctcgcctcgcccctccgcgagcagggctctggcgcccgcccctgtccgcaccgctggcagcctgaagagagtcgctggccgtggtcgccgctaggtaggatatatctgcatcttgaaaggaagataaaacaaaagccttctttggaatagatggatttttgtcactttctgtgtgaactaaagtgattcaatgtctcttttggattgcttctgcacttcaagaacacaagttgaatcactcagacctgaaaaacagtctgaaaccagtatccatcaatacttggttgatgagccaaccctttcctggtcacgtccatccactagagccagtgaagtactatgttccaccaacgtttctcactatgagctccaagtagaaataggaagaggatttgacaacttgacttctgtccatcttgcacggcatactcccacgggaacactggtaactataaaaattacaaatctggaaaactgcaatgaagaacgcctgaaagctttacagaaagccgtgattctatcccactttttccggcatcccaatattacaacttattggacagttttcactgttggcagctggctttgggttatttctccatttatggcctatggttcagcaagtcaactcttgaggacctattttcctgaaggaatgagtgaaactttaataagaaacattctctttggagccgtgagagggttgaactatctgcaccaaaatggctgtattcacaggagtattaaagccagccatatcctcatttctggtgatggcctagtgaccctctctggcctgtcccatctgcatagtttggttaagcatggacagaggcatagggctgtgtatgatttcccacagttcagcacatcagtgcagccgtggctgagtccagaactactgagacaggatttacatgggtataatgtgaagtcagatatttacagtgttgggattacagcatgtgaattagccagtgggcaggtgcctttccaggacatgcatagaactcagatgctgttacagaaactgaaaggtcctccttatagcccattggatatcagtattttccctcaatcagaatccagaatgaaaaattcccagtcaggtgtagactctgggattggagaaagtgtgcttgtctccagtggaactcacacagtaaatagtgaccgattacacacaccatcctcaaaaactttctctcctgccttctttagcttggtacagctctgtttgcaacaagatcctgagaaaaggccatcagcaagcagtttattgtcccatgttttcttcaaacagatgaaagaagaaagccaggattcaatactttcactgttgcctcctgcttataacaagccatcaatatcattgcctccagtgttaccttggactgagccagaatgtgattttcctgatgaaaaagactcatactgggaattctagggctgccaaatcattttatgtcctatatacttgacactttctccttgctgctttttcttctgtatttctaggtacaaataccagaattatacttgaaaatacagttggtgcactggagaatctattatttaaaaccactctgttcaaaggggcaccagtttgtagtccctctgtttcgcacagagtactatgacaaggaaacatcagaattactaatctagctagtgtcatttattctggaatttttttctaagctgtgactaactctttttatctctcaatataatttttgagccagttaatttttttcagtattttgctgtcccttgggaatgggccctcagaggacagtgcttccaagtacatcttctcccagattctctggcctttttaatgagctattgttaaaccaacaggctagtttatcttacatcagacccttttctggtagagggaaaatgtttgtgctttccctttttcttctgttaatacttatggtaacacctaactgagcctcactcacattaaatgattcacttgaaatatatacagaaattgtaatttgcttttttttaaaaaagggggctaaagtaacactttcctacttatgtaaattatagatcctaaattcacgcaccccgtgggagctcaataaagatttactgaattga

SEQ ID NO: 419007 - DNA, 2397 bp, Homo sapiens
ccccgccttctcgctgcccagccccggggagggaggcggggccgcgaccccggcgcgggtggggcgaatgcgttcccagcgggtagcctggggctggtgcagagttccaagcccacggccccggtcgcggcctcgccgccctcccgcgccccgcgccgggagcgggcctagagcgctcgcctcgcccctccgcgagcagggctctggcgcccgcccctgtccgcaccgctggcagcctgaagagagtcgctggccgtggtcgccgctaggtaggatatatctgcatcttgaaaggaagataaaacaaaagccttctttggaatagatggatttttgtcactttctgtgtgaactaaagtgattcaatgtctcttttggattgcttctgcacttcaagaacacaagttgaatcactcagacctgaaaaacagtctgaaaccagtatccatcaatacttggttgatgagccaaccctttcctggtcacgtccatccactagagccagtgaagtactatgttccaccaacgtttctcactatgagctccaagtagaaataggaagaggatttgacaacttgacttctgtccatcttgcacggcatactcccacgggaacactggtaactataaaaattacaaatctggaaaactgcaatgaagaacgcctgaaagctttacagaaagccgtgattctatcccactttttccggcatcccaatattacaacttattggacagttttcactgttggcagctggctttgggttatttctccatttatggcctatggttcagcaagtcaactcttgaggacctattttcctgaaggaatgagtgaaactttaataagaaacattctctttggagccgtgagagggttgaactatctgcaccaaaatggctgtattcacaggagtattaaagccagccatatcctcatttctggtgatggcctagtgaccctctctggcctgtcccatctgcatagtttggttaagcatggacagaggcatagggctgtgtatgatttcccacagttcagcacatcagtgcagccgtggctgagtccagaactactgagacaggatttacatgggtataatgtgaagtcagatatttacagtgttgggattacagcatgtgaattagccagtgggcaggtgcctttccaggacatgcatagaactcagatgctgttacagaaactgaaaggtcctccttatagcccattggatatcagtattttccctcaatcagaatccagaatgaaaaattcccagtcaggtgtagactctgggattggagaaagtgtgcttgtctccagtggaactcacacagtaaatagtgaccgattacacacaccatcctcaaaaactttctctcctgccttctttagcttggtacagctctgtttgcaacaagatcctgagaaaaggccatcagcaagcagtttattgtcccatgttttcttcaaacagatgaaagaagaaagccaggattcaatactttcactgttgcctcctgcttataacaagccatcaatatcattgcctccagtgttaccttggactgagccagaatgtgattttcctgatgaaaaagactcatactgggaattctagggctgccaaatcattttatgtcctatatacttgacactttctccttgctgctttttcttctgtatttctaggtacaaataccagaattatacttgaaaatacagttggtgcactggagaatctattatttaaaaccactctgttcaaaggggcaccagtttgtagtccctctgtttcgcacagagtactatgacaaggaaacatcagaattactaatctagctagtgtcatttattctggaatttttttctaagctgtgactaactctttttatctctcaatataatttttgagccagttaatttttttcagtattttgctgtcccttgggaatgggccctcagaggacagtgcttccaagtacatcttctcccagattctctggcctttttaatgagctattgttaaaccaacaggctagtttatcttacatcagacccttttctggtagagggaaaatgtttgtgctttccctttttcttctgttaatacttatggtaacacctaactgagcctcactcacattaaatgattcacttgaaatatatacagaaattgtaatttgcttttttttaaaaaagggggctaaagtaacactttcctacttatgtaaattatagatcctaaattcacgcaccccgtgggagctcaataaagatttactgaattgacgaaaaaaaaaaaaaagggggcggtaaaattaccgagggcaaaattataggttacagttttggaaaggccaaggggggttaaaaagggggggtaaacggggagg

SEQ ID NO: 419008 - DNA, 2793 bp, Homo sapiens
ccccgccttctcgctgcccagccccggggagggaggcggggccgcgaccccggcgcgggtggggcgaatgcgttcccagcgggtagcctggggctggtgcagagttccaagcccacggccccggtcgcggcctcgccgccctcccgcgccccgcgccgggagcgggcctagagcgctcgcctcgcccctccgcgagcagggctctggcgcccgcccctgtccgcaccgctggcagcctgaagagagtcgctggccgtggtcgccgctaggtaggatatatctgcatcttgaaaggaagataaaacaaaagccttctttggaatagatggatttttgtcactttctgtgtgaactaaagtgattcaatgtctcttttggattgcttctgcacttcaagaacacaagttgaatcactcagacctgaaaaacagtctgaaaccagtatccatcaatacttggttgatgagccaaccctttcctggtcacgtccatccactagagccagtgaagtactatgttccaccaacgtttctcactatgagctccaagtagaaataggaagaggatttgacaacttgacttctgtccatcttgcacggcatactcccacgggaacactggtaactataaaaattacaaatctggaaaactgcaatgaagaacgcctgaaagctttacagaaagccgtgattctatcccactttttccggcatcccaatattacaacttattggacagttttcactgttggcagctggctttgggttatttctccatttatggcctatggttcagcaagtcaactcttgaggacctattttcctgaaggaatgagtgaaactttaataagaaacattctctttggagccgtgagagggttgaactatctgcaccaaaatggctgtattcacaggagtattaaagccagccatatcctcatttctggtgatggcctagtgaccctctctggcctgtcccatctgcatagtttggttaagcatggacagaggcatagggctgtgtatgatttcccacagttcagcacatcagtgcagccgtggctgagtccagaactactgagacaggatttacatgggtataatgtgaagtcagatatttacagtgttgggattacagcatgtgaattagccagtgggcaggtgcctttccaggacatgcatagaactcagatgctgttacagaaactgaaaggtcctccttatagcccattggatatcagtattttccctcaatcagaatccagaatgaaaaattcccagtcaggtgtagactctgggattggagaaagtgtgcttgtctccagtggaactcacacagtaaatagtgaccgattacacacaccatcctcaaaaactttctctcctgccttctttagcttggtacagctctgtttgcaacaagatcctgagaaaaggccatcagcaagcagtttattgtcccatgttttcttcaaacaggtgagctgatctatcatccgttgtctcgatgtttttaattactattaaaaagtcactttattttgttggcttgatgagatattttggttaccaaggttcttactaataactttgttacaaaataaagttaaaaacaagaaaacttttggtagttcaattatagactttctaaaatactttcattcttcaaaacagaatgagtaaaaataaaatggactatcatcacattactgatgcttggtgtatattttgattaatttagagacattttctatgttggctagaaatgatgaaagggcaaagtaactctgataagaagtcagtttctttggctcttcttcctgttttcagatgaccagaatcaaaggcagttttaggggaaatacctgaaaacaattttaaacacatttaacataaattctttaaaagttatttattgctaacaaaactgatatattgaaatgatatatcaacagccttattttgagtttctttaacagatgaaagaagaaagccaggattcaatactttcactgttgcctcctgcttataacaagccatcaatatcattgcctccagtgttaccttggactgagccagaatgtgattttcctgatgaaaaagactcatactgggaattctagggctgccaaatcattttatgtcctatatacttgacactttctccttgctgctttttcttctgtatttctaggtacaaataccagaattatacttgaaaatacagttggtgcactggagaatctattatttaaaaccactctgttcaaaggggcaccagtttgtagtccctctgtttcgcacagagtactatgacaaggaaacatcagaattactaatctagctagtgtcatttattctggaatttttttctaagctgtgactaactctttttatctctcaatataatttttgagccagttaatttttttcagtattttgctgtcccttgggaatgggccctcagaggacagtgcttccaagtacatcttctcccagattctctggcctttttaatgagctattgttaaaccaacaggctagtttatcttacatcagacccttttctggtagagggaaaatgtttgtgctttccctttttcttctgttaatacttatggtaacacctaactgagcctcactcacattaaatgattcacttgaaatatatacagaaattgtaatttgcttttttttaaaaaagggggctaaagtaacactttcctacttatgtaaattatagatcctaaattcacgcaccccgtgggagctcaataaagatttactgaattga

SEQ ID NO: 419009 - DNA, 2087 bp, Homo sapiens
ccccgccttctcgctgcccagccccggggagggaggcggggccgcgaccccggcgcgggtggggcgaatgcgttcccagcgggtagcctggggctggtgcagagttccaagcccacggccccggtcgcggcctcgccgccctcccgcgccccgcgccgggagcgggcctagagcgctcgcctcgcccctccgcgagcagggctctggcgcccgcccctgtccgcaccgctggcagcctgaagagagtcgctggccgtggtcgccgctaggtaggatatatctgcatcttgaaaggaagataaaacaaaagccttctttggaatagatggatttttgtcactttctgtgtgaactaaagtgattcaatgtctcttttggattgcttctgcacttcaagaacacaagttgaatcactcagacctgaaaaacagtctgaaaccagtatccatcaatacttggttgatgagccaaccctttcctggtcacgtccatccactagagccagtgaagtactatgttccaccaacgtttctcactatgagctccaagtagaaataggaagaggatttgacaacttgacttctgtccatcttgcacggcatactcccacgggaacactggtaactataaaaattacaaatctggaaaactgcaatgaagaacgcctgaaagctttacagaaagccgtgattctatcccactttttccggcatcccaatattacaacttattggacagttttcactgttggcagctggctttgggttatttctccatttatggcctatggttcagcaagtcaactcttgaggacctattttcctgaaggaatgagtgaaactttaataagaaacattctctttggagccgtgagagggttgaactatctgcaccaaaatggctgtattcacaggagtattaaagccagccatatcctcatttctggtgatggcctagtgaccctctctggcctgtcccatctgcatagtttggttaagcatggacagaggcatagggctgtgtatgatttcccacagttcagcacatcagtgcagccgtggctgagtccagaactactgagacaggatttacatgggtataatgtgaagtcagatatttacagtgttgggattacagcatgtgaattagccagtgggcaggtgcctttccaggacatgcatagaactcagcttggtacagctctgtttgcaacaagatcctgagaaaaggccatcagcaagcagtttattgtcccatgttttcttcaaacagatgaaagaagaaagccaggattcaatactttcactgttgcctcctgcttataacaagccatcaatatcattgcctccagtgttaccttggactgagccagaatgtgattttcctgatgaaaaagactcatactgggaattctagggctgccaaatcattttatgtcctatatacttgacactttctccttgctgctttttcttctgtatttctaggtacaaataccagaattatacttgaaaatacagttggtgcactggagaatctattatttaaaaccactctgttcaaaggggcaccagtttgtagtccctctgtttcgcacagagtactatgacaaggaaacatcagaattactaatctagctagtgtcatttattctggaatttttttctaagctgtgactaactctttttatctctcaatataatttttgagccagttaatttttttcagtattttgctgtcccttgggaatgggccctcagaggacagtgcttccaagtacatcttctcccagattctctggcctttttaatgagctattgttaaaccaacaggctagtttatcttacatcagacccttttctggtagagggaaaatgtttgtgctttccctttttcttctgttaatacttatggtaacacctaactgagcctcactcacattaaatgattcacttgaaatatatacagaaattgtaatttgcttttttttaaaaaagggggctaaagtaacactttcctacttatgtaaattatagatcctaaattcacgcaccccgtgggagctcaataaagatttactgaattga

SEQ ID NO: 419010 - DNA, 1730 bp, Homo sapiens
ctcagctgtatcattttctaactgatttttacaataaaaatgagagtaaaaatcagttactctttctagacattaattagcacatttacgttaagactctaagtagtataaaatgtaaattgctgctaccctactaagttactgtcagtaaatactgtgtgcagtaaatgttgagtatggattaattgaaggatacctctacaattatttcctttagtcaaggttgtagctaagaattgggcttctgacatacattctttttaatctttttcgtattgggttttatagcactaaacctaatttctaacatatttttacacctgaaatctacattctaatataaaggtttttttttataactttcttaaaaatgccatcagcaagcagtttattgtcccatgttttcttcaaacaggtgagctgatctatcatccgttgtctcgatgtttttaattactattaaaaagtcactttattttgttggcttgatgagatattttggttaccaaggttcttactaataactttgttacaaaataaagttaaaaacaagaaaacttttggtagttcaattatagactttctaaaatactttcattcttcaaaacagaatgagtaaaaataaaatggactatcatcacattactgatgcttggtgtatattttgattaatttagagacattttctatgttggctagaaatgatgaaagggcaaagtaactctgataagaagtcagtttctttggctcttcttcctgttttcagatgaccagaatcaaaggcagttttaggggaaatacctgaaaacaattttaaacacatttaacataaattctttaaaagttatttattgctaacaaaactgatatattgaaatgatatatcaacagccttattttgagtttctttaacagatgaaagaagaaagccaggattcaatactttcactgttgcctcctgcttataacaagccatcaatatcattgcctccagtgttaccttggactgagccagaatgtgattttcctgatgaaaaagactcatactgggaattctagggctgccaaatcattttatgtcctatatacttgacactttctccttgctgctttttcttctgtatttctaggtacaaataccagaattatacttgaaaatacagttggtgcactggagaatctattatttaaaaccactctgttcaaaggggcaccagtttgtagtccctctgtttcgcacagagtactatgacaaggaaacatcagaattactaatctagctagtgtcatttattctggaatttttttctaagctgtgactaactctttttatctctcaatataatttttgagccagttaatttttttcagtattttgctgtcccttgggaatgggccctcagaggacagtgcttccaagtacatcttctcccagattctctggcctttttaatgagctattgttaaaccaacaggctagtttatcttacatcagacccttttctggtagagggaaaatgtttgtgctttccctttttcttctgttaatacttatggtaacacctaactgagcctcactcacattaaatgattcacttgaaatatatacagaaattgtaatttgcttttttttaaaaaagggggctaaagtaacactttcctacttatgtaaattatagatcctaaattcacgcaccccgtgggagctcaataaagatttactgaattga

SEQ ID NO: 419011 - DNA, 1230 bp, Homo sapiens
ctcagctgtatcattttctaactgatttttacaataaaaatgagagtaaaaatcagttactctttctagacattaattagcacatttacgttaagactctaagtagtataaaatgtaaattgctgctaccctactaagttactgtcagtaaatactgtgtgcagtaaatgttgagtatggattaattgaaggatacctctacaattatttcctttagtcaaggttgtagctaagaattgggcttctgacatacattctttttaatctttttcgtattgggttttatagcactaaacctaatttctaacatatttttacacctgaaatctacattctaatataaaggtttttttttataactttcttaaaaatgccatcagcaagcagtttattgtcccatgttttcttcaaacagatgaaagaagaaagccaggattcaatactttcactgttgcctcctgcttataacaagccatcaatatcattgcctccagtgttaccttggactgagccagaatgtgattttcctgatgaaaaagactcatactgggaattctagggctgccaaatcattttatgtcctatatacttgacactttctccttgctgctttttcttctgtatttctaggtacaaataccagaattatacttgaaaatacagttggtgcactggagaatctattatttaaaaccactctgttcaaaggggcaccagtttgtagtccctctgtttcgcacagagtactatgacaaggaaacatcagaattactaatctagctagtgtcatttattctggaatttttttctaagctgtgactaactctttttatctctcaatataatttttgagccagttaatttttttcagtattttgctgtcccttgggaatgggccctcagaggacagtgcttccaagtacatcttctcccagattctctggcctttttaatgagctattgttaaaccaacaggctagtttatcttacatcagacccttttctggtagagggaaaatgtttgtgctttccctttttcttctgttaatacttatggtaacacctaactgagcctcactcacattaaatgattcacttgaaatatatacagaaattgtaatttgcttttttttaaaaaagggggctaaagtaacactttcctacttatgtaaattatagatcctaaattcacgcaccccgtgggagctcaataaagatttactgaattga

SEQ ID NO: 419012 - DNA, 1953 bp, Homo sapiens
agaacctggatcttccgctgccattcttcagcaaagaactgcttctcacttaaatagttttgtcgacgcaagctaaggcgatgcagtgctgtagccaaatcactatctcctgagggtcctggttggcccatcttctgggagctcctataggaaaatcgcgttcactgattagatcttgaggatcatcagcatgacccagacctctcctttctataatggaagaggatttgacaacttgacttctgtccatcttgcacggcatactcccacgggaacactggtaactataaaaattacaaatctggaaaactgcaatgaagaacgcctgaaagctttacagaaagccgtgattctatcccactttttccggcatcccaatattacaacttattggacagttttcactgttggcagctggctttgggttatttctccatttatggcctatggttcagcaagtcaactcttgaggacctattttcctgaaggaatgagtgaaactttaataagaaacattctctttggagccgtgagagggttgaactatctgcaccaaaatggctgtattcacaggagtattaaagccagccatatcctcatttctggtgatggcctagtgaccctctctggcctgtcccatctgcatagtttggttaagcatggacagaggcatagggctgtgtatgatttcccacagttcagcacatcagtgcagccgtggctgagtccagaactactgagacaggatttacatgggtataatgtgaagtcagatatttacagtgttgggattacagcatgtgaattagccagtgggcaggtgcctttccaggacatgcatagaactcagatgctgttacagaaactgaaaggtcctccttatagcccattggatatcagtattttccctcaatcagaatccagaatgaaaaattcccagtcaggtgtagactctgggattggagaaagtgtgcttgtctccagtggaactcacacagtaaatagtgaccgattacacacaccatcctcaaaaactttctctcctgccttctttagcttggtacagctctgtttgcaacaagatcctgagaaaaggccatcagcaagcagtttattgtcccatgttttcttcaaacagatgaaagaagaaagccaggattcaatactttcactgttgcctcctgcttataacaagccatcaatatcattgcctccagtgttaccttggactgagccagaatgtgattttcctgatgaaaaagactcatactgggaattctagggctgccaaatcattttatgtcctatatacttgacactttctccttgctgctttttcttctgtatttctaggtacaaataccagaattatacttgaaaatacagttggtgcactggagaatctattatttaaaaccactctgttcaaaggggcaccagtttgtagtccctctgtttcgcacagagtactatgacaaggaaacatcagaattactaatctagctagtgtcatttattctggaatttttttctaagctgtgactaactctttttatctctcaatataatttttgagccagttaatttttttcagtattttgctgtcccttgggaatgggccctcagaggacagtgcttccaagtacatcttctcccagattctctggcctttttaatgagctattgttaaaccaacaggctagtttatcttacatcagacccttttctggtagagggaaaatgtttgtgctttccctttttcttctgttaatacttatggtaacacctaactgagcctcactcacattaaatgattcacttgaaatatatacagaaattgtaatttgcttttttttaaaaaagggggctaaagtaacactttcctacttatgtaaattatagatcctaaattcacgcaccccgtgggagctcaataaagatttactgaattga

SEQ ID NO: 419013 - DNA, 2184 bp, Homo sapiens
ccccgccttctcgctgcccagccccggggagggaggcggggccgcgaccccggcgcgggtggggcgaatgcgttcccagcgggtagcctggggctggtgcagagttccaagcccacggccccggtcgcggcctcgccgccctcccgcgccccgcgccgggagcgggcctagagcgctcgcctcgcccctccgcgagcagggctctggcgcccgcccctgtccgcaccgctggcagcctgaagagagtcgctggccgtggtcgccgctaggtaggatatatctgcatcttgaaaggaagataaaacaaaagccttctttggaatagatggatttttgtcactttctgtgtgaactaaagtgattcaatgtctcttttggattgcttctgcacttcaagaacacaagttgaatcactcagacctgaaaaacagtctgaaaccagtatccatcaatacttggttgatgagccaaccctttcctggtcacgtccatccactagagccagtgaagtactatgttccaccaacgtttctcactatgagctccaagtagaaataggaagaggatttgacaacttgacttctgtccatcttgcacggcatactcccacgggaacactggtaactataaaaattacaaatctggaaaactgcaatgaagaacgcctgaaagctttacaggttcagcaagtcaactcttgaggacctattttcctgaaggaatgagtgaaactttaataagaaacattctctttggagccgtgagagggttgaactatctgcaccaaaatggctgtattcacaggagtattaaagccagccatatcctcatttctggtgatggcctagtgaccctctctggcctgtcccatctgcatagtttggttaagcatggacagaggcatagggctgtgtatgatttcccacagttcagcacatcagtgcagccgtggctgagtccagaactactgagacaggatttacatgggtataatgtgaagtcagatatttacagtgttgggattacagcatgtgaattagccagtgggcaggtgcctttccaggacatgcatagaactcagatgctgttacagaaactgaaaggtcctccttatagcccattggatatcagtattttccctcaatcagaatccagaatgaaaaattcccagtcaggtgtagactctgggattggagaaagtgtgcttgtctccagtggaactcacacagtaaatagtgaccgattacacacaccatcctcaaaaactttctctcctgccttctttagcttggtacagctctgtttgcaacaagatcctgagaaaaggccatcagcaagcagtttattgtcccatgttttcttcaaacagatgaaagaagaaagccaggattcaatactttcactgttgcctcctgcttataacaagccatcaatatcattgcctccagtgttaccttggactgagccagaatgtgattttcctgatgaaaaagactcatactgggaattctagggctgccaaatcattttatgtcctatatacttgacactttctccttgctgctttttcttctgtatttctaggtacaaataccagaattatacttgaaaatacagttggtgcactggagaatctattatttaaaaccactctgttcaaaggggcaccagtttgtagtccctctgtttcgcacagagtactatgacaaggaaacatcagaattactaatctagctagtgtcatttattctggaatttttttctaagctgtgactaactctttttatctctcaatataatttttgagccagttaatttttttcagtattttgctgtcccttgggaatgggccctcagaggacagtgcttccaagtacatcttctcccagattctctggcctttttaatgagctattgttaaaccaacaggctagtttatcttacatcagacccttttctggtagagggaaaatgtttgtgctttccctttttcttctgttaatacttatggtaacacctaactgagcctcactcacattaaatgattcacttgaaatatatacagaaattgtaatttgcttttttttaaaaaagggggctaaagtaacactttcctacttatgtaaattatagatcctaaattcacgcaccccgtgggagctcaataaagatttactgaattga

SEQ ID NO: 419014 - DNA, 1371 bp, Homo sapiens
ttttttttctttaaatctggaaaagttgtgcctgagtgcatgagatagaatagagacaagttttctctttgtttattaactacagtgggtagcagaatcttggcaacccctgaatgatcaggaatctaatcggtaaaaaaatgtaactttggccccttgatctataaatgtgtctgaaagcattacaacaggactcacaaagctactaagtttgactttcgcagacaatatatctgtgactcccgcttgttttttacatttaccttcattccacagccctgagttactgggtgagtccaagacatctcctcaatataaagtagcacactgtgttactatatgttgcaaccgggagccagtacagactttattcacctcacagttgcaagtgttcaatgcagtcacaatgcccctcagcagtgctcatgcgctgcctgtttttaggaagtattcacgtctaagtggtgtgtatatcttataggaacacttagtatttttaaaacctgattaattaaaaaaaattagtttctaggcagtcccaaatatagtattaaaggccaactgcaaagaaggaacactaagtgttttttaaaccttattaacataaaaaacattagtttttaggcagtcctacattaggtattaaaggccaactgcaaagaacactgagcgaggctctgtagatggatgtaataaaaatctataaaacaatgtgtttaaacctaagaattctactgctttccaattccttccctctgctccttttcctaacctcctgcttctccagcccttccctctgtccctttcatccctcaggccctcctctccccttagtccccaccaccctgtcacttctaaattgtggctctagcattgtcccattacctgctacgtgactgttctctccacagtggtcctgctcctgtgagtcagagtgtgtcatttcctcacctaaaacactccagtggctccacctcggtcttgtgaagcttctagaatgtcaggcacgtgagcatatgagggcatacctggttcatcttaggcactaaatttttgttgactgaatgaatgaaatatgaatgtattaaattgcatcacagaaagttataaaatgtaaaacactgaaaaattaagaaatattttattttatgtaactagtgtgcatatcaattcattccgagtctgttgagcctgtgtatgaattttataagattgcataacaaattatcacaaacattgactttaaacaacacccaattattgttgatttatttgtttttagagacagagtctccctctgtcatccagggtgaagtgcagtcacatgatcatggctcactgcagcctcaaactcctgggctcaagggatct

SEQ ID NO: 419015 - DNA, 919 bp, Homo sapiens
tcttccccgcccgggcacgtaacagagctgggagcctggctgccaggggcgtgttatcgcgggggcagcctgggagcgctgctgcgccgcggcaggagaaacagccgaggacaccctggaagagcaggagcacgtgggcctgcgagaatggcgccaacaccagccctgcaaagccacattccaaagccgggccaaggacagccaccgttgccccgcaggcctcaaggatgacggtcaagccagccaaggccgcctccctagccaggaacctcgcaaagcgcaggcgcacctacctgggtggcgcggctgggcggagtcaagagccggaagtcccttgtgccgcagtccttcccgggaaacctggggaccggaactgcccggagttcccgcccccagacagaaccctgggttgctgggcaaccgatgcggcccccgcagctggtctctgtggtgctgggagcgagcccagtatagctcccacctcctgcgctggtaacctcccgtcccgcccgcctcccttgttgtcgcctctcctcgcgtcgcggaatccttgcccttggcactacttacatctctccgggtcccacaacaccttagcgcccacctgcttcaaagccaagctccaccgaaagcgaggcagtcagcccccggacatggcctcagcgctgactgatcgcacctctcgggccccgagcacctacacctacaccagccggccccgagcactgccctgccagcgcagccgttaccgggacagcctgacgcagccgtgagtgaccaagccagcccctgtgtggtccatacttgcaccccatccccaggccggggtctggccccttcgccctggcaaaaaagctgcttatgctgtcttcccttggctgcactctgccgaaataaaagttctgccctaaagaatctc

SEQ ID NO: 419016 - DNA, 2244 bp, Homo sapiens
tcttccccgcccgggcacgtaacagagctgggagcctggctgccaggggcgtgttatcgcgggggcagcctgggagcgctgctgcgccgcggcaggagaaacagccgaggacaccctggaagagcaggagcacgtgggcctgcgagaatggcgccaacaccagccctgcaaagccacattccaaagccgggccaaggacagccaccgttgccccgcaggcctcaaggatgacggtcaagccagccaaggccgcctccctagccaggaacctcgcaaagcgcaggcgcacctacctgggtggcgcggctgggcggagtcaagagccggaagtcccttgtgccgcagtccttcccgggaaacctggggaccggaactgcccggagttcccgcccccagacagaaccctgggttgctgggcaaccgatgcggcccccgcagctggtctctgtggtgctgggagcgagcccagtatagctcccacctcctgcgctggtaacctcccgtcccgcccgcctcccttgttgtcgcctctcctcgcgtcgcggaatccttgcccttggcactacttacatctctccgggtcccacaacaccttagcgcccacctgcttcaaagccaagctccaccgaaagcgaggcagtcagcccccggacatggcctcagcgctgactgatcgcacctctcgggccccgagcacctacacctacaccagccggccccgagcactgccctgccagcgcagccgttaccgggacagcctgacgcagccagatgaagaacctatgcattatggaaacataatgtatgacagaagggtaattcgaggtaacacttatgcactccagacagggccactgctcggacggcctgattctctagagctccagagacaacgggaggctaggaagagggctcttgccagaaaacaagcccaagagcagctcagaccacaaacacctgaacctgtggaaggcagaaagcatgtcgatgtgcaaacagaattataccttgaagaaattgctgatcgcataatagaagttgatatggaatgccaaacagatgcatttttggacagaccaccaacaccactctttattcctgccaaaactggcaaagatgtggccacccaaatactagaaggagagctctttgactttgatcttgaagttaaaccagtgttagaagttttggtggggaagacaattgagcagtctcttctggaagtaatggaagaagaagagctggctaacctgcgggccagtcagcgtgagtatgaagaactacggaatagtgaacgtgctgaagttcaacgacttgaagagcaagagaggcgacaccgagaagaaaaagtatatataattatattttctttcttaggcagtcttttggctagttagcatattatgttcaaaattacatgtgatgatatatcataaaactaaagatctttgggaatatattagaaaaagatctatagtatttttgctcaagtctctcctatagatcatagatctttcatggacggaattacatcttttaaactccagcttacataaatatacctaaattgagtttccaaaagtttctaaatgaagtgaaagttcctaagttacatgtgtgccagttggaagactctcttaaatatcaggagtcctaaagaaagaaagatgtatgttggtttgccataagtcagtggcagaaagatggaaggaaggaaaaagtgaatgtattggagagagactgtgggtaaaaagcaggggatctggatagaattctgattctttttctcggtgaccaggcccttctttatacccttggtgacacaccagacctatttgggttctcgtagaatatttttcagattctagatttttagaatcttcaataaggaaaggtttacaatccagtttttttacatgtgccagtagcctacagttaggaagcactagaaaagatagtctttctggttctggcaataactgtcagcctttgttgtatactgatgaacaaattataaagtcatatcttaatacctgaaacagttaagaaaaaattcccaaggggcctaacttactatgctgtgaaaagtagcataattgttgggaaatcctactcaatacctatcaaatggactttaattctaagatgaatacttagttgtgtaaagagcatagggcttacaataaggattgtgcaaatttatagatataaaaaaactgtggcaaaataaactttgttgaaatg

SEQ ID NO: 419017 - DNA, 2624 bp, Homo sapiens
tcttccccgcccgggcacgtaacagagctgggagcctggctgccaggggcgtgttatcgcgggggcagcctgggagcgctgctgcgccgcggcaggagaaacagccgaggacaccctggaagagcaggagcacgtgggcctgcgagaatggcgccaacaccagccctgcaaagccacattccaaagccgggccaaggacagccaccgttgccccgcaggcctcaaggatgacggtcaagccagccaaggccgcctccctagccaggaacctcgcaaagcgcaggcgcacctacctgggtggcgcggctgggcggagtcaagagccggaagtcccttgtgccgcagtccttcccgggaaacctggggaccggaactgcccggagttcccgcccccagacagaaccctgggttgctgggcaaccgatgcggcccccgcagctggtctctgtggtgctgggagcgagcccagtatagctcccacctcctgcgctggtaacctcccgtcccgcccgcctcccttgttgtcgcctctcctcgcgtcgcggaatccttgcccttggcactacttacatctctccgggtcccacaacaccttagcgcccacctgcttcaaagccaagctccaccgaaagcgaggcagtcagcccccggacatggcctcagcgctgactgatcgcacctctcgggccccgagcacctacacctacaccagccggccccgagcactgccctgccagcgcagccgttaccgggacagcctgacgcagccagatgaagaacctatgcattatggaaacataatgtatgacagaagggtaattcgaggtaacacttatgcactccagacagggccactgctcggacggcctgattctctagagctccagagacaacgggaggctaggaagagggctcttgccagaaaacaagcccaagagcagctcagaccacaaacacctgaacctgtggaaggcagaaagcatgtcgatgtgcaaacagaattataccttgaagaaattgctgatcgcataatagaagttgatatggaatgccaaacagatgcatttttggacagaccaccaacaccactctttattcctgccaaaactggcaaagatgtggccacccaaatactagaaggagagctctttgactttgatcttgaagttaaaccagtgttagaagttttggtggggaagacaattgagcagtctcttctggaagtaatggaagaagaagagctggctaacctgcgggccagtcagcgtgagtatgaagaactacggaatagtgaacgtgctgaagttcaacgacttgaagagcaagagaggcgacaccgagaagaaaaagaacggcgtaagaaacagcagtgggaaataatgcacaagcacaacgagacatcacaaaaaatcgccgcccgagcatttgcacagcgttacctggctgaccttctcccgtctgtttttggcagcctcagggatagtggctacttttatgatcccattgaaagagatattgagataggatttcttccatggctaatgaatgaagttgaaaaaaccatggaatatagcatggtgggaagaacagtgcttgacatgttgatccgtgaggtggttgaaaagaggctgtgtatgtatgagcatggggaagacacacatcagtctccagaacccgaggatgagcctggtggtcctggagcaatgacagagtcactggaggcctctgaattcctggagcagagcatgtcacagacacgggagctgcttttagatggaggctacctacaaagaacaacatatgacagaaggtcatcccaggaaaggaagtttatggaagagagagaactcttagggcaagatgaagaaacagcaatgaggaagtccttaggggaggaagaattgtcataggagggaagcttcaaagtcatgaaaccaatcaacagccaagtcagcaagcaatcaggtaatgatgtgcgagtcccctcaggttatagaaattatgttgtatttagtcagtatgtctttttgtgtaatggactgggccaatcaaatgtgataaaattaatttgagaatgaaacttaaattgaattcatttatttaatagaatattcaaaggctatattgtaattctaatgagaattatatttaattactagctttctattaccattatatgtaaccagcaaatatatttttccttagcccttctaattttgcgggttagttttttttagtaagtatgatatttaatgttcaatatcagtgctgtcagccatatagcttttcttctctataggaaaactatttcacctactgtaagagtgaatgcctagccaggcgtggtggctcacacctgtaatcccagcactttgggaggctgaggctggcagatcccctgaggtcgggagtttgagaccagccagaccaacaaggagaaaccccatctctgctaaaaatacaaaattagccaggcatggtggcgcatgcctgtaatcctagctacttgggaggctgaggcaggagaatcacttgaacctggggcggaggttgcggtgagccaagtttgcaccattgcactccagcctgggcaacaagagcaaaactccgtctcaaaaaaaaaa

SEQ ID NO: 419018 - DNA, 1992 bp, Homo sapiens
taggatcccgtgtgacgtggagtgtcgtggtcgcatcgatgcatggtcgctctgtcgttttcagagtcgtgactctaaacccggccccgagcactgccctgccagcgcagccgttaccgggacagcctgacgcagccagatgaagaacctatgcattatggaaacataatgtatgacagaagggtaattcgaggtaacacttatgcactccagacagggccactgctcggacggcctgattctctagagctccagagacaacgggaggctaggaagagggctcttgccagaaaacaagcccaagagcagctcagaccacaaacacctgaacctgtggaaggcagaaagcatgtcgatgtgcaaacagaattataccttgaagaaattgctgatcgcataatagaagttgatatggaatgccaaacagatgcatttttggacagaccaccaacaccactctttattcctgccaaaactggcaaagatgtggccacccaaatactagaaggagagctctttgactttgatcttgaagttaaaccagtgttagaagttttggtggggaagacaattgagcagtctcttctggaagtaatggaagaagaagagctggctaacctgcgggccagtcagcgtgagtatgaagaactacggaatagtgaacgtgctgaagttcaacgacttgaagagcaagagaggcgacaccgagaagaaaaagaacggcgtaagaaacagcagtgggaaataatgcacaagcacaacgagacatcacaaaaaatcgccgcccgagcatttgcacagcgttacctggctgaccttctcccgtctgtttttggcagcctcagggatagtggctacttttatgatcccattgaaagagatattgagataggatttcttccatggctaatgaatgaagttgaaaaaaccatggaatatagcatggtgggaagaacagtgcttgacatgttgatccgtgaggtggttgaaaagaggctgtgtatgtatgagcatggggaagacacacatcagtctccagaacccgaggatgagcctggtggtcctggagcaatgacagagtcactggaggcctctgaattcctggagcagagcatgtcacagacacgggagctgcttttagatggaggctacctacaaagaacaacatatgacagaaggtcatcccaggaaaggaagtttatggaagagagagaactcttagggcaagatgaagaaacagcaatgaggaagtccttaggggaggaagaattgtcataggagggaagcttcaaagtcatgaaaccaatcaacagccaagtcagcaagcaatcaggtaatgatgtgcgagtcccctcaggttatagaaattatgttgtatttagtcagtatgtctttttgtgtaatggactgggccaatcaaatgtgataaaattaatttgagaatgaaacttaaattgaattcatttatttaatagaatattcaaaggctatattgtaattctaatgagaattatatttaattactagctttctattaccattatatgtaaccagcaaatatatttttccttagcccttctaattttgcgggttagttttttttagtaagtatgatatttaatgttcaatatcagtgctgtcagccatatagcttttcttctctataggaaaactatttcacctactgtaagagtgaatgcctagccaggcgtggtggctcacacctgtaatcccagcactttgggaggctgaggctggcagatcccctgaggtcgggagtttgagaccagccagaccaacaaggagaaaccccatctctgctaaaaatacaaaattagccaggcatggtggcgcatgcctgtaatcctagctacttgggaggctgaggcaggagaatcacttgaacctggggcggaggttgcggtgagccaagtttgcaccattgcactccagcctgggcaacaagagcaaaactccgtctcaaaaaaaaaa

SEQ ID NO: 419019 - DNA, 1934 bp, Homo sapiens
ccagattctaaatatcaggaaagacgctgtgggaaaatagcaggccaaaagttcttagtaaactgcagccagggagactcagactagaatggaggtagaaagaactgatgcagagtgggtttaattctaagcctttttgtggctaagttttgttgttgttaacttattgaatttagagttgtattgcactggtcatgtgaaagccagagcagcaccagtgtcaaaatagtgacagagagttttgaataccatagttagtatatatgtactcagagtatttttattaaagaaggcaaagagcccggcatagatcttatcttcatcttcactcggttgcaaaatcaatagttaagaaatagcatctaagggaacttttaggtgggaaaaaaaatctagagatggctctaaatgactgtttccttctgaacttggaggtggaccatttcatgcactgcaacatctccagtcacagtgcggatctccccgtgaacgatgactggtcccacccggggatcctctatgtcatccctgcagtttatggggttatcattctgataggcctcattggcaacatcactttgatcaagatcttctgtacagtcaagtccatgcgaaacgttccaaacctgttcatttccagtctggctttgggagacctgctcctcctaataacgtgtgctccagtggatgccagcaggtacctggctgacagatggctatttggcaggattggctgcaaactgatcccctttatacagcttacctctgttggggtgtctgtcttcacactcacggcgctctcggcagacagatacaaagccattgtccggccaatggatatccaggcctcccatgccctgatgaagatctgcctcaaagccgcctttatctggatcatctccatgctgctggccattccagaggccgtgttttctgacctccatcccttccatgaggaaagcaccaaccagaccttcattagctgtgccccatacccacactctaatgagcttcaccccaaaatccattctatggcttcctttctggtcttctacgtcatcccactgtcgatcatctctgtttactactacttcattgctaaaaatctgatccagagtgcttacaatcttcccgtggaagggaatatacatgtcaagaagcagattgaatcccggaagcgacttgccaagacagtgctggtgtttgtgggcctgttcgccttctgctggctccccaatcatgtcatctacctgtaccgctcctaccactactctgaggtggacacctccatgctccactttgtcaccagcatctgtgcccgcctcctggccttcaccaactcctgcgtgaacccctttgccctctacctgctgagcaagagtttcaggaaacagttcaacactcagctgctctgttgccagcctggcctgatcatccggtctcacagcactggaaggagtacaacctgcatgacctccctcaagagtaccaacccctccgtggccacctttagcctcatcaatggaaacatctgtcacgagcggtatgtctagattgacccttgattttgccccctgagggacggttttgctttatggctagacaggaacccttgcatccattgttgtgtctgtgccctccaaagagccttcagaatgctcctgagtggtgtaggtgggggtggggaggcccaaatgatggatcaccattatattttgaaagaagccatcaagtcttaagtttttcatttcaacttgtgaacgtttcttctgatgtgaagcaaaccttcccttttcagaaaagggaacaagtagaaaattattttttaagcctcaagccctgttaaatggtcgtggccaattatgtcatagaaactgtatgaacaaccagatttacatagcagagaaatcatacattgaatgcttactttgtga

SEQ ID NO: 419020 - DNA, 2320 bp, Homo sapiens
atccctccctggccggcgccgagccagagcgcagcggcctccaccgcctccccaggcgcgcacacacccgcacacgcgcacgcacgctcaccgtcctctgccaccactctctgctcccgccactcgccgcgcccgcgagccccgcagcaaagcacaggtggcagcggctgcaggggcgcatcgccggcgtgcgccctcctgcagccctgggcgcatcgctctctcggggaagccaccctcggagcccccggagctccccgccaagcgccatccccgcgggcggaggggagcgcgggtcgcgcgccgtggagagccgggacgcggattagcgcccgcaggagcctcctgcgcccgttgaggcgctaaagggcttaccccggaggcgggtggaagggcgggcagaggctcctcttaaataccgctcccggccgcacttcgcgctcaccccggcgtccgctttctccctcgcccacagctgccggatagtgctgaagaggagggggcgttccccagaccatggcatctacggaaggtgccaacaatatgcccaagcaggtggaagtgcgaatgcacgacagtcatcttggctcagaggaacccaagcaccggcacctgggcctgcgcctgtgtgacaagctggggaagaatctgctgctcaccctgacggtgtttggtgtcatcctgggagcagtgtgtggagggcttcttcgcttggcatctcccatccaccctgatgtggttatgttaatagccttcccaggggatatactcatgaggatgctaaaaatgctcattctccctctaatcatctccagcttaatcacagggttgtcaggcctggatgctaaggctagtggccgcttgggcacgagagccatggtgtattacatgtccacgaccatcattgctgcagtactgggggtcattctggtcttggctatccatccaggcaatcccaagctcaagaagcagctggggcctgggaagaagaatgatgaagtgtccagcctggatgccttcctggaccttattcgaaatctcttccctgaaaaccttgtccaagcctgctttcaacagattcaaacagtgacgaagaaagtcctggttgcaccaccgccggacgaggaggccaacgcaaccagcgctgttgtctctctgttgaacgagactgtgactgaggtgccggaggagactaagatggttatcaagaagggcctggagttcaaggatgggatgaacgtcttaggtctgatagggtttttcattgcttttggcatcgctatggggaagatgggagatcaggccaagctgatggtggatttcttcaacattttgaatgagattgtaatgaagttagtgatcatgatcatgtggtactctcccctgggtatcgcctgcctgatctgtggaaagatcattgcaatcaaggacttagaagtggttgctaggcaactggggatgtacatggtaacagtgatcataggcctcatcatccacgggggcatctttctccccttgatttactttgtagtgaccaggaaaaaccccttctccttttttgctggcattttccaagcttggatcactgccctgggcaccgcttccagtgctggaactttgcctgtcacctttcgttgcctggaagaaaatctggggattgataagcgtgtgactagattcgtccttcctgttggagcaaccattaacatggatggtacagccctttatgaagcggtagccgccatctttatagcccaaatgaatggtgttgtcctggatggaggacagattgtgactgtaagcctcacagccaccctggcaagcgtcggcgcggccagtatccccagtgccgggctggtcaccatgctcctcattctgacagccgtgggcctgccaacagaggacatcagcctgctggtggctgtggactggctgctggacaggatgagaacttcagtcaatgttgtgggtgactcttttggggctgggatagtctatcacctctccaagtctgagctggataccattgactcccagcatcgagtgcatgaagatattgaaatgaccaagactcaatccatttatgatgacatgaagaaccacagggaaagcaactctaatcaatgtgtctatgctgcacacaactctgtcatagtagatgaatgcaaggtaactctggcagccaatggaaagtcagccgactgcagtgttgaggaagaaccttggaaacgtgagaaataaggatatgagtctcagcaaattcttgaataaactccccagcgtatcctatggtaactgatgatataaacaagctttcttt

SEQ ID NO: 419021 - DNA, 142 bp, Homo sapiens
  misc_feature (5)..(5): n is a, c, g, or t
  misc_feature (134)..(134): n is a, c, g, or t
  misc_feature (137)..(137): n is a, c, g, or t
  misc_feature (140)..(141): n is a, c, g, or t
cagcngccgactccgctggacctgggacccccagacgtgggaggatggggtgggtgtgcctgcactggttgacggtcaggtgggctgattggttctccctgctacagtggtagaattcagcgctgtacctaggnaanaanng

SEQ ID NO: 419022 - DNA, 3079 bp, Homo sapiens
atccctccctggccggcgccgagccagagcgcagcggcctccaccgcctccccaggcgcgcacacacccgcacacgcgcacgcacgctcaccgtcctctgccaccactctctgctcccgccactcgccgcgcccgcgagccccgcagcaaagcacaggtggcagcggctgcaggggcgcatcgccggcgtgcgccctcctgcagccctgggcgcatcgctctctcggggaagccaccctcggagcccccggagctccccgccaagcgccatccccgcgggcggaggggagcgcgggtcgcgcgccgtggagagccgggacgcggattagcgcccgcaggagcctcctgcgcccgttgaggcgctaaagggcttaccccggaggcgggtggaagggcgggcagaggctcctcttaaataccgctcccggccgcacttcgcgctcaccccggcgtccgctttctccctcgcccacagctgccggatagtgctgaagaggagggggcgttccccagaccatggcatctacggaaggtgccaacaatatgcccaagcaggtggaagtgcgaatgcacgacagtcatcttggctcagaggaacccaagcaccggcacctgggcctgcgcctgtgtgacaagctggggaagaatctgctgctcaccctgacggtgtttggtgtcatcctgggagcagtgtgtggagggcttcttcgcttggcatctcccatccaccctgatgtggttatgttaatagccttcccaggggatatactcatgaggatgctaaaaatgctcattctccctctaatcatctccagcttaatcacagggttgtcaggcctggatgctaaggctagtggccgcttgggcacgagagccatggtgtattacatgtccacgaccatcattgctgcagtactgggggtcattctggtcttggctatccatccaggcaatcccaagctcaagaagcagctggggcctgggaagaagaatgatgaagtgtccagcctggatgccttcctggaccttattcgaaatctcttccctgaaaaccttgtccaagcctgctttcaacagattcaaacagtgacgaagaaagtcctggttgcaccaccgccggacgaggaggccaacgcaaccagcgctgttgtctctctgttgaacgagactgtgactgaggtgccggaggagactaagatggttatcaagaagggcctggagttcaaggatgggatgaacgtcttaggtctgatagggtttttcattgcttttggcatcgctatggggaagatgggagatcaggccaagctgatggtggatttcttcaacattttgaatgagattgtaatgaagttagtgatcatgatcatgtggtactctcccctgggtatcgcctgcctgatctgtggaaagatcattgcaatcaaggacttagaagtggttgctaggcaactggggatgtacatggtaacagtgatcataggcctcatcatccacgggggcatctttctccccttgatttactttgtagtgaccaggaaaaaccccttctccttttttgctggcattttccaagcttggatcactgccctgggcaccgcttccagtgctggaactttgcctgtcacctttcgttgcctggaagaaaatctggggattgataagcgtgtgactagattcgtccttcctgttggagcaaccattaacatggatggtacagccctttatgaagcggtagccgccatctttatagcccaaatgaatggtgttgtcctggatggaggacagattgtgactgtaagcctcacagccaccctggcaagcgtcggcgcggccagtatccccagtgccgggctggtcaccatgctcctcattctgacagccgtgggcctgccaacagaggacatcagcctgctggtggctgtggactggctgctggacaggatgagaacttcagtcaatgttgtgggtgactcttttggggctgggatagtctatcacctctccaagtctgagctggataccattgactcccagcatcgagtgcatgaagatattgaaatgaccaagactcaatccatttatgatgacatgaagaaccacagggaaagcaactctaatcaatgtgtctatgctgcacacaactctgtcatagtagatgaatgcaaggtaactctggcagccaatggaaagtcagccgactgcagtgttgaggaagaaccttggaaacgtgagaaataaggatatgagtctcagcaaattcttgaataaactccccagcgtatcctatggtaactgatgatataaacaagctttctttaaaaaggaaaaaaatgcgtatatttctatgtttacttaatctgttagccgaggcttagaggagctcttgtgagtcagtgatgacaggcacggtgctgtgtctttgccaaataatgctttataaccgtctaattttctcacttgtattattatttgaatggatgctgctggaggaatcagttggaattgaagacacgttcttgccagcttcccttttctcccaagatgcagaaatgtggatgctcttttcccaggggacatgagtaaagcagtgtggtacactccagggacttgggaaaatgagcaaacacacagcgtgttattccttaaagtgttctccatgtctcgccttgttatgcacaagagattctattaaaagcctctagaagtaactccccttaaaatgtctagtaaagcttgcacatggattgattaaaagcaaatacctgtcttagggaattctgacaatttatcttccatatgctctttaagtaaaatgtttcaaagacagttttaaagggagccatgctcttaaaggcagttgattaaagaacctgttacatctctgccttaccctgtgtaatctgtgagaacaatggttgaaatttcaaagtatgtttcattattctttctaaatttgataattgattaggaagtattttatatataaccactgtagatattgacaaaagtaagagagcacagtcaacataaagtttaaccagagttaaatattcaaatttatttatgttcggtttgc

SEQ ID NO: 419023 - DNA, 1969 bp, Homo sapiens
  misc_feature (5)..(5): n is a, c, g, or t
cagcngccgactccgctggacctgggacccccagacgtgggaggatggggtgggtgtgcctgcggtgacctagtgtcttccagtagggcaatctctggacatctttatctccccagtacctctccagatcctgaagcctggggccagggaggagaggttagatgtcagcagtggaaggacagtgccaacaatatgcccaagcaggtggaagtgcgaatgcacgacagtcatcttggctcagaggaacccaagcaccggcacctgggcctgcgcctgtgtgacaagctggggaagaatctgctgctcaccctgacggtgtttggtgtcatcctgggagcagtgtgtggagggcttcttcgcttggcatctcccatccaccctgatgtggttatgttaatagccttcccaggggatatactcatgaggatgctaaaaatgctcattctccctctaatcatctccagcttaatcacagggttgtcaggcctggatgctaaggctagtggccgcttgggcacgagagccatggtgtattacatgtccacgaccatcattgctgcagtactgggggtcattctggtcttggctatccatccaggcaatcccaagctcaagaagcagctggggcctgggaagaagaatgatgaagtgtccagcctggatgccttcctggaccttattcgaaatctcttccctgaaaaccttgtccaagcctgctttcaacagattcaaacagtgacgaagaaagtcctggttgcaccaccgccggacgaggaggccaacgcaaccagcgctgttgtctctctgttgaacgagactgtgactgaggtgccggaggagactaagatggttatcaagaagggcctggagttcaaggatgggatgaacgtcttaggtctgatagggtttttcattgcttttggcatcgctatggggaagatgggagatcaggccaagctgatggtggatttcttcaacattttgaatgagattgtaatgaagttagtgatcatgatcatgtggtactctcccctgggtatcgcctgcctgatctgtggaaagatcattgcaatcaaggacttagaagtggttgctaggcaactggggatgtacatggtaacagtgatcataggcctcatcatccacgggggcatctttctccccttgatttactttgtagtgaccaggaaaaaccccttctccttttttgctggcattttccaagcttggatcactgccctgggcaccgcttccagtgctggaactttgcctgtcacctttcgttgcctggaagaaaatctggggattgataagcgtgtgactagattcgtccttcctgttggagcaaccattaacatggatggtacagccctttatgaagcggtagccgccatctttatagcccaaatgaatggtgttgtcctggatggaggacagattgtgactgtaagcctcacagccaccctggcaagcgtcggcgcggccagtatccccagtgccgggctggtcaccatgctcctcattctgacagccgtgggcctgccaacagaggacatcagcctgctggtggctgtggactggctgctggacaggatgagaacttcagtcaatgttgtgggtgactcttttggggctgggatagtctatcacctctccaagtctgagctggataccattgactcccagcatcgagtgcatgaagatattgaaatgaccaagactcaatccatttatgatgacatgaagaaccacagggaaagcaactctaatcaatgtgtctatgctgcacacaactctgtcatagtagatgaatgcaaggtaactctggcagccaatggaaagtcagccgactgcagtgttgaggaagaaccttggaaacgtgagaaataaggatatgagtctcagcaaattcttgaataaactccccagcgtatcctatggtaactgatgatataaacaagctttcttt

SEQ ID NO: 419024 - DNA, 2214 bp, Homo sapiens
atccctccctggccggcgccgagccagagcgcagcggcctccaccgcctccccaggcgcgcacacacccgcacacgcgcacgcacgctcaccgtcctctgccaccactctctgctcccgccactcgccgcgcccgcgagccccgcagcaaagcacaggtggcagcggctgcaggggcgcatcgccggcgtgcgccctcctgcagccctgggcgcatcgctctctcggggaagccaccctcggagcccccggagctccccgccaagcgccatccccgcgggcggaggggagcgcgggtcgcgcgccgtggagagccgggacgcggattagcgcccgcaggagcctcctgcgcccgttgaggcgctaaagggcttaccccggaggcgggtggaagggcgggcagaggctcctcttaaataccgctcccggccgcacttcgcgctcaccccggcgtccgctttctccctcgcccacagctgccggatagtgctgaagaggagggggcgttccccagaccatggcatctacggaaggtgccaacaatatgcccaagcaggtggaagtgcgaatgcacgacagtcatcttggctcagaggaacccaagcaccggcacctgggcctgcgcctgtgtgacaagctggggaagaatctgctgctcaccctgacggtgtttggtgtcatcctgggagcagtgtgtggagggcttcttcgcttggcatctcccatccaccctgatgtggttatgttaatagccttcccaggggatatactcatgaggatgctaaaaatgctcattctccctctaatcatctccagcttaatcacagggttgtcaggcctggatgctaaggctagtggccgcttgggcacgagagccatggtgtattacatgtccacgaccatcattgctgcagtactgggggtcattctggtcttggctatccatccaggcaatcccaagctcaagaagcagctggggcctgggaagaagaatgatgaagtgtccagcctggatgccttcctggaccttattcgaaatctcttccctgaaaaccttgtccaagcctgctttcaacagattcaaacagtgacgaagaaagtcctggttgcaccaccgccggacgaggaggccaacgcaaccagcgctgttgtctctctgttgaacgagactgtgactgaggtgccggaggagactaagatggttatcaagaagggcctggagttcaaggatgggatgaacgtcttaggtctgatagggtttttcattgcttttggcatcgctatggggaagatgggagatcaggccaagctgatggtggatttcttcaacattttgaatgagattgtaatgaagttagtgatcatgatcatgtggtactctcccctgggtatcgcctgcctgatctgtggaaagatcattgcaatcaaggacttagaagtggttgctaggcaactggggatgtacatggtaacagtgatcataggcctcatcatccacgggggcatctttctccccttgatttactttgtagtgaccaggaaaaaccccttctccttttttgctggcattttccaagcttggatcactgccctgggcaccgcttccagtgctggaactttgcctgtcacctttcgttgcctggaagaaaatctggggattgataagcgtgtgactagattcgtccttcctgttggagcaaccattaacatggatggtacagccctttatgaagcggtagccgccatctttatagcccaaatgaatggtgttgtcctggatggaggacagattgtgactgtaagcctcacagccaccctggcaagcgtcggcgcggccagtatccccagtgccgggctggtcaccatgctcctcattctgacagccgtgggcctgccaacagaggacatcagcctgctggtggctgtggactggctgctggacaggatgagaacttcagtcaatgttgtgggtgactcttttggggctgggatagtctatcacctctccaagtctgagctggataccattgactcccagcatcgagtgcatgaagatattgaaatgaccaagactcaatccatttatgatgacatgaagaaccacagggaaagcaactctaatcaatgtgtctatgctgcacacaactctgtcatagtagatgaatgcaaggtacatttcccattcatggatatcgagacttgtatatagtagtgc

SEQ ID NO: 419025 - DNA, 1848 bp, Homo sapiens
tgtgattctttcggactggtagattatcatggagtatctttttgttgtctggtagtagtaggtaatagtttacttaggatttcccagtatttacttctgtgcttttatgtggcttcctgatgtgttaattacccctcacctatagcaaaagctgtacctccggccgggtgcagtggctcacgcctgtaatcccagcactttgggaggccgaggtgggcagatcacgaggtcaggagatcgagaccatcctggctaacacagtgaaaccccgtctctactaaaaatacaaaaaattagcccggcatggtggcgggcgcctgtagtcccaactactcaggaggctgaggcaggagaatggtgtgaacccgggaggtggagcttgcagtgagccgagatcgcgccactgcactccagcctgggcgacagagcgagactccgtctcaaaaaaaaaaaaaaaaaagctctacctcctgcttgactggcaacacaggatgtcttgtgcagcaagtataaaggacaaaaacacaaacatataacacttcccagtggggcttccatcagtccccaaccggacagtgccccctagaccatagaccccacagagcataacactgaagcacaggatcccagatacggctctcccaaactttgttttgtttagtttaacatcgccaactcactgttttgtcttagaaacatgaaatcaaacagaatgagaatataattttttttggagttggagcaaatctagataagggtcacaattgccccaagacttgcccaatttgagctcatgctacacaattaaatatattccttaaatattgtgtgcttgcaacttttgattttgtaaatgggttcccacaggacaaaaatgagtcttaaacataaaattaaaccatatgaatgttagttttttagttaatttcagctgggtggtagtctatagtcccagctactcgagaggctgaggcagaaggatcgcttgagcccaggagttcagggctgcagtgagctgtgatcacaccactgcactccagcctgggggaagagcaagaccctacaaacaaaaaagagttaattccattatatttatttttacatacccagagtttgactaaaatataccagacaatctcctgtccccaaatccatgtccaagcaaggggagccacgttttctaagctcacagtttaaaggttaaagagacacactgaggaaaactcagggaaagaagctgatttgcatggacactaggcctgtcgttgattccctcatttcaaaagttgcatgtgccatgggaggcggagtctctgaggacatcctggctgtgcctcggtggctctggactccagctctacgcagagcgccttaacactgtactggaagaaatgggaaatcgcattgaggacttacagaagaatgtcaatgacttaatggtgcaagctggcattgaaaattctattaaagaacaaatgctgaagacctaactgcagcatgtctgtatttggagatggggcctctacagaagtcattaaggttacatcggtcctgagggtggggccctcatccaacaggattcgtctttctgagaagagacgcaaggggctcgcctgctctccccccgtgcctgcaccagagaaggaggccatcggcaagccaaggagagccctccccagaaatcacacggaccagcaccttgatctgggacttccagaaaacagaactgtgaaaagacaagtttctgttgtttaaaccacccaatctgaagtattttgttatggcagtcctgggcagactaatacaatatgcaacacatttacaataaatatacaataaacttacaaa

SEQ ID NO: 419026 - DNA, 775 bp, Homo sapiens
aggaaagagacataaaccaattgtttttcagaccacaaggctttgtgccaagtgccatgtgtgtcaagtcaggaatccctcctcctggagccaagaggaagtcgggaatcgcggagcttagctgtcgccacctcgcgccgggtccgcgcggcccacgggaccccccactgacgcccccggccagcggtccacatggacgtgcggggccctgaagcccccggcgggcgcgcgctgcgggacgcggcagaaaatctatttcaggaacttcaggaacattttcaagctctgacggcaacattaaacctcagaatggaagaaatgggaaatcgcattgaggacttacagaagaatgtcaatgacttaatggtgcaagctggcattgaaaattctattaaagaacaaatgctgaagacctaactgcagcatgtctgtatttggagatggggcctctacagaagtcattaaggttacatcggtcctgagggtggggccctcatccaacaggattcgtctttctgagaagagacgcaaggggctcgcctgctctccccccgtgcctgcaccagagaaggaggccatcggcaagccaaggagagccctccccagaaatcacacggaccagcaccttgatctgggacttccagaaaacagaactgtgaaaagacaagtttctgttgtttaaaccacccaatctgaagtattttgttatggcagtcctgggcagactaatacaatatgcaacacatttacaataaatatacaataaacttacaaa

SEQ ID NO: 419027 - DNA, 667 bp, Homo sapiens
ctctgttgctggctgtaacctggggaaatctaagctttagttttcttctctgccaaatatctacctggtaagtggttgtaaggatttaagaaaattgcttgcaaagcacttaagtcagggcaaggtagacagcaggtacataatgagataaacttgaaatacagagtccaaatcattatgatttcaactgtactgcagccacaaagcaccagtgagaacgttattaaaatcaggggtgaacatacttaatacacctgataggagttacggcctgaacgtttatgtctccctaaatagctgaagacctaactgcagcatgtctgtatttggagatggggcctctacagaagtcattaaggttacatcggtcctgagggtggggccctcatccaacaggattcgtctttctgagaagagacgcaaggggctcgcctgctctccccccgtgcctgcaccagagaaggaggccatcggcaagccaaggagagccctccccagaaatcacacggaccagcaccttgatctgggacttccagaaaacagaactgtgaaaagacaagtttctgttgtttaaaccacccaatctgaagtattttgttatggcagtcctgggcagactaatacaatatgcaacacatttacaataaatatacaataaacttacaaa

SEQ ID NO: 419028 - DNA, 527 bp, Homo sapiens
tatttcaggaacttcaggaacattttcaagctctgacggcaacattaaacctcagaaatatccttttctacctttaacaaatgctgtgattctttcggactggtagattatcatggagtatctttttgttgtctggtagtagtaggtaatagtttacttaggatttcccagtatttacttctgtgcttttatgtggcttcctgatgtgttaattacccctcacctatagcaaaagctgtacctccggccgggtgcagtggctcacgcctgtaatcccagcactttgggaggccgaggtgggcagatcacgaggtcaggagatcgagaccatcctggctaacacagtgaaaccccgtctctactaaaaatacaaaaaattagcccggcatggtggcgggcgcctgtagtcccaactactcaggaggctgaggcaggagaatggtgtgaacccgggaggtggagcttgcagtgagccgagatcgcgccactgcactccagcctgggcgacagagcgagactccgtctca

SEQ ID NO: 419029 - DNA, 475 bp, Homo sapiens
ccaacagtaaatatttattcaattgtcttacggtttattttttcaggcagaaaatctatttcaggaacttcaggaacattttcaagctctgacggcaacattaaacctcagaaatatccttttctacctttaacaaatgctgtgattctttcggactggtagattatcatggagtatctttttgttgtctggtagtagtaggtaatagtttacttaggatttcccagtatttacttctgtgcttttatgtggcttcctgatgtgttaattacccctcacctatagcaaaagctgtacctccggccgggtgcagtggctcacgcctgtaatcccagcactttgggaggccgaggtgggcagatcacgaggtcaggagatcgagaccatcctggctaacacagtgaaaccccgtctctactaaaaatacaaaaaattagcccggcatggtggcgggcgcctgtagtcccaactactc

SEQ ID NO: 419030 - DNA, 722 bp, Homo sapiens
aggaaagagacataaaccaattgtttttcagaccacaaggctttgtgccaagtgccatgtgtgtcaagtcaggaatccctcctcctggagccaagaggaagtcgggaatcgcggagcttagctgtcgccacctcgcgccgggtccgcgcggcccacgggaccccccactgacgcccccggccagcggtccacatggacgtgcggggccctgaagcccccggcgggcgcgcgctgcgggacgcggcagaaaatctatttcaggaacttcaggaacattttcaagctctgacggcaacattaaacctcagaatggaagaaatgggaaatcgcattgaggacttacagaagaatgtcaatgacttaatggtgcaagctggcattgtggagatggggcctctacagaagtcattaaggttacatcggtcctgagggtggggccctcatccaacaggattcgtctttctgagaagagacgcaaggggctcgcctgctctccccccgtgcctgcaccagagaaggaggccatcggcaagccaaggagagccctccccagaaatcacacggaccagcaccttgatctgggacttccagaaaacagaactgtgaaaagacaagtttctgttgtttaaaccacccaatctgaagtattttgttatggcagtcctgggcagactaatacaatatgcaacacatttacaataaatatacaataaacttacaaa

SEQ ID NO: 419031 - DNA, 2275 bp, Homo sapiens
gctcctagggaggagctggtaccatgggtgtcaggcaacagttggccttgctgctgctgctgctgctcctgctctggggcctggggcagccagtgtggccagtcgctgtggccttgaccctgcgctggctcctgggggatcccacatgttgcgtgctacttgggctggccatgttagcacggccctggctcggcccctgggtgccccatgggctgagcctggcagctgcggccctggcactaaccctcctgccagcacggctgcccccaggactacgctggctgccggctgatgtgatcttcttggccaagatcctccacctgggcctgaagatcaggggatgcttgagccggcagccgcctgacacctttgtagatgccttcgagcggcgagcacgagcgcagcctggcagggcactcttggtgtggacggggcctggggccggctcagtcacctttggtgagctggatgcccgggcctgccaggcggcatgggccctgaaggctgagctgggtgaccctgcgagcctgtgtgccggggagcctactgccctccttgtgctggcttcccaggccgttccagccctgtgtatgtggctggggctggccaagctgggctgcccaacagcctggatcaacccgcatggccgggggatgcccctggcgcactctgtgctgagctctggggcccgggtgctggtggtggacccagacctccgggagagcctggaggagatccttcccaagctgcaggctgagaacatccgctgcttctacctcagccatacctcccctacaccaggggtgggggctctgggggctgccctggatgcagcgccctcccacccagtgcctgctgacctgcgtgctgggatcacatggagaagccctgccctcttcatctatacctcggggaccactggcctcccgaagccagccatcctcacgcatgagcgggtactgcagatgagcaagatgctgtccttatctggggccacagctgatgatgtggtttacacggtcctgcctctgtaccacgtgatgggacttgtcgttgggatcctcggctgcttagatctcggagccacctgtgttctggcccccaagttctctacttcctgcttctgggatgactgtcggcagcatggcgtgacagtgatcctgtatgtgggcgagctcctgcggtacttgtgtaacattccccagcaaccagaggaccggacacatacagtccgcctggcaatgggcaatggactacgggctgatgtgtgggagaccttccagcagcgcttcggtcctattcggatctgggaagtctacggctccacagaaggcaacatgggcttagtcaactatgtggggcgctgcggggccctgggcaagatgagctgcctcctccgaatgctgtccccctttgagctggtgcagttcgacatggaggcggcggagcctgtgagggacaatcagggcttctgcatccctgtagggctaggggagccggggctgctgctgaccaaggtggtaagccagcaacccttcgtgggctaccgcggcccccgagagctgtcggaacggaagctggtgcgcaacgtgcggcaatcgggcgacgtttactacaacaccggggacgtactggccatggaccgcgaaggcttcctctacttccgcgaccgcctcggggacaccttccgatggaagggcgagaacgtgtccacgcacgaggtggagggcgtgttgtcgcaggtggacttcttgcaacaggttaacgtgtatggcgtgtgcgtgccaggttgtgagggtaaggtgggcatggctgctgtgcagctagcccccggccagactttcgacggggagaagttgtaccagcacgttcgcgcttggctccctgcctacgctaccccccatttcatccgcatccaggacgccatggaggtcaccagcacgttcaaactgatgaagacccggttggtgcgtgagggcttcaatgtggggatcgtggttgaccctctgtttgtactggacaaccgggcccagtccttccggcccctgacggcagaaatgtaccaggctgtgtgtgagggaacctggaggctctgatcacctggccaacccactggggtagggatcaaagccagccacccccaccccaacacactcggtgtccctttcatcctgggcctgtgtgaatcccagcctggccataccctcaacctcagtgggctggaaatgacagtgggccctgtagcagtggcagaataaactcagatgtgttcaca

SEQ ID NO: 419032 - DNA, 2002 bp, Homo sapiens
  misc_feature (17)..(17): n is a, c, g, or t
  misc_feature (980)..(980): n is a, c, g, or t
  misc_feature (1805)..(1805): n is a, c, g, or t
cttcccgggggcgtggncacaagcgccggctccctccctgcagatggaagggcgagaacgtgtccacgcacgaggtggagggcgtgttgtcgcaggtggacttcttgcaacaggttaacgtgtatggcgtgtgcgtgccaggttgtgagggtaaggtgggcatggctgctgtgcagctagcccccggccagactttcgacggggagaagttgtaccagcacgttcgcgcttggctccctgcctacgctaccccccatttcatccgcatccaggacgccatggaggtcaccagcacgttcaaactgatgaagacccggttggtgcgtgagggcttcaatgtggggatcgtggttgaccctctgtttgtactggacaaccgggcccagtccttccggcccctgacggcagaaatgtaccaggctgtgtgtgagggaacctggaggctctgatcacctggccaacccactgggacagggtctcatcctgttgcccaggctggagtgcaatggtgttatcagagctcactgcagccttaacctcctgggctcaagtgattctcccacctcagtctccctgggactacagggagcaggagaaacggaagccaactgtgctttcctgggtcttctgctgctctccacactgagacctcaggcccagcctctgcacagacgagtgggaaggcacagtttttgaacacccacctgagagtcttctgctggtgccccagaggctgtatccaggccccgagaacaccgaggccccgagggactgtgctgtctggctgctcatggaacctccggccggtggcccttgcggtggatgaccagctgcgacttccagtcgaaggcgcggccacagtcactgcagaagtgacgccgctggcctgtgtggctcttgcggtggatgaccagctgcgacttccagctgaagctgcacccgcactcctcacacgggtaactccgggggcctgtgagtgngcgtcgggggtggtgcggaaaggccacctccccttgtggtggcttctctgtgctttccccggtggctagccccggggactgcacacctggcccactcgtgtgtgtccggtggtggatgacgaacactgacttccagtcgaagccgcggccacactgctcgcacgtgtagggcttcctgggggtggcagccggctccagtctcgtctctgcaggtgtgggctgagtgggcactggcggtgtccctgggcgcacagtgggggcaggagtggcagccccagacaagccctcccaggctgccggccctgggccctggggcggctgggcctctgggcagccaggtggaccctcactctcatttcctgggggcaggggcaaaccaggtgagtcccggcactcagcaacccctccctcaggcttgtggccgtggcacaagctcccgtccccccatgagtgggtggctcaggtcccaccgatacaggaggggtgattcaggctggatggtgtggggcactcacccgagcgcaggcttctgcagacgcctgtccccgtgagcagcatccccagctctgactgggcctgtgcctctggctggtggggcggtaaccctgcccgggtggggggcacagttaggcatggggtttgcatgaaggaggggtggggtcggttctggtaggtgacagggtgttcctctggaaggtgggagagctgggtagggctggtagcacagaggccctgcccagctaggcctgctgcagggtgggtgcaggccccagggagaggggcggggtggggctggctggtcctcacccagggagaccactgtgncgtacttctccagcatcgcatcccagtacagttccttctgtgaccggtccagcagcccccactcctcctgcggatgtggcccatcactgtaggcgtctttccaccccttccctgccctgtctggttcacattcttacctattacccggaagagtcagcaggttacctacgcctcatctgcccctcctgctgagaatg

SEQ ID NO: 419033 - DNA, 609 bp, Homo sapiens
cgctctaaaattagtgatcccccccgggttccaggaattcgggcccgagcacgaggtggagggcgtgttgtcgcaggtggacttcttgcaacaggttaacgtgtatggcgtgtgcgtgccaggttgtgagggtaaggtgggcatggctgctgtgcagctagcccccggccagactttcgacggggagaagttgtaccagcacgttcgcgcttggctccctgcctacgctaccccccatttcatccgcatccaggacgccatggaggtcaccagcacgttcaaactgatgaagacccggttggtgcgtgagggcttcaatgtggggatcgtggttgaccctctgtttgtactggacaaccgggcccagtccttccggcccctgacggcagaaatgtaccaggctgtgtgtgagggaacctggaggctctgatcacctggccaacccactggggtagggatcaaagccagccacccccaccccaacacactcggtgtccctttcatcctgggcctgtgtgaatcccagcctggccataccctcaacctcagtgggctggaaatgacagtgggccctgtagcagtggcagaataaactcagatgtgttcaca

SEQ ID NO: 419034 - DNA, 1088 bp, Homo sapiens
  misc_feature (1)..(1): n is a, c, g, or t
  misc_feature (6)..(6): n is a, c, g, or t
  misc_feature (9)..(9): n is a, c, g, or t
  misc_feature (31)..(31): n is a, c, g, or t
  misc_feature (36)..(36): n is a, c, g, or t
  misc_feature (891)..(891): n is a, c, g, or t
nttggntanttcagcattttcactttgaaangtagnactggagcttgctgatggaggccctctttgtgaaattgatccatattcctattaataacatcattgtggtggcttctctgtgctttccccggtggctagccccggggactgcacacctggcccactcgtgtgtgtccggtggtggatgacgaacactgacttccagtcgaagccgcggccacactgctcgcacgtgtagggcttcctgggggtggcagccggctccagtctcgtctctgcaggtgtgggctgagtgggcactggcggtgtccctgggcgcacagtgggggcaggagtggcagccccagacaagccctcccaggctgccggccctgggccctggggcggctgggcctctgggcagccaggtggaccctcactctcatttcctgggggcaggggcaaaccaggtgagtcccggcactcagcaacccctccctcaggcttgtggccgtggcacaagctcccgtccccccatgagtgggtggctcaggtcccaccgatacaggaggggtgattcaggctggatggtgtggggcactcacccgagcgcaggcttctgcagacgcctgtccccgtgagcagcatccccagctctgactgggcctgtgcctctggctggtggggcggtaaccctgcccgggtggggggcacagttaggcatggggtttgcatgaaggaggggtggggtcggttctggtaggtgacagggtgttcctctggaaggtgggagagctgggtagggctggtagcacagaggccctgcccagctaggcctgctgcagggtgggtgcaggccccagggagaggggcggggtggggctggctggtcctcacccagggagaccactgtgncgtacttctccagcatcgcatcccagtacagttccttctgtgaccggtccagcagcccccactcctcctgcggatgtggcccatcactgtaggcgtctttccaccccttccctgccctgtctggttcacattcttacctattacccggaagagtcagcaggttacctacgcctcatctgcccctcctgctgagaatg

SEQ ID NO: 419035 - DNA, 2550 bp, Homo sapiens
aggtaaaggtctcaggtaaagattcaggtactgaactcaagtccctcagataatacacctcatgcaagaaccccagataatgagtttcagacaaggcttccaataatggtttctttgatagctgtgctaccttgagcctcagtgtcctcatttggaaaacagggataatagcccctacccctatcatgagaatttccattaaaaattaattaaaattaaatttccattaaattaaagttctaggtaactactcttaggtgagaccccagatgaggcctccagtcacctctggtaacgtcccccaggcaaagctctgaggtcgcccctgcaggtaaccctctatttaagactccagtaactactctcatgtaagtaacccaggtagatcccttaggtagaggtcccccatcaccttccaggtaactcccaaggtaaggacccaggataacaccccctctaggtaaaggttccaaggcatgccccaagagcacctcctcctcacccttctggggacattcctgtagcaaccagaggaccggacacatacagtccgcctggcaatgggcaatggactacgggctgatgtgtgggagaccttccagcagcgcttcggtcctattcggatctgggaagtctacggctccacagaaggcaacatgggcttagtcaactatgtggggcgctgcggggccctgggcaagatgagctgcctcctccgaatgctgtccccctttgagctggtgcagttcgacatggaggcggcggagcctgtgagggacaatcagggcttctgcatccctgtagggctaggtatgggggttgaggagcctttcctgggtggcaggggtggcgaccctcagtcttctgcttggctggaacgagctgctcaaaagcttgacgttggtgctcactagaggggtctgcagccttcatctggaccctgagccagtggcctgccttaccaccatctggggcctccgcctcagcttctcggctctgtccagctcccctgccttgatctcttgctctgatttactgggtctctgggtgtccatctgatttgttctcttgagctttctgtggaagacggcattccagccattggtcccttgtcctgtaccttctgttagtgtcttctcccagggccttgcaaggtcctggtcatatctattctcactgccatttgtctgtccgtcttccatcccttgttatccttttcctgtttctcatgggctccccataccgccttctctatacttctctctcattttctgtgtcgcttgtcgcagtctctcaaggtctctgaatgtctctctcatctctggatctccctgtctgtgtctttgggtctgtccttggcagggtgctgggtgatgaagagtccaccgttgttgaaaacctccagcagggggcttggctggtgggctccaggggttcttgttcctgctcctaccccaggggagccggggctgctgctgaccaaggtggtaagccagcaacccttcgtgggctaccgcggcccccgagagctgtcggaacggaagctggtgcgcaacgtgcggcaatcgggcgacgtttactacaacaccggggacgtactggccatggaccgcgaaggcttcctctacttccgcgaccgcctcggggacaccttccgatggaagggcgagaacgtgtccacgcacgaggtggagggcgtgttgtcgcaggtggacttcttgcaacaggttaacgtgtatggcgtgtgcgtgccaggttgtgagggtaaggtgggcatggctgctgtgcagctagcccccggccagactttcgacggggagaagttgtaccagcacgttcgcgcttggctccctgcctacgctaccccccatttcatccgcatccaggacgccatggaggtcaccagcacgttcaaactgatgaagacccggttggtgcgtgagggcttcaatgtggggatcgtggttgaccctctgtttgtactggacaaccgggcccagtccttccggcccctgacggcagaaatgtaccaggctgtgtgtgagggaacctggaggctctgatcacctggccaacccactggggtagggatcaaagccagccacccccaccccaacacactcggtgtccctttcatcctgggcctgtgtgaatcccagcctggccataccctcaacctcagtgggctggaaatgacagtgggccctgtagcagtggcagaataaactcagatgtgttcacaaaaaacacaaaacataaacagaacaaacccttgctcgcgccgcctgggacccccgcgaaaacagtttcagaaccgactgggggtgggagccgccggcacccatggggtccatgcaaaccgtgggcgcagaggatggccccacgaaaaacctcggcgcataacacacgcgcactgggatattgctcccaatataaacaagccccggggagacaacggagcgctgctgaaaacactccacacaggagacaccagaaggcacaaagggagttcctacaacgaggagccaaagagcgacccgaatataacta

SEQ ID NO: 419036 - DNA, 2238 bp, Homo sapiens
  misc_feature (2238)..(2238): n is a, c, g, or t
aggtaaaggtctcaggtaaagattcaggtactgaactcaagtccctcagataatacacctcatgcaagaaccccagataatgagtttcagacaaggcttccaataatggtttctttgatagctgtgctaccttgagcctcagtgtcctcatttggaaaacagggataatagcccctacccctatcatgagaatttccattaaaaattaattaaaattaaatttccattaaattaaagttctaggtaactactcttaggtgagaccccagatgaggcctccagtcacctctggtaacgtcccccaggcaaagctctgaggtcgcccctgcaggtaaccctctatttaagactccagtaactactctcatgtaagtaacccaggtagatcccttaggtagaggtcccccatcaccttccaggtaactcccaaggtaaggacccaggataacaccccctctaggtaaaggttccaaggcatgccccaagagcacctcctcctcacccttctggggacattcctgtagcaaccagaggaccggacacatacagtccgcctggcaatgggcaatggactacgggctgatgtgtgggagaccttccagcagcgcttcggtcctattcggatctgggaagtctacggctccacagaaggcaacatgggcttagtcaactatgtggggcgctgcggggccctgggcaagatgagctgcctcctccgaatgctgtccccctttgagctggtgcagttcgacatggaggcggcggagcctgtgagggacaatcagggcttctgcatccctgtagggctaggtatgggggttgaggagcctttcctgggtggcaggggtggcgaccctcagtcttctgcttggctggaacgagctgctcaaaagcttgacgttggtgctcactagaggggtctgcagccttcatctggaccctgagccagtggcctgccttaccaccatctggggcctccgcctcagcttctcggctctgtccagctcccctgccttgatctcttgctctgatttactgggtctctgggtgtccatctgatttgttctcttgagctttctgtggaagacggcattccagccattggtcccttgtcctgtaccttctgttagtgtcttctcccagggccttgcaaggtcctggtcatatctattctcactgccatttgtctgtccgtcttccatcccttgttatccttttcctgtttctcatgggctccccataccgccttctctatacttctctctcattttctgtgtcgcttgtcgcagtctctcaaggtctctgaatgtctctctcatctctggatctccctgtctgtgtctttgggtctgtccttggcagggtgctgggtgatgaagagtccaccgttgttgaaaacctccagcagggggcttggctggtgggctccaggggttcttgttcctgctcctaccccaggggagccggggctgctgctgaccaaggtggtaagccagcaacccttcgtgggctaccgcggcccccgagagctgtcggaacggaagctggtgcgcaacgtgcggcaatcgggcgacgtttactacaacaccggggacgtactggccatggaccgcgaaggcttcctctacttccgcgaccgcctcggggacaccttccgatggaagggcgagaacgtgtccacgcacgaggtggagggcgtgttgtcgcaggtggacttcttgcaacaggttaacgtgtatggcgtgtgcgtgccaggttgtgagggtaaggtgggcatggctgctgtgcagctagcccccggccagactttcgacggggagaagttgtaccagcacgttcgcgcttggctccctgcctacgctaccccccatttcatccgcatccaggacgccatggaggtcaccagcacgttcaaactgatgaagacccggttggtgcgtgagggcttcaatgtggggatcgtggttgaccctctgtttgtactggacaaccgggcccagtccttccggcccctgacggcagaaatgtaccaggctgtgtgtgagggaacctggaggctctgatcacctggccaacccactggggtagggggattcaaaagcccagtcccaccccccaccgcccgacacacctccggttggttcccttttccattcctggggccctggtgtggaaattccccaacccttggcacattacccccttcaacccttcaattggggcctgggacctatcaan

SEQ ID NO: 419037 - DNA, 244 bp, Homo sapiens
tgaactcagtattgtcctgtatttcagggtgtgggggtgggtgagcacaggtgctaaaagcagcttcttacaacaatttggaagcatgacctgaaaccccctctcctgtcatctcccaggagccacctgtgttctggcccccaagttctctacttcctgcttctgggatgactgtcggcagcatggcgtgacagtgatcctgtatgtgggcgagctcctgcggtacttgtgtaacattccccag

SEQ ID NO: 419038 - DNA, 397 bp, Homo sapiens
tcaggtcatcagagtttaattttcccacaatttgaccaaaaatactaatgatgggattctttaccaaacaacatggatgcttttctctactagctgctcctctgcctgcatctgtgggtctcagatcccgcctcgcaacctcaaaggtgagccttgcctctgtttctcctctgacccatctctgcagacctccgggagagcctggaggagatccttcccaagctgcaggctgagaacatccgctgcttctacctcagccatacctcccctacaccaggggtgggggctctgggggctgccctggatgcagcgccctcccacccagtgcctgctgacctgcgtgctgggatcacatggagaagccctgccctcttcatctatacctcggggaccactg

SEQ ID NO: 419039 - DNA, 2672 bp, Homo sapiens
  misc_feature (2432)..(2432): n is a, c, g, or t
aggtaaaggtctcaggtaaagattcaggtactgaactcaagtccctcagataatacacctcatgcaagaaccccagataatgagtttcagacaaggcttccaataatggtttctttgatagctgtgctaccttgagcctcagtgtcctcatttggaaaacagggataatagcccctacccctatcatgagaatttccattaaaaattaattaaaattaaatttccattaaattaaagttctaggtaactactcttaggtgagaccccagatgaggcctccagtcacctctggtaacgtcccccaggcaaagctctgaggtcgcccctgcaggtaaccctctatttaagactccagtaactactctcatgtaagtaacccaggtagatcccttaggtagaggtcccccatcaccttccaggtaactcccaaggtaaggacccaggataacaccccctctaggtaaaggttccaaggcatgccccaagagcacctcctcctcacccttctggggacattcctgtagcaaccagaggaccggacacatacagtccgcctggcaatgggcaatggactacgggctgatgtgtgggagaccttccagcagcgcttcggtcctattcggatctgggaagtctacggctccacagaaggcaacatgggcttagtcaactatgtggggcgctgcggggccctgggcaagatgagctgcctcctccgaatgctgtccccctttgagctggtgcagttcgacatggaggcggcggagcctgtgagggacaatcagggcttctgcatccctgtagggctaggtatgggggttgaggagcctttcctgggtggcaggggtggcgaccctcagtcttctgcttggctggaacgagctgctcaaaagcttgacgttggtgctcactagaggggtctgcagccttcatctggaccctgagccagtggcctgccttaccaccatctggggcctccgcctcagcttctcggctctgtccagctcccctgccttgatctcttgctctgatttactgggtctctgggtgtccatctgatttgttctcttgagctttctgtggaagacggcattccagccattggtcccttgtcctgtaccttctgttagtgtcttctcccagggccttgcaaggtcctggtcatatctattctcactgccatttgtctgtccgtcttccatcccttgttatccttttcctgtttctcatgggctccccataccgccttctctatacttctctctcattttctgtgtcgcttgtcgcagtctctcaaggtctctgaatgtctctctcatctctggatctccctgtctgtgtctttgggtctgtccttggcagggtgctgggtgatgaagagtccaccgttgttgaaaacctccagcagggggcttggctggtgggctccaggggttcttgttcctgctcctaccccaggggagccggggctgctgctgaccaaggtggtaagccagcaacccttcgtgggctaccgcggcccccgagagctgtcggaacggaagctggtgcgcaacgtgcggcaatcgggcgacgtttactacaacaccggggacgtactggccatggaccgcgaaggcttcctctacttccgcgaccgcctcggggacaccttccgatggaagggcgagaacgtgtccacgcacgaggtggagggcgtgttgtcgcaggtggacttcttgcaacaggttaacgtgtatggcgtgtgcgtgccaggttgtgagggtaaggtgggcatggctgctgtgcagctagcccccggccagactttcgacggggagaagttgtaccagcacgttcgcgcttggctccctgcctacgctaccccccatttcatccgcatccaggacgccatggaggtcaccagcacgttcaaactgatgaagacccggttggtgcgtgagggcttcaatgtggggatcgtggttgaccctctgtttgtactggacaaccgggcccagtccttccggcccctgacggcagaaatgtaccaggctgtgtgtgagggaacctggaggctctgatcacctggccaacccactggggtagggatcaaagccagccacccccaccccaacacactcggtgtccctttcatcctgggcctgtgtgaatcccagcctggccataccctcaacctcagtgggctggaaatgacagtgggccctgtagcagtggcagaataaactcagatgtgttcacaaaaaaaaaacaaaaaaaacacaaaaaaaacaaacacagtgtgtgtgggcgcgcgcgccgcgcggcgccccccggagaaaagagctttctttagacacacacatgtcgcgtgtgtgggcgcgcgcgcgcgggcgccccggtgtggtgtgtaaggtgtggaacacagtggtgtgcgaacatagggcgggtgnccctagaagagagagagaaatccgcggggcgcagaaggaccaatgaggggcgcggggggggattctctttccagccacatatatagaaaaagacgccgcgcgggggggaaaacgacgagagaagggtttttctgtgaaaacaaattctcccaagagggggagtttatggagagggatccatcagagggggggcctctttctaacgaggggggtctcccagaggggggagccttcgaattg

SEQ ID NO: 419040 - DNA, 483 bp, Homo sapiens
gtgagcccagggtggcctggtgggtgggtggaagatcatagccagggggcgggtggatgtcacagtgattggaccatggtcactgccctgcaggacgccatggaggtcaccagcacgttcaaactgatgaagacccggttggtgcgtgagggcttcaatgtggggatcgtggttgaccctctgtttgtactggacaaccgggcccagtccttccggcccctgacggcagaaatgtaccaggctgtgtgtgagggaacctggaggctctgatcacctggccaacccactggggtagggatcaaagccagccacccccaccccaacacactcggtgtccctttcatcctgggcctgtgtgaatcccagcctggccataccctcaacctcagtgggctggaaatgacagtgggccctgtagcagtggcagaataaactcagatgtgttcacagaagtctgtatgtctgcgtggatgaaggagcaat

SEQ ID NO: 419041 - DNA, 306 bp, Homo sapiens
ggagcaggagaaacggaagccaactgtgctttcctgggtcttctgctgctctccacactgagacctcaggcccagcctctgcacagacgagtgggaaggcacagtttttgaacacccacctgaggcaaggaggtcccaggagagggagtgttgtcagcccaggccatgtcacagggagggagggagcctggtgcttggcagtcaccccacaggcactggtcagccatagaagggaacccagacctccctctaggaggcaggggcaagaagagagagagcagctccttttccttgcacccaggtctt

SEQ ID NO: 419042 - DNA, 1129 bp, Homo sapiens
tgaggttgagatgtttttcaaggctaacttcatggactcactctgtttagtgacttaattgtatcccaccaattactgctggtgacttactcacccttgtacagtgtttgcatagcagagtgaaggttacttattaccctctttctctcaagtgctttaaagaagaaacctccctggtgtttcttttctttttttttttgagacggagtcttgctttgttgcccaggctgaagtgcagtggcataatctcagctcactgaaacctctgcctcccgggttcaaacgattctcctgcctcagcctcccaagtagctgggattacaagcatgtgccaccatgcccagctaatttctgtattttagtagagacaaggtttcaccatgttggccaggctggtctcgaactcctggcctcaagtgatccacctgccttggcctcccaaagtgctccgattacaggtgtgagccacccggcccagcccctcccttgtgtttcaaccaatcggaagtgaatttaactagatgtagtaaccttttttttctttacttctaaaacagttacagtttactaataaagttaagtctggttctgtcctagaggaaataaattcactattaattcatgtcttaagttacttgggttaaaacactttcagccacccagattaattaaagtggagcagtggagcccctggctgggagatggcctccagaggagcagctgcagggcatgttctgggcttagcgacagaggcaagcaagggactggtgtctctggtgagaggtgggtttgatgtatctctgtcctatgctggtctctcttctcctttataaaatcctctgtggtcaactgactactgcgtatcgcagtggaataagactgcacagttgctggtaggtgagtttaaagtcttaatctatgcattcagagaaatatttttatatgctttgtgtaatttataacaaggattttttttttagctttgttaactgtgaattcacccctcctcctccactgcatatttaaagcatgtgttcacactgtgtgtaaacattcactgaagattttttctttgtgcattgctgactgttcaaacataacaagtattattaaaattaaatattaactg

SEQ ID NO: 419043 - DNA, 2523 bp, Homo sapiens
  misc_feature (3)..(4): n is a, c, g, or t
  misc_feature (6)..(7): n is a, c, g, or t
ggnncnnccggagccggccttcgggaggcgcggcccgggaggaggcctgggcctgcgggccgggagcagcaggggcggcccgcgggagggagcggaagtcccgggacgggcgcgggcagcggcgcgagcagggcgggcgagttccgcgctccctccccatggccgggagcgggccgcggcgacggcggcggcgctgacaggccccgggcggggcggggcaggcgggcctgggcgggggcctggggctgtgggaagatgaacgccctcctagagcagaaggagcagcaggagaggctgcgggaggccgcggccttaggggacattcgggaggtgcagaaactggtggagagcggggtggatgtgaactcccaaaatgaggtcaacggctggacttgtttacactgggcatgtaaacgaaaccatggtcaggtggtctcttacctgttaaaatcaggagctgacaaagaaattcttaccacaaaaggagaaatgccagtccagttaacatcaaggagagaaatcaggaagattatgggagtggaagaagaagatgatgatgatgatgatgatgacaacctcccccagctgaagaaggagtcagaactgccctttgttcccaactatttggccaacccagccttcccttttatctatacacccacagcagaggattcagcccagatgcagaatgggggcccctccacaccccctgcatcaccccctgcagatggctcacctccattgcttccccctggggaacctcccctgttagggacctttccccgggaccacacctctttggcactagttcagaatggtgatgtgtcggccccctctgccatactcagaacaccagaaagcacaaaaccgggtcctgtttgtcagccaccagtgagtcagagccgctccctgttttcttctgtcccgtccaagccaccaatgtctctggagcctcaaaatgggacgtatgcaggaccagcgccagcattccagccatttttcttcactggagcatttccatttaatatgcaagagctggtactcaaggtgagaattcagaacccatctcttcgagaaaatgatttcattgaaattgaactggaccgacaggagctcacctaccaagagttgctcagagtgtgttgctgtgagctgggtgttaatccagatcaagtggagaagatcagaaagttacccaatactctgttaaggaaggacaaggatgttgctcgactccaagatttccaggagctggaactggttctgatgataagtgaaaataattttctgttcagaaatgctgcatccacactgactgaaaggccttgctataacaggagagcttcaaaactgacttactaatgcagcagggacttttatcactgagtattatgacagtgtgcatcacctctgggccaaggacaagccattgatctaaatgcctcagatgcccgggagggcctctggtgccactgcatagtatatactaacatcattctgccaaggtaggaagcccctgacccccaagcagtggtgccactcttccaagcctcttggtgcacagtaaacctattgcttgaagctttgaacagctgagaagtggtctggagaggcagaagctgaaggttctatatccagtgtgttttatgtccagaatgtaagagagttgtctaagcagcagctgagagagagcggagcctatttctagccactcctgttgacagtgcacctgaagggctgggatgcgtttttcttggtgttgcatgctcacaactctgctgacattgggaacttatgagagaggaagactcgggaaagcacagatactggacagatggattctggtgtggggaaagcacagatactggacagatggattctagtgtgacttgtgactgtgaggtttcctataacatatttataaatgttactcaggttaaaagtatttaagaatacagttaactaattgtaaatatgctgttaaccaaaagagctttccctccctcactttttcctttgtaaacactcatgactgcttctctgtctcgagtcatctctgcattaactccccttcgtggtcactagagggctctctgatgccttctaaaagaacaactgcttttttacaatgccccccacccccaccccgcccatagagacagggtctcactatgtggcccaggctggtctcaaacttctggccttaagtgatgctcctgtccttggcctcccaaagtgctgggattacaggtgtgagccactgcacccagcccactttttttttactctgaagtgattccagtcatatgtgtgtgtaactgcatcctatgagaagagcacaaatattgctgttccatgttctccactttcattttccactacaaatgaaaagcaatttttgagactgaatctgttgctattttaaaggttattgtgggaaactgagctaaaggagttagcatctttatttttgtatcaaaaataaaggttattttgaaattattaggatttttacacaattct

SEQ ID NO: 419044 - DNA, 1950 bp, Homo sapiens
gagtttcatattttacagatacctttaggtccataattgttaaatctttttagggtaactcacatcctgcccatgccttctttccaaccttcttccctcttcccctgttcatgtatagtttgatacccaaacctgttcttaagactttgcctccttagctccaatggcagaagtaaattatccttctacatagctggaatggtttcccctgccttgctcttactttgtgaaccatagccttagaagtacggacgacagtgcaggaaactgccccagcagaggcagagctgggcctgagcaaaccctgctggctgcacttggttttcccaccaaacaggtctgttaatcatgcacagacctttggcatgattaagtataaccatcttctggaaaagatcttaaacaacatgggctgtgctgtgccagaactattcattaacatttctccttttttttctagagctggtactcaaggtgagaattcagaacccatctcttcgagaaaatgatttcattgaaattgaactggaccgacaggagctcacctaccaagagttgctcagagtgtgttgctgtgagctgggtgttaatccagatcaagtggagaagatcagaaagttacccaatactctgttaaggaaggacaaggatgttgctcgactccaagatttccaggagctggaactggttctgatgataagtgaaaataattttctgttcagaaatgctgcatccacactgactgaaaggccttgctataacaggagagcttcaaaactgacttactaatgcagcagggacttttatcactgagtattatgacagtgtgcatcacctctgggccaaggacaagccattgatctaaatgcctcagatgcccgggagggcctctggtgccactgcatagtatatactaacatcattctgccaaggtaggaagcccctgacccccaagcagtggtgccactcttccaagcctcttggtgcacagtaaacctattgcttgaagctttgaacagctgagaagtggtctggagaggcagaagctgaaggttctatatccagtgtgttttatgtccagaatgtaagagagttgtctaagcagcagctgagagagagcggagcctatttctagccactcctgttgacagtgcacctgaagggctgggatgcgtttttcttggtgttgcatgctcacaactctgctgacattgggaacttatgagagaggaagactcgggaaagcacagatactggacagatggattctggtgtggggaaagcacagatactggacagatggattctagtgtgacttgtgactgtgaggtttcctataacatatttataaatgttactcaggttaaaagtatttaagaatacagttaactaattgtaaatatgctgttaaccaaaagagctttccctccctcactttttcctttgtaaacactcatgactgcttctctgtctcgagtcatctctgcattaactccccttcgtggtcactagagggctctctgatgccttctaaaagaacaactgcttttttacaatgccccccacccccaccccgcccatagagacagggtctcactatgtggcccaggctggtctcaaacttctggccttaagtgatgctcctgtccttggcctcccaaagtgctgggattacaggtgtgagccactgcacccagcccactttttttttactctgaagtgattccagtcatatgtgtgtgtaactgcatcctatgagaagagcacaaatattgctgttccatgttctccactttcattttccactacaaatgaaaagcaatttttgagactgaatctgttgctattttaaaggttattgtgggaaactgagctaaaggagttagcatctttatttttgtatcaaaaataaaggttattttgaaattattaggatttttacacaattct

SEQ ID NO: 419045 - DNA, 1416 bp, Homo sapiens
  misc_feature (3)..(4): n is a, c, g, or t
  misc_feature (6)..(7): n is a, c, g, or t
ggnncnnccggagccggccttcgggaggcgcggcccgggaggaggcctgggcctgcgggccgggagcagcaggggcggcccgcgggagggagcggaagtcccgggacgggcgcgggcagcggcgcgagcagggcgggcgagttccgcgctccctccccatggccgggagcgggccgcggcgacggcggcggcgctgacaggccccgggcggggcggggcaggcgggcctgggcgggggcctggggctgtgggaagatgaacgccctcctagagcagaaggagcagcaggagaggctgcgggaggccgcggccttaggggacattcgggaggtgcagaaactggtggagagcggggtggatgtgaactcccaaaatgaggtcaacggctggacttgtttacactgggcatgtaaacgaaaccatggtcaggtggtctcttacctgttaaaatcaggagctgacaaagaaattcttaccacaaaaggagaaatgccagtccagttaacatcaaggagagaaatcaggaagattatgggagtggaagaagaagatgatgatgatgatgatgatgacaacctcccccagctgaagaaggagtcagaactgccctttgttcccaactatttggccaacccagccttcccttttatctatacacccacagcagaggattcagcccagatgcagaatgggggcccctccacaccccctgcatcaccccctgcagatggctcacctccattgcttccccctggggaacctcccctgttagggacctttccccgggaccacacctctttggcactagttcagaatggtgatgtgtcggccccctctgccatactcagaacaccagaaagcacaaaaccgggtcctgtttgtcagccaccagtgagtcagagccgctccctgttttcttctgtcccgtccaagccaccaatgtctctggagcctcaaaatgggacgtatgcaggaccagcgccagcattccagccatttttcttcactggagcatttccatttaatatgcaagagctggtactcaaggtgagaattcagaacccatctcttcgagaaaatgatttcattgaaattgaatggtctctcttctcctttataaaatcctctgtggtcaactgactactgcgtatcgcagtggaataagactgcacagttgctggtaggtgagtttaaagtcttaatctatgcattcagagaaatatttttatatgctttgtgtaatttataacaaggattttttttttagctttgttaactgtgaattcacccctcctcctccactgcatatttaaagcatgtgttcacactgtgtgtaaacattcactgaagattttttctttgtgcattgctgactgttcaaacataacaagtattattaaaattaaatattaactg

SEQ ID NO: 419046 - DNA, 2247 bp, Homo sapiens
cctggttctagctgaactctaacaggcttgtttatacattatttactaatgtttagaatctgaaatccaaaatcacttctcctctttttcaatcattattttctttggtacaggacttgtttacactgggcatgtaaacgaaaccatggtcaggtggtctcttacctgttaaaatcaggagctgacaaagaaattcttaccacaaaaggagaaatgccagtccagttaacatcaaggagagaaatcaggaagattatgggagtggaagaagaagatgatgatgatgatgatgatgacaacctcccccagctgaagaaggagtcagaactgccctttgttcccaactatttggccaacccagccttcccttttatctatacacccacagcagaggattcagcccagatgcagaatgggggcccctccacaccccctgcatcaccccctgcagatggctcacctccattgcttccccctggggaacctcccctgttagggacctttccccgggaccacacctctttggcactagttcagaatggtgatgtgtcggccccctctgccatactcagaacaccagaaagcacaaaaccgggtcctgtttgtcagccaccagtgagtcagagccgctccctgttttcttctgtcccgtccaagccaccaatgtctctggagcctcaaaatgggacgtatgcaggaccagcgccagcattccagccatttttcttcactggagcatttccatttaatatgcaagagctggtactcaaggtgagaattcagaacccatctcttcgagaaaatgatttcattgaaattgaactggaccgacaggagctcacctaccaagagttgctcagagtgtgttgctgtgagctgggtgttaatccagatcaagtggagaagatcagaaagttacccaatactctgttaaggaaggacaaggatgttgctcgactccaagatttccaggagctggaactggttctgatgataagtgaaaataattttctgttcagaaatgctgcatccacactgactgaaaggccttgctataacaggagagcttcaaaactgacttactaatgcagcagggacttttatcactgagtattatgacagtgtgcatcacctctgggccaaggacaagccattgatctaaatgcctcagatgcccgggagggcctctggtgccactgcatagtatatactaacatcattctgccaaggtaggaagcccctgacccccaagcagtggtgccactcttccaagcctcttggtgcacagtaaacctattgcttgaagctttgaacagctgagaagtggtctggagaggcagaagctgaaggttctatatccagtgtgttttatgtccagaatgtaagagagttgtctaagcagcagctgagagagagcggagcctatttctagccactcctgttgacagtgcacctgaagggctgggatgcgtttttcttggtgttgcatgctcacaactctgctgacattgggaacttatgagagaggaagactcgggaaagcacagatactggacagatggattctggtgtggggaaagcacagatactggacagatggattctagtgtgacttgtgactgtgaggtttcctataacatatttataaatgttactcaggttaaaagtatttaagaatacagttaactaattgtaaatatgctgttaaccaaaagagctttccctccctcactttttcctttgtaaacactcatgactgcttctctgtctcgagtcatctctgcattaactccccttcgtggtcactagagggctctctgatgccttctaaaagaacaactgcttttttacaatgccccccacccccaccccgcccatagagacagggtctcactatgtggcccaggctggtctcaaacttctggccttaagtgatgctcctgtccttggcctcccaaagtgctgggattacaggtgtgagccactgcacccagcccactttttttttactctgaagtgattccagtcatatgtgtgtgtaactgcatcctatgagaagagcacaaatattgctgttccatgttctccactttcattttccactacaaatgaaaagcaatttttgagactgaatctgttgctattttaaaggttattgtgggaaactgagctaaaggagttagcatctttatttttgtatcaaaaataaaggttattttgaaattattaggatttttacacaattct

SEQ ID NO: 419047 - DNA, 3642 bp, Homo sapiens
  misc_feature (269)..(269): n is a, c, g, or t
  misc_feature (275)..(275): n is a, c, g, or t
  misc_feature (277)..(278): n is a, c, g, or t
  misc_feature (351)..(351): n is a, c, g, or t
ctcaccccgctctccggccgccgccggtgcgggtgctccgctaccggctcctctccgttctgtgctctcttctgctctcggctccccaccccctctcccttccctcctctccccttgcctcccctcctctgcagcgcctgcattattttctgcccgcaggctcggcttgcactgctgctgcagcccggggaggtggctgggtgggtggggaggagactgtgcaagttgtaggggagggggtgccctcttcttccccgctcccttccccngccaantnnttcccctccttctccccctttcccctccccgcccccaccttcttcctcctttcggaagggctggtaacttgtngtgcggagcgaacggcggcggcggcggcggcggcaccatccaggcgggcaccatgggcacgtccgcgctctgggcgctctggctgctgctcgcgctgtgctgggcgccccgggagagcggcgccaccggaaccgggagaaaagccaaatgtgaaccctcccaattccagtgcacaaatggtcgctgtattacgctgttgtggaaatgtgatggggatgaagactgtgttgacggcagtgatgaaaagaactgtgtaaagaagacgtgtgctgaatctgacttcgtgtgcaacaatggccagtgtgttcccagccgatggaagtgtgatggagatcctgactgcgaagatggttcagatgaaagcccagaacagtgccatatgagaacatgccgcatacatgaaatcagctgtggcgcccattctactcagtgtatcccagtgtcctggagatgtgatggtgaaaatgattgtgacagtggagaagatgaagaaaactgtggcaatataacatgtagtcccgacgagttcacctgctccagtggccgctgcatctccaggaactttgtatgcaatggccaggatgactgcagcgatggcagtgatgagctggactgtgccccgccaacctgtggcgcccatgagttccagtgcagcacctcctcctgcatccccatcagctgggtatgcgacgatgatgcagactgctccgaccaatctgatgagtccctggagcagtgtggccgtcagccagtcatacacaccaagtgtccagccagcgaaatccagtgcggctctggcgagtgcatccataagaagtggcgatgtgatggggaccctgactgcaaggatggcagtgatgaggtcaactgtccctctcgaacttgccgacctgaccaatttgaatgtgaggatggcagctgcatccatggcagcaggcagtgtaatggtatccgagactgtgtcgatggttccgatgaagtcaactgcaaaaatgtcaatcagtgcttgggccctggaaaattcaagtgcagaagtggagaatgcatagatatcagcaaagtatgtaaccaggagcaggactgcagggactggagtgatgagcccctgaaagagtgtcatataaacgaatgcttggtaaataatggtggatgttctcatatctgcaaagacctagttataggctacgagtgtgactgtgcagctgggtttgaactgatagataggaaaacctgtggagatattgatgaatgccaaaatccaggaatctgcagtcaaatttgtatcaacttaaaaggcggttacaagtgtgaatgtagtcgtggctatcaaatggatcttgctactggcgtgtgcaaggcagtaggcaaagagccaagtctgatcttcactaatcgaagagacatcaggaagattggcttagagaggaaagaatatatccaactagttgaacagctaagaaacactgtggctctcgatgctgacattgctgcccagaaactattctgggccgatctaagccaaaaggctatcttcagtgcctcaattgatgacaaggttggtagacatgttaaaatgatcgacaatgtctataatcctgcagccattgctgttgattgggtgtacaagaccatctactggactgatgcggcttctaagactatttcagtagctaccctagatggaaccaagaggaagttcctgtttaactctgacttgcgagagcctgcctccatagctgtggacccactgtctggctttgtttactggtcagactggggtgaaccagctaaaatagaaaaagcaggaatgaatggattcgatagacgtccactggtgacagcggatatccagtggcctaacggaattacacttgaccttataaaaagtcgcctctattggcttgattctaagttgcacatgttatccagcgtggacttgaatggccaagatcgtaggatagtactaaagtctctggagttcctagctcatcctcttgcactaacaatatttgaggatcgtgtctactggatagatggggaaaatgaagcagtctatggtgccaataaattcactggatcagagctagccactctagtcaacaacctgaatgatgcccaagacatcattgtctatcatgaacttgtacagccatcaggtaaaaattggtgtgaagaagacatggagaatggaggatgtgaatacctatgcctgccagcaccacagattaatgatcactctccaaaatatacctgttcctgtcccagtgggtacaatgtagaggaaaatggccgagactgtcaaagtactgcaactactgtgacttacagtgagacaaaagatacgaacacaacagaaatttcagcaactagtggactagttcctggagggatcaatgtgaccacagcagtatcagaggtcagtgttcccccaaaagggacttctgccgcatgggccattcttcctctcttgctcttagtgatggcagcagtaggtggctacttgatgtggcggaattggcaacacaagaacatgaaaagcatgaactttgacaatcctgtgtacttgaaaaccactgaagaggacctctccatagacattggtagacacagtgcttctgttggacacacgtacccagcaatatcagttgtaagcacagatgatgatctagcttgacttctgtgacaaatgttgacctttgaggtctaaacaaataatacccccgtcggaatggtaaccgagccagcagctgaagtctctttttcttcctctcggctggaagaacatcaagatacctttgcgtggatcaagcttgtgtacttgaccgtttttatattacttttgtaaatattcttgtccacattctacttcagctttggatgtggttaccgagtatctgtaacccttgaatttctagacagtattgccacctctggccaaatatgcactttccctagaaagccatattccagcagtgaaacttgtgctatagtgtataccacctgtacatacattgtataggccatctgtaaatatcccagagaacaatcactattcttaagcactttgaaaatatttctatgtaaattattgtaaactttttcaatggttgggacaatggcaataggacaaaacgggttactaagatgaaattgccaaaaaaatttataaactaattttgtacgtatgaatgatatctttgacctcaatggaggtttgcaaagactgagtgttcaaactactgtacattttttttcaagtgctaaaaaattaaaccaagcagcttaaccatg

SEQ ID NO: 419048 - DNA, 4258 bp, Homo sapiens
  misc_feature (269)..(269): n is a, c, g, or t
  misc_feature (275)..(275): n is a, c, g, or t
  misc_feature (277)..(278): n is a, c, g, or t
  misc_feature (351)..(351): n is a, c, g, or t
ctcaccccgctctccggccgccgccggtgcgggtgctccgctaccggctcctctccgttctgtgctctcttctgctctcggctccccaccccctctcccttccctcctctccccttgcctcccctcctctgcagcgcctgcattattttctgcccgcaggctcggcttgcactgctgctgcagcccggggaggtggctgggtgggtggggaggagactgtgcaagttgtaggggagggggtgccctcttcttccccgctcccttccccngccaantnnttcccctccttctccccctttcccctccccgcccccaccttcttcctcctttcggaagggctggtaacttgtngtgcggagcgaacggcggcggcggcggcggcggcaccatccaggcgggcaccatgggcacgtccgcgctctgggcgctctggctgctgctcgcgctgtgctgggcgccccgggagagcggcgccaccggaaccgggagaaaagccaaatgtgaaccctcccaattccagtgcacaaatggtcgctgtattacgctgttgtggaaatgtgatggggatgaagactgtgttgacggcagtgatgaaaagaactgtgtaaagaagacgtgtgctgaatctgacttcgtgtgcaacaatggccagtgtgttcccagccgatggaagtgtgatggagatcctgactgcgaagatggttcagatgaaagcccagaacagtgccatatgagaacatgccgcatacatgaaatcagctgtggcgcccattctactcagtgtatcccagtgtcctggagatgtgatggtgaaaatgattgtgacagtggagaagatgaagaaaactgtggcaatataacatgtagtcccgacgagttcacctgctccagtggccgctgcatctccaggaactttgtatgcaatggccaggatgactgcagcgatggcagtgatgagctggactgtgccccgccaacctgtggcgcccatgagttccagtgcagcacctcctcctgcatccccatcagctgggtatgcgacgatgatgcagactgctccgaccaatctgatgagtccctggagcagtgtggccgtcagccagtcatacacaccaagtgtccagccagcgaaatccagtgcggctctggcgagtgcatccataagaagtggcgatgtgatggggaccctgactgcaaggatggcagtgatgaggtcaactgtccctctcgaacttgccgacctgaccaatttgaatgtgaggatggcagctgcatccatggcagcaggcagtgtaatggtatccgagactgtgtcgatggttccgatgaagtcaactgcaaaaatgtcaatcagtgcttgggccctggaaaattcaagtgcagaagtggagaatgcatagatatcagcaaagtatgtaaccaggagcaggactgcagggactggagtgatgagcccctgaaagagtgtcatataaacgaatgcttggtaaataatggtggatgttctcatatctgcaaagacctagttataggctacgagtgtgactgtgcagctgggtttgaactgatagataggaaaacctgtggagatattgatgaatgccaaaatccaggaatctgcagtcaaatttgtatcaacttaaaaggcggttacaagtgtgaatgtagtcgtggctatcaaatggatcttgctactggcgtgtgcaaggcagtaggcaaagagccaagtctgatcttcactaatcgaagagacatcaggaagattggcttagagaggaaagaatatatccaactagttgaacagctaagaaacactgtggctctcgatgctgacattgctgcccagaaactattctgggccgatctaagccaaaaggctatcttcagtgcctcaattgatgacaaggttggtagacatgttaaaatgatcgacaatgtctataatcctgcagccattgctgttgattgggtgtacaagaccatctactggactgatgcggcttctaagactatttcagtagctaccctagatggaaccaagaggaagttcctgtttaactctgacttgcgagagcctgcctccatagctgtggacccactgtctggctttgtttactggtcagactggggtgaaccagctaaaatagaaaaagcaggaatgaatggattcgatagacgtccactggtgacagcggatatccagtggcctaacggaattacacttggtatgtatgttcttccttctcgaccacccactcaactatcttcatagtgtttccatttatctccatggtgaattctggactagcagatgactctactgcttccgcctaaattctagcaggaattttcaatgggagtaactgaacaacacaagtaaaatggtggattaacaaattacacattccataattactggcctgttgtccagctgggcctaatatgtgacacaaattcagtgaacgttgggtcttgggtgcactcatactaaatattctgggcatgagtgccttagcatttcctgaattgcaggcttttaacagctttcttctggctttttggaggagaacaacaaaatggtagcctcttttaatattttctgtaatgtgagtaatatttcttaagtcatttgctttgagaatctcaggtaccctgttagtccccaaaaatgaacgtggatacaggctctgcatgctgcttcgcaaggtttatggtgaccccgttaagaaaccctgctggggaaagaaccgtgaaagtagattattaattcattagatatttttaatggaagccagagtagtagtggcttgtcatgtaatgcacaattcttttcctacctagaccttataaaaagtcgcctctattggcttgattctaagttgcacatgttatccagcgtggacttgaatggccaagatcgtaggatagtactaaagtctctggagttcctagctcatcctcttgcactaacaatatttgaggatcgtgtctactggatagatggggaaaatgaagcagtctatggtgccaataaattcactggatcagagctagccactctagtcaacaacctgaatgatgcccaagacatcattgtctatcatgaacttgtacagccatcaggtaaaaattggtgtgaagaagacatggagaatggaggatgtgaatacctatgcctgccagcaccacagattaatgatcactctccaaaatatacctgttcctgtcccagtgggtacaatgtagaggaaaatggccgagactgtcaaagtactgcaactactgtgacttacagtgagacaaaagatacgaacacaacagaaatttcagcaactagtggactagttcctggagggatcaatgtgaccacagcagtatcagaggtcagtgttcccccaaaagggacttctgccgcatgggccattcttcctctcttgctcttagtgatggcagcagtaggtggctacttgatgtggcggaattggcaacacaagaacatgaaaagcatgaactttgacaatcctgtgtacttgaaaaccactgaagaggacctctccatagacattggtagacacagtgcttctgttggacacacgtacccagcaatatcagttgtaagcacagatgatgatctagcttgacttctgtgacaaatgttgacctttgaggtctaaacaaataatacccccgtcggaatggtaaccgagccagcagctgaagtctctttttcttcctctcggctggaagaacatcaagatacctttgcgtggatcaagcttgtgtacttgaccgtttttatattacttttgtaaatattcttgtccacattctacttcagctttggatgtggttaccgagtatctgtaacccttgaatttctagacagtattgccacctctggccaaatatgcactttccctagaaagccatattccagcagtgaaacttgtgctatagtgtataccacctgtacatacattgtataggccatctgtaaatatcccagagaacaatcactattcttaagcactttgaaaatatttctatgtaaattattgtaaactttttcaatggttgggacaatggcaataggacaaaacgggttactaagatgaaattgccaaaaaaatttataaactaattttgtacgtatgaatgatatctttgacctcaatggaggtttgcaaagactgagtgttcaaactactgtacattttttttcaagtgctaaaaaattaaaccaagcagcttaaccatg

SEQ ID NO: 419049 - DNA, 3357 bp, Homo sapiens
  misc_feature (269)..(269): n is a, c, g, or t
  misc_feature (275)..(275): n is a, c, g, or t
  misc_feature (277)..(278): n is a, c, g, or t
  misc_feature (351)..(351): n is a, c, g, or t
ctcaccccgctctccggccgccgccggtgcgggtgctccgctaccggctcctctccgttctgtgctctcttctgctctcggctccccaccccctctcccttccctcctctccccttgcctcccctcctctgcagcgcctgcattattttctgcccgcaggctcggcttgcactgctgctgcagcccggggaggtggctgggtgggtggggaggagactgtgcaagttgtaggggagggggtgccctcttcttccccgctcccttccccngccaantnnttcccctccttctccccctttcccctccccgcccccaccttcttcctcctttcggaagggctggtaacttgtngtgcggagcgaacggcggcggcggcggcggcggcaccatccaggcgggcaccatgggcacgtccgcgctctgggcgctctggctgctgctcgcgctgtgctgggcgccccgggagagcggcgccaccggaaccgggagaaaagccaaatgtgaaccctcccaattccagtgcacaaatggtcgctgtattacgctgttgtggaaatgtgatggggatgaagactgtgttgacggcagtgatgaaaagaactgtgtaaagaagacgtgtgctgaatctgacttcgtgtgcaacaatggccagtgtgttcccagccgatggaagtgtgatggagatcctgactgcgaagatggttcagatgaaagcccagaacagtgccatatgagaacatgccgcatacatgaaatcagctgtggcgcccattctactcagtgtatcccagtgtcctggagatgtgatggtgaaaatgattgtgacagtggagaagatgaagaaaactgtggcaatataacatgtagtcccgacgagttcacctgctccagtggccgctgcatctccaggaactttgtatgcaatggccaggatgactgcagcgatggcagtgatgagctggactgtgccccgccaacctgtggcgcccatgagttccagtgcagcacctcctcctgcatccccatcagctgggtatgcgacgatgatgcagactgctccgaccaatctgatgagtccctggagcagtgtggccgtcagccagtcatacacaccaagtgtccagccagcgaaatccagtgcggctctggcgagtgcatccataagaagtggcgatgtgatggggaccctgactgcaaggatggcagtgatgaggtcaactgtccctctcgaacttgccgacctgaccaatttgaatgtgaggatggcagctgcatccatggcagcaggcagtgtaatggtatccgagactgtgtcgatggttccgatgaagtcaactgcaaaaatgtcaatcagtgcttgggccctggaaaattcaagtgcagaagtggagaatgcatagatatcagcaaagtatgtaaccaggagcaggactgcagggactggagtgatgagcccctgaaagagtgtcatataaacgaatgcttggtaaataatggtggatgttctcatatctgcaaagacctagttataggctacgagtgtgactgtgcagctgggtttgaactgatagataggaaaacctgtggagatattgatgaatgccaaaatccaggaatctgcagtcaaatttgtatcaacttaaaaggcggttacaagtgtgaatgtagtcgtggctatcaaatggatcttgctactggcgtgtgcaaggcagtaggcaaagagccaagtctgatcttcactaatcgaagagacatcaggaagttcctgtttaactctgacttgcgagagcctgcctccatagctgtggacccactgtctggctttgtttactggtcagactggggtgaaccagctaaaatagaaaaagcaggaatgaatggattcgatagacgtccactggtgacagcggatatccagtggcctaacggaattacacttgaccttataaaaagtcgcctctattggcttgattctaagttgcacatgttatccagcgtggacttgaatggccaagatcgtaggatagtactaaagtctctggagttcctagctcatcctcttgcactaacaatatttgaggatcgtgtctactggatagatggggaaaatgaagcagtctatggtgccaataaattcactggatcagagctagccactctagtcaacaacctgaatgatgcccaagacatcattgtctatcatgaacttgtacagccatcaggtaaaaattggtgtgaagaagacatggagaatggaggatgtgaatacctatgcctgccagcaccacagattaatgatcactctccaaaatatacctgttcctgtcccagtgggtacaatgtagaggaaaatggccgagactgtcaaagtactgcaactactgtgacttacagtgagacaaaagatacgaacacaacagaaatttcagcaactagtggactagttcctggagggatcaatgtgaccacagcagtatcagaggtcagtgttcccccaaaagggacttctgccgcatgggccattcttcctctcttgctcttagtgatggcagcagtaggtggctacttgatgtggcggaattggcaacacaagaacatgaaaagcatgaactttgacaatcctgtgtacttgaaaaccactgaagaggacctctccatagacattggtagacacagtgcttctgttggacacacgtacccagcaatatcagttgtaagcacagatgatgatctagcttgacttctgtgacaaatgttgacctttgaggtctaaacaaataatacccccgtcggaatggtaaccgagccagcagctgaagtctctttttcttcctctcggctggaagaacatcaagatacctttgcgtggatcaagcttgtgtacttgaccgtttttatattacttttgtaaatattcttgtccacattctacttcagctttggatgtggttaccgagtatctgtaacccttgaatttctagacagtattgccacctctggccaaatatgcactttccctagaaagccatattccagcagtgaaacttgtgctatagtgtataccacctgtacatacattgtataggccatctgtaaatatcccagagaacaatcactattcttaagcactttgaaaatatttctatgtaaattattgtaaactttttcaatggttgggacaatggcaataggacaaaacgggttactaagatgaaattgccaaaaaaatttataaactaattttgtacgtatgaatgatatctttgacctcaatggaggtttgcaaagactgagtgttcaaactactgtacattttttttcaagtgctaaaaaattaaaccaagcagcttaaccatg

SEQ ID NO: 419050 - DNA, 1118 bp, Homo sapiens
tgatcttaaaggtttctagtagagaactgtcagtgaaatggctactacagcatgtgactcaaatacttctaagccagagttgttcctggtgttcaattgttgtagatactgaacatcaatattggatgcaaaggttttggctccttacctgatgggtaaatttctaagtctgaatacagatccttctaaactgattccttttattcctctgtagggatcaatgtgaccacagcagtatcagaggtcagtgttcccccaaaagggacttctgccgcatgggccattcttcctctcttgctcttagtgatggcagcagtaggtggctacttgatgtggcggaattggcaacacaagaacatgaaaagcatgaactttgacaatcctgtgtacttgaaaaccactgaagaggacctctccatagacattggtagacacagtgcttctgttggacacacgtacccagcaatatcagttgtaagcacagatgatgatctagcttgacttctgtgacaaatgttgacctttgaggtctaaacaaataatacccccgtcggaatggtaaccgagccagcagctgaagtctctttttcttcctctcggctggaagaacatcaagatacctttgcgtggatcaagcttgtgtacttgaccgtttttatattacttttgtaaatattcttgtccacattctacttcagctttggatgtggttaccgagtatctgtaacccttgaatttctagacagtattgccacctctggccaaatatgcactttccctagaaagccatattccagcagtgaaacttgtgctatagtgtataccacctgtacatacattgtataggccatctgtaaatatcccagagaacaatcactattcttaagcactttgaaaatatttctatgtaaattattgtaaactttttcaatggttgggacaatggcaataggacaaaacgggttactaagatgaaattgccaaaaaaatttataaactaattttgtacgtatgaatgatatctttgacctcaatggaggtttgcaaagactgagtgttcaaactactgtacattttttttcaagtgctaaaaaattaaaccaagcagcttaaccatg

SEQ ID NO: 419051 - DNA, 323 bp, Homo sapiens
caggccaactagataagttatcacaaatagcctgggttttaaatgtgaaagatattaattgaaaataagttgtcaagtgactactacatttttattccagatataaacgaatgcttggtaaataatggtggatgttctcatatctgcaaagacctagttataggctacgagtgtgactgtgcagctgggtttgaactgatagataggaaaacctgtggaggtgagtctaagaagaaaacctggaccctgcaggtgatgggaaaggatagtatgtacctagtaaggtataggagcagcaagactaattctgatttccctcccag

SEQ ID NO: 419052 - DNA, 592 bp, Homo sapiens
agccttcaaaccttcctaaggctgagtttccttccactttgttggagcaagtcaagagaaaaccaggagaacatgcctagtctcctttctctgagccttcacgctaaacctcgggcaaatagtgagagccagtcctggtccctcacctcccttccccacctcctcttttggcatctgtctcttaaaggcataacttttacagtctatctcgaagaggtcccttatctggtgtccttagagcatgctgcctgtacctgtatacttattcttccttgatactgttctcacttgaaggattagcagagtagacaagtttaagctcttgggggcaaggactcaggtcttcaacatgtagaacaaggctttatatatactaggcaccggaatacccattttaatggtattttttttcctgactaggtaaaaattggtgtgaagaagacatggagaatggaggatgtgaatacctatgcctgccagcaccacagattaatgatcactctccaaaatatacctgttcctgtcccagtgggtacaatgtagaggaaaatggccgagactgtcaaagtaaggcattttgtgtttcaaccac

SEQ ID NO: 419053 - DNA, 565 bp, Homo sapiens
ttaaaacttgcatatcttttcctgactgatcttaaaggtttctagtagagaactgtcagtgaaatggctactacagcatgtgactcaaatacttctaagccagagttgttcctggtgttcaattgttgtagatactgaacatcaatattggatgcaaaggttttggctccttacctgatgggtaaatttctaagtctgaatacagatccttctaaactgattccttttattcctctgtagggatcaatgtgaccacagcagtatcagaggtcagtgttcccccaaaagggacttctgccgcatgggccattcttcctctctgtaagtagatttcctacaagtctgggttcaagaacttcttagataccagatgaagattttttgttcatctggagctacccctttcatgggcctttatgctgtctagcatttatgacactgaattacgttcgctttctcccccacataatacactaaattaaggcccatatctttctcttcagttgtacctttggcacagtaactggcaatgataagtgttcaacggttaatgctttctacttcc

SEQ ID NO: 419054 - DNA, 3558 bp, Homo sapiens
  misc_feature (269)..(269): n is a, c, g, or t
  misc_feature (275)..(275): n is a, c, g, or t
  misc_feature (277)..(278): n is a, c, g, or t
  misc_feature (351)..(351): n is a, c, g, or t
ctcaccccgctctccggccgccgccggtgcgggtgctccgctaccggctcctctccgttctgtgctctcttctgctctcggctccccaccccctctcccttccctcctctccccttgcctcccctcctctgcagcgcctgcattattttctgcccgcaggctcggcttgcactgctgctgcagcccggggaggtggctgggtgggtggggaggagactgtgcaagttgtaggggagggggtgccctcttcttccccgctcccttccccngccaantnnttcccctccttctccccctttcccctccccgcccccaccttcttcctcctttcggaagggctggtaacttgtngtgcggagcgaacggcggcggcggcggcggcggcaccatccaggcgggcaccatgggcacgtccgcgctctgggcgctctggctgctgctcgcgctgtgctgggcgccccgggagagcggcgccaccggaaccgggagaaaagccaaatgtgaaccctcccaattccagtgcacaaatggtcgctgtattacgctgttgtggaaatgtgatggggatgaagactgtgttgacggcagtgatgaaaagaactgtgtaaagaagacgtgtgctgaatctgacttcgtgtgcaacaatggccagtgtgttcccagccgatggaagtgtgatggagatcctgactgcgaagatggttcagatgaaagcccagaacagtgccatatgagaacatgccgcatacatgaaatcagctgtggcgcccattctactcagtgtatcccagtgtcctggagatgtgatggtgaaaatgattgtgacagtggagaagatgaagaaaactgtggcaatataacatgtagtcccgacgagttcacctgctccagtggccgctgcatctccaggaactttgtatgcaatggccaggatgactgcagcgatggcagtgatgagctggactgtgccccgccaacctgtggcgcccatgagttccagtgcagcacctcctcctgcatccccatcagctgggtatgcgacgatgatgcagactgctccgaccaatctgatgagtccctggagcagtgtggccgtcagccagtcatacacaccaagtgtccagccagcgaaatccagtgcggctctggcgagtgcatccataagaagtggcgatgtgatggggaccctgactgcaaggatggcagtgatgaggtcaactgtccctctcgaacttgccgacctgaccaatttgaatgtgaggatggcagctgcatccatggcagcaggcagtgtaatggtatccgagactgtgtcgatggttccgatgaagtcaactgcaaaaatgtcaatcagtgcttgggccctggaaaattcaagtgcagaagtggagaatgcatagatatcagcaaagtatgtaaccaggagcaggactgcagggactggagtgatgagcccctgaaagagtgtcatataaacgaatgcttggtaaataatggtggatgttctcatatctgcaaagacctagttataggctacgagtgtgactgtgcagctgggtttgaactgatagataggaaaacctgtggagatattgatgaatgccaaaatccaggaatctgcagtcaaatttgtatcaacttaaaaggcggttacaagtgtgaatgtagtcgtggctatcaaatggatcttgctactggcgtgtgcaaggcagtaggcaaagagccaagtctgatcttcactaatcgaagagacatcaggaagattggcttagagaggaaagaatatatccaactagttgaacagctaagaaacactgtggctctcgatgctgacattgctgcccagaaactattctgggccgatctaagccaaaaggctatcttcagtgcctcaattgatgacaaggttggtagacatgttaaaatgatcgacaatgtctataatcctgcagccattgctgttgattgggtgtacaagaccatctactggactgatgcggcttctaagactatttcagtagctaccctagatggaaccaagaggaagttcctgtttaactctgacttgcgagagcctgcctccatagctgtggacccactgtctggctttgtttactggtcagactggggtgaaccagctaaaatagaaaaagcaggaatgaatggattcgatagacgtccactggtgacagcggatatccagtggcctaacggaattacacttgaccttataaaaagtcgcctctattggcttgattctaagttgcacatgttatccagcgtggacttgaatggccaagatcgtaggatagtactaaagtctctggagttcctagctcatcctcttgcactaacaatatttgaggatcgtgtctactggatagatggggaaaatgaagcagtctatggtgccaataaattcactggatcagagctagccactctagtcaacaacctgaatgatgcccaagacatcattgtctatcatgaacttgtacagccatcaggtaaaaattggtgtgaagaagacatggagaatggaggatgtgaatacctatgcctgccagcaccacagattaatgatcactctccaaaatatacctgttcctgtcccagtgggtacaatgtagaggaaaatggccgagactgtcaaaggatcaatgtgaccacagcagtatcagaggtcagtgttcccccaaaagggacttctgccgcatgggccattcttcctctcttgctcttagtgatggcagcagtaggtggctacttgatgtggcggaattggcaacacaagaacatgaaaagcatgaactttgacaatcctgtgtacttgaaaaccactgaagaggacctctccatagacattggtagacacagtgcttctgttggacacacgtacccagcaatatcagttgtaagcacagatgatgatctagcttgacttctgtgacaaatgttgacctttgaggtctaaacaaataatacccccgtcggaatggtaaccgagccagcagctgaagtctctttttcttcctctcggctggaagaacatcaagatacctttgcgtggatcaagcttgtgtacttgaccgtttttatattacttttgtaaatattcttgtccacattctacttcagctttggatgtggttaccgagtatctgtaacccttgaatttctagacagtattgccacctctggccaaatatgcactttccctagaaagccatattccagcagtgaaacttgtgctatagtgtataccacctgtacatacattgtataggccatctgtaaatatcccagagaacaatcactattcttaagcactttgaaaatatttctatgtaaattattgtaaactttttcaatggttgggacaatggcaataggacaaaacgggttactaagatgaaattgccaaaaaaatttataaactaattttgtacgtatgaatgatatctttgacctcaatggaggtttgcaaagactgagtgttcaaactactgtacattttttttcaagtgctaaaaaattaaaccaagcagcttaaccatg

SEQ ID NO: 419055 - DNA, 2273 bp, Homo sapiens
caggccaactagataagttatcacaaatagcctgggttttaaatgtgaaagatattaattgaaaataagttgtcaagtgactactacatttttattccagatataaacgaatgcttggtaaataatggtggatgttctcatatctgcaaagacctagttataggctacgagtgtgactgtgcagctgggtttgaactgatagataggaaaacctgtggagatattgatgaatgccaaaatccaggaatctgcagtcaaatttgtatcaacttaaaaggcggttacaagtgtgaatgtagtcgtggctatcaaatggatcttgctactggcgtgtgcaaggcagtaggcaaagagccaagtctgatcttcactaatcgaagagacatcaggaagattggcttagagaggaaagaatatatccaactagttgaacagctaagaaacactgtggctctcgatgctgacattgctgcccagaaactattctgggccgatctaagccaaaaggctatcttcagtgcctcaattgatgacaaggttggtagacatgttaaaatgatcgacaatgtctataatcctgcagccattgctgttgattgggtgtacaagaccatctactggactgatgcggcttctaagactatttcagtagctaccctagatggaaccaagaggaagttcctgtttaactctgacttgcgagagcctgcctccatagctgtggacccactgtctggctttgtttactggtcagactggggtgaaccagctaaaatagaaaaagcaggaatgaatggattcgatagacgtccactggtgacagcggatatccagtggcctaacggaattacacttgaccttataaaaagtcgcctctattggcttgattctaagttgcacatgttatccagcgtggacttgaatggccaagatcgtaggatagtactaaagtctctggagttcctagctcatcctcttgcactaacaatatttgaggatcgtgtctactggatagatggggaaaatgaagcagtctatggtgccaataaattcactggatcagagctagccactctagtcaacaacctgaatgatgcccaagacatcattgtctatcatgaacttgtacagccatcaggtaaaaattggtgtgaagaagacatggagaatggaggatgtgaatacctatgcctgccagcaccacagattaatgatcactctccaaaatatacctgttcctgtcccagtgggtacaatgtagaggaaaatggccgagactgtcaaagtactgcaactactgtgacttacagtgagacaaaagatacgaacacaacagaaatttcagcaactagtggactagttcctggagggatcaatgtgaccacagcagtatcagaggtcagtgttcccccaaaagggacttctgccgcatgggccattcttcctctcttgctcttagtgatggcagcagtaggtggctacttgatgtggcggaattggcaacacaagaacatgaaaagcatgaactttgacaatcctgtgtacttgaaaaccactgaagaggacctctccatagacattggtagacacagtgcttctgttggacacacgtacccagcaatatcagttgtaagcacagatgatgatctagcttgacttctgtgacaaatgttgacctttgaggtctaaacaaataatacccccgtcggaatggtaaccgagccagcagctgaagtctctttttcttcctctcggctggaagaacatcaagatacctttgcgtggatcaagcttgtgtacttgaccgtttttatattacttttgtaaatattcttgtccacattctacttcagctttggatgtggttaccgagtatctgtaacccttgaatttctagacagtattgccacctctggccaaatatgcactttccctagaaagccatattccagcagtgaaacttgtgctatagtgtataccacctgtacatacattgtataggccatctgtaaatatcccagagaacaatcactattcttaagcactttgaaaatatttctatgtaaattattgtaaactttttcaatggttgggacaatggcaataggacaaaacgggttactaagatgaaattgccaaaaaaatttataaactaattttgtacgtatgaatgatatctttgacctcaatggaggtttgcaaagactgagtgttcaaactactgtacattttttttcaagtgctaaaaaattaaaccaagcagcttaaccatg

SEQ ID NO: 419056 - DNA, 232 bp, Homo sapiens
gcaaagagccaagtctgatcttcactaatcgaagagacatcaggaagattggcttagagaggaaagaatatatccaactagttgaacagctaagaaacactgtggctctcgatgctgacattgctgcccagaaactattctgggccgatctaagccaaaaggctatcttcaggtaactttcagttccttttgtggtgtcttgacataagtcattgtcacttgggaagtgatc

SEQ ID NO: 419057 - DNA, 3981 bp, Homo sapiens
  misc_feature (106)..(106): n is a, c, g, or t
  misc_feature (560)..(560): n is a, c, g, or t
gcgccgcggtgcccggcgcgccctccaagctaggagaggggagaagccgggggctgcagctgggcaagggggaggaaagtgcgtgtgcgtgcacgcctgtgtgcanggcagagagtgcggggggcgacagtctcggcttagggcggaggagagggcaggggaacggcggtgcagctcccccgctgtccccgaggatttcccgcggcagccccgggctccccagtgcccctcaccatggacttgcgcggagttgggacgggcctcggcagcagcaagcggctggctgccgggccctgggggagcgcgggcgcgcgcgcggggatggcgaggtaggatggccacccagcgcgacccccgccgccccaacccagcggcccctgggcggtgccgctgactcgccggagcgcacaggggtgtgggcggaggcggcctcgccgcgcccgcgccttcgggagtcgcctcgcctcttccacccacttgcacctgccaccccgcggataccatgtcgaaggcggccggaggcgcggcggcggctgcggcggcggcggaaagttgttccncagccccggccggctcgtccgcggccccgcccgcgccggtggaggacctgtccaaagtgtcggacgaggagctgctgcagtggagcaaggaggagctgatccgcagcctgcggcgcgccgaggcggagaaggtgagcgcgatgctggaccacagcaacctcatccgcgaggtgaaccgccgcctgcagctgcacctcggcgagatccgcggcctcaaggatatcaaccagaaactccaggaagacaaccaggaactgagggacctctgctgtttcctggatgatgaccggcagaaaggcaagagggtgtctcgggagtggcagagactgggtcgctacactgccggggtgatgcacaaggaagtggccttatacctgcagaagctgaaagacctggaggtgaagcaggaggaagtggtgaaggagaacatggagctcaaggagctctgtgtgctactagatgaggagaagggtgcaggctgcgcaggcagccgctgctccatcgacagccaggccagcctgtgccaactcacagcctccaccgcaccctacgtgcgggatgtgggtgacggcagcagcacctccagcactggcagcactgacagcccggaccaccacaagcaccacgcgagcagtggcagcccggagcacctgcagaagccccggagcgagggcagcccggagcactccaagcacaggagcgccagccccgagcatccacagaaacccagagcctgtggaaccccagatcgccccaaagcactcaaaggacctagcccggagcaccacaaacccttgtgcaagggcagccccgaacagcaaaggcacccgcatccagggagcagccccgaaacgctgcccaagcacgtgctgagtgggagcccggaacacttccagaagcaccggtcagggagcagccctgaacacgccaggcacagtggagggagcccggagcatcttcagaaacacgctcttggggggagcctagagcatctccccagagccaggggcaccagcccggagcacctcaaacaacattatggagggagccctgatcacaaacacggaggaggcagtggaggaagtggaggcagcggcggaggcagcagggagggcaccctcagacggcaggcacaggaggacgggtcaccccatcaccggaatgtctacagtggcatgaacgaatcaaccttgtcctatgttaggcagctggaggcaagagtaagacagctggaggaagaaaatcgcatgctgccccaggccagccagaatagaaggcaacctccaactagaaacagctcaaatatggagaaaggctgggggtccagagcccggcgggtcttgcagtggtggcaagggtgccgaggaataggacgatgcctgcctactctcccgggttcttttaggttgtcatcaggggctgatgggagtaacagttcacccaactctgcagctagcttcagtggacatgccacaccttcccagcagcctgaacctgtggtacattctcttaaggttgtgtggaggaaacttggagatgctgcaggttcgtgtcctggaattaggcaacatttgtcaggaaaccagtacaaaggaccaatgtgagatgcactctttttcaaacaggagatcaccactgccagaaagtgatagaagacaagaagaaaaaggaaagagtgggtttccacaaacctggactcatggaataacatggagtgattgtacattgcacatatctcccctctaaaacctgtagtacaacttctcccctcaagctgatattctgtgtctctcacctcaatgtccacaacagtcaatctcaaacaaggtagctttgaacatctcaaacagagtagctttgaaaatcaacattttggtaccagtgttttcattagaaataagtgtttttaactccccagatataatattgtaattgggaaacctgaatagttttaagagtccagtggagcctcagtgttttgaatagagatgactcattacacataatggtaggagttttctaccatatcatattgaagatatgaagaggtattttccagcttcccaagtttgagagttgggcatttacctcttacacttcagtcaacaaacaaactagtaattcctaatgcataattaatttggatgcaagataagattaagtttctggagttttgttttgacttctgaggtgctaaaaaataccatgtaaattctccctaccagctagaagggtagcaagacgttgtagagtgcttatcagagagtaccatttacttcaattgatcaatataaatatatctttttttttcatcttaatgagtttctcataaagacacatcttggggcataccaaccttcatattcattcagtgtatccattggtgttaatattaacaatttcaactaaaaacaacaaacataatttttctaagtgtttcgagctgtgagatgtcaatttctacaatttagtttctagacatgctgtatatttaataaactttatgtaaactttaaaatattgcactgcatttatgaaaaaagctttctttgcctactgcagctatctaacattttatgaaactgacgcatgtccttcattattgaggctaaaagctcttgttcagattgcttgaggtttgaaaaagaggtgtgctagctttgcttagtttatttcttatttttggtatacatatacatatatataacattagaatgtgtgtactggaaatgctatgataggtattttgtgttaatccaaatgcaatgatagtttcttgtatgaatgtgcaagaggcctgtgaccgaatgctacgtttttatggtagtttaagattataaaagtagaaatgcaacaattcccagtttttggataggttctaaatttctgagatttgattcatggcagatattctctgttgttgttgttttagatgggctcattacataacgagttaattgtcactagtaggagactgtgaaggaattttgttatactttcaaaaatgttactgtgatgaaaaatcatctattttcagaaaatatttatgaattaatttactatagaattatctctctaattatcataattgggttacaatttaagctccccttttaaatgttatattttaaaatgttattactctataaaagaaaattgcttgctatatttacaccttctttcctaggaaagctttcatccttaaattgttgtattcctaccctctgaagacatttaaaataagcttttgtgcctgcagcagagcctgcagaagctaatacaagggacactggtcttttgacaaaataaacttgtgtaaattttgatactgtattaaaactatttttttaaagttctgcataaaattgagtattaagtatatgtgttcatcttagcaatggtaataaattatttaatctca

SEQ ID NO: 419058 - DNA, 2007 bp, Homo sapiens
tctggttttgccctgttctaagtaatcaaccttgtcctatgttaggcagctggaggcaagagtaagacagctggaggaagaaaatcgcatgctgccccaggttgtgtggaggaaacttggagatgctgcaggttcgtgtcctggaattaggcaacatttgtcaggaaaccagtacaaaggaccaatgtgagatgcactctttttcaaacaggagatcaccactgccagaaagtgatagaagacaagaagaaaaaggaaagagtgggtttccacaaacctggactcatggaataacatggagtgattgtacattgcacatatctcccctctaaaacctgtagtacaacttctcccctcaagctgatattctgtgtctctcacctcaatgtccacaacagtcaatctcaaacaaggtagctttgaacatctcaaacagagtagctttgaaaatcaacattttggtaccagtgttttcattagaaataagtgtttttaactccccagatataatattgtaattgggaaacctgaatagttttaagagtccagtggagcctcagtgttttgaatagagatgactcattacacataatggtaggagttttctaccatatcatattgaagatatgaagaggtattttccagcttcccaagtttgagagttgggcatttacctcttacacttcagtcaacaaacaaactagtaattcctaatgcataattaatttggatgcaagataagattaagtttctggagttttgttttgacttctgaggtgctaaaaaataccatgtaaattctccctaccagctagaagggtagcaagacgttgtagagtgcttatcagagagtaccatttacttcaattgatcaatataaatatatctttttttttcatcttaatgagtttctcataaagacacatcttggggcataccaaccttcatattcattcagtgtatccattggtgttaatattaacaatttcaactaaaaacaacaaacataatttttctaagtgtttcgagctgtgagatgtcaatttctacaatttagtttctagacatgctgtatatttaataaactttatgtaaactttaaaatattgcactgcatttatgaaaaaagctttctttgcctactgcagctatctaacattttatgaaactgacgcatgtccttcattattgaggctaaaagctcttgttcagattgcttgaggtttgaaaaagaggtgtgctagctttgcttagtttatttcttatttttggtatacatatacatatatataacattagaatgtgtgtactggaaatgctatgataggtattttgtgttaatccaaatgcaatgatagtttcttgtatgaatgtgcaagaggcctgtgaccgaatgctacgtttttatggtagtttaagattataaaagtagaaatgcaacaattcccagtttttggataggttctaaatttctgagatttgattcatggcagatattctctgttgttgttgttttagatgggctcattacataacgagttaattgtcactagtaggagactgtgaaggaattttgttatactttcaaaaatgttactgtgatgaaaaatcatctattttcagaaaatatttatgaattaatttactatagaattatctctctaattatcataattgggttacaatttaagctccccttttaaatgttatattttaaaatgttattactctataaaagaaaattgcttgctatatttacaccttctttcctaggaaagctttcatccttaaattgttgtattcctaccctctgaagacatttaaaataagcttttgtgcctgcagcagagcctgcagaagctaatacaagggacactggtcttttgacaaaataaacttgtgtaaattttgatactgtattaaaactatttttttaaagttctgcataaaattgagtattaagtatatgtgttcatcttagcaatggtaataaattatttaatctca

SEQ ID NO: 419059 - DNA, 290 bp, Homo sapiens
tgaactcattcatgtggatattttgtctcttgtctttacttcatcttcgctcctctcttaatttacccttaagaaatgcaaatctccttgtgaaagaggaaaagtaagatactcactccttctttttttttttaaggttgtgtggaggaaacttggagatgctgcaggttcgtgtcctggaattaggcaacatttgtcaggaaaccagtacaaaggaccaatgtgagatgcactctttttcaaacaggagatcaccactgccagaaagtgatagaagacaagaagaaaaa

SEQ ID NO: 419060 - DNA, 3726 bp, Homo sapiens
  misc_feature (106)..(106): n is a, c, g, or t
  misc_feature (560)..(560): n is a, c, g, or t
gcgccgcggtgcccggcgcgccctccaagctaggagaggggagaagccgggggctgcagctgggcaagggggaggaaagtgcgtgtgcgtgcacgcctgtgtgcanggcagagagtgcggggggcgacagtctcggcttagggcggaggagagggcaggggaacggcggtgcagctcccccgctgtccccgaggatttcccgcggcagccccgggctccccagtgcccctcaccatggacttgcgcggagttgggacgggcctcggcagcagcaagcggctggctgccgggccctgggggagcgcgggcgcgcgcgcggggatggcgaggtaggatggccacccagcgcgacccccgccgccccaacccagcggcccctgggcggtgccgctgactcgccggagcgcacaggggtgtgggcggaggcggcctcgccgcgcccgcgccttcgggagtcgcctcgcctcttccacccacttgcacctgccaccccgcggataccatgtcgaaggcggccggaggcgcggcggcggctgcggcggcggcggaaagttgttccncagccccggccggctcgtccgcggccccgcccgcgccggtggaggacctgtccaaagtgtcggacgaggagctgctgcagtggagcaaggaggagctgatccgcagcctgcggcgcgccgaggcggagaaggtgagcgcgatgctggaccacagcaacctcatccgcgaggtgaaccgccgcctgcagctgcacctcggcgagatccgcggcctcaaggatatcaaccagaaactccaggaagacaaccaggaactgagggacctctgctgtttcctggatgatgaccggcagaaaggcaagagggtgtctcgggagtggcagagactgggtcgctacactgccggggtgatgcacaaggaagtggccttatacctgcagaagctgaaagacctggaggtgaagcaggaggaagtggtgaaggagaacatggagctcaaggagctctgtgtgctactagatgaggagaagggtgcaggctgcgcaggcagccgctgctccatcgacagccaggccagcctgtgccaactcacagcctccaccgcaccctacgtgcgggatgtgggtgacggcagcagcacctccagcactggcagcactgacagcccggaccaccacaagcaccacgcgagcagtggcagcccggagcacctgcagaagccccggagcgagggcagcccggagcactccaagcacaggagcgccagccccgagcatccacagaaacccagagcctgtggaaccccagatcgccccaaagcactcaaaggacctagcccggagcaccacaaacccttgtgcaagggcagccccgaacagcaaaggcacccgcatccagggagcagccccgaaacgctgcccaagcacgtgctgagtgggagcccggaacacttccagaagcaccggtcagggagcagccctgaacacgccaggcacagtggagggagcccggagcatcttcagaaacacgctcttggggggagcctagagcatctccccagagccaggggcaccagcccggagcacctcaaacaacattatggagggagccctgatcacaaacacggaggaggcagtggaggaagtggaggcagcggcggaggcagcagggagggcaccctcagacggcaggcacaggaggacgggtcaccccatcaccggaatgtctacagtggcatgaacgaatcaaccttgtcctatgttaggcagctggaggcaagagtaagacagctggaggaagaaaatcgcatgctgccccaggttgtgtggaggaaacttggagatgctgcaggttcgtgtcctggaattaggcaacatttgtcaggaaaccagtacaaaggaccaatgtgagatgcactctttttcaaacaggagatcaccactgccagaaagtgatagaagacaagaagaaaaaggaaagagtgggtttccacaaacctggactcatggaataacatggagtgattgtacattgcacatatctcccctctaaaacctgtagtacaacttctcccctcaagctgatattctgtgtctctcacctcaatgtccacaacagtcaatctcaaacaaggtagctttgaacatctcaaacagagtagctttgaaaatcaacattttggtaccagtgttttcattagaaataagtgtttttaactccccagatataatattgtaattgggaaacctgaatagttttaagagtccagtggagcctcagtgttttgaatagagatgactcattacacataatggtaggagttttctaccatatcatattgaagatatgaagaggtattttccagcttcccaagtttgagagttgggcatttacctcttacacttcagtcaacaaacaaactagtaattcctaatgcataattaatttggatgcaagataagattaagtttctggagttttgttttgacttctgaggtgctaaaaaataccatgtaaattctccctaccagctagaagggtagcaagacgttgtagagtgcttatcagagagtaccatttacttcaattgatcaatataaatatatctttttttttcatcttaatgagtttctcataaagacacatcttggggcataccaaccttcatattcattcagtgtatccattggtgttaatattaacaatttcaactaaaaacaacaaacataatttttctaagtgtttcgagctgtgagatgtcaatttctacaatttagtttctagacatgctgtatatttaataaactttatgtaaactttaaaatattgcactgcatttatgaaaaaagctttctttgcctactgcagctatctaacattttatgaaactgacgcatgtccttcattattgaggctaaaagctcttgttcagattgcttgaggtttgaaaaagaggtgtgctagctttgcttagtttatttcttatttttggtatacatatacatatatataacattagaatgtgtgtactggaaatgctatgataggtattttgtgttaatccaaatgcaatgatagtttcttgtatgaatgtgcaagaggcctgtgaccgaatgctacgtttttatggtagtttaagattataaaagtagaaatgcaacaattcccagtttttggataggttctaaatttctgagatttgattcatggcagatattctctgttgttgttgttttagatgggctcattacataacgagttaattgtcactagtaggagactgtgaaggaattttgttatactttcaaaaatgttactgtgatgaaaaatcatctattttcagaaaatatttatgaattaatttactatagaattatctctctaattatcataattgggttacaatttaagctccccttttaaatgttatattttaaaatgttattactctataaaagaaaattgcttgctatatttacaccttctttcctaggaaagctttcatccttaaattgttgtattcctaccctctgaagacatttaaaataagcttttgtgcctgcagcagagcctgcagaagctaatacaagggacactggtcttttgacaaaataaacttgtgtaaattttgatactgtattaaaactatttttttaaagttctgcataaaattgagtattaagtatatgtgttcatcttagcaatggtaataaattatttaatctca

SEQ ID NO: 419061 - DNA, 1866 bp, Homo sapiens
  misc_feature (106)..(106): n is a, c, g, or t
  misc_feature (560)..(560): n is a, c, g, or t
gcgccgcggtgcccggcgcgccctccaagctaggagaggggagaagccgggggctgcagctgggcaagggggaggaaagtgcgtgtgcgtgcacgcctgtgtgcanggcagagagtgcggggggcgacagtctcggcttagggcggaggagagggcaggggaacggcggtgcagctcccccgctgtccccgaggatttcccgcggcagccccgggctccccagtgcccctcaccatggacttgcgcggagttgggacgggcctcggcagcagcaagcggctggctgccgggccctgggggagcgcgggcgcgcgcgcggggatggcgaggtaggatggccacccagcgcgacccccgccgccccaacccagcggcccctgggcggtgccgctgactcgccggagcgcacaggggtgtgggcggaggcggcctcgccgcgcccgcgccttcgggagtcgcctcgcctcttccacccacttgcacctgccaccccgcggataccatgtcgaaggcggccggaggcgcggcggcggctgcggcggcggcggaaagttgttccncagccccggccggctcgtccgcggccccgcccgcgccggtggaggacctgtccaaagtgtcggacgaggagctgctgcagtggagcaaggaggagctgatccgcagcctgcggcgcgccgaggcggagaaggtgagcgcgatgctggaccacagcaacctcatccgcgaggtgaaccgccgcctgcagctgcacctcggcgagatccgcggcctcaaggatatcaaccagaaactccaggaagacaaccaggaactgagggacctctgctgtttcctggatgatgaccggcagaaaggcaagagggtgtctcgggagtggcagagactgggtcgctacactgccggggtgatgcacaaggaagtggccttatacctgcagaagctgaaagacctggaggtgaagcaggaggaagtggtgaaggagaacatggagctcaaggagctctgtgtgctactagatgaggagaagggtgcaggctgcgcaggcagccgctgctccatcgacagccaggccagcctgtgccaactcacagcctccaccgcaccctacgtgcgggatgtgggtgacggcagcagcacctccagcactggcagcactgacagcccggaccaccacaagcaccacgcgagcagtggcagcccggagcacctgcagaagccccggagcgagggcagcccggagcactccaagcacaggagcgccagccccgagcatccacagaaacccagagcctgtggaaccccagatcgccccaaagcactcaaaggacctagcccggagcaccacaaacccttgtgcaagggcagccccgaacagcaaaggcacccgcatccagggagcagccccgaaacgctgcccaagcacgtgctgagtgggagcccggaacacttccagaagcaccggtcagggagcagccctgaacacgccaggcacagtggagggagcccggagcatcttcagaaacacgctcttggggggagcctagagcatctccccagagccaggggcaccagcccggagcacctcaaacaacattatggagggagccctgatcacaaacacggaggaggcagtggaggaagtggaggcagcggcggaggcagcagggagggcaccctcagacggcaggcacaggaggacgggtcaccccatcaccggaatgtctacagtggcatgaacggtgggtcagtatgtgctggggtgctgcttgggctggggaactcagtagagagttacgaatgatgatggactttccagccatgtaagaaagtgcaggcgctagctagggagtgggtttggggaag

SEQ ID NO: 419062 - DNA, 1964 bp, Homo sapiens
atgtcactgtgtttccttcgcaaattctctaaaatagtctgctgtgtcccggggcatagtagatattcaagaaatggtggctatgagttttatcacaattctctcctactgggtgagcagctgtttgcaagactaaaattcgggcgaggcacaggcttccccttggtcttagcagctagcacaagacgagtgtcccttcagccagtctcagagctctttggcaattcaactgacccttgtccttcagtccagacaatgccccagggcccacctgcattcaaactcggactgttctccttcccacccctattatcttttcaactttatggacagtacatgcaattttctcattcattttctcatttaacatctaacagcttcatgatatccccattttacagataaggaaaccaaggctttaagaggatagggaccctaatcggctaaggcagaattaggatttgaacccagatccccatgatgccagaatctaagccttgaccaaatatgtgttactattacttttgttgttgttgttgttctgggtaactccaaccctctgctcgttggccttgtcacctcagtgctgattttgcagatgaagagactaaggttccgaggtgctagagcacagtggttaggaacacacactctagagccagagtgcctgggtttgagcctcgttctgccgtttactagccgtatggccttgggcaacttgcttaacttctctttgcctcagttcctcttctcttgggttgttaggagaatgaatgaggtgatatccacagtgtccaacaccctgcaagcggccaggtgtggtggatcacacctgcaatcccagcactttgggaggccgaggcaggtggatcatttgaggtcaggagttcgagaccagtctggccaacatggcgaaacctcatttctactaaaaatacaaaaattagccgggcgtggtggcaaacaactgtaatccgagctactagggaggctgaggcagaagaatcgcttgaacccaggagacagaggttgcagtgagccaagattgcaccactgcactccagcctgggcgacagagtgagaccctgcctcaaaaactaaaataaaaaatgaacagtgtccaacaccttgaaagcattccgcatgactgaacgatcactgttacgtgattaccaacatgacgaccccacttctcttggccaaactgagttctcttctcttgtaaaaacttctgcatatgaagtcacccattccatttgactctttagccctcatcctggcattcaagggcatggacgactcaaccccactctctagccagcctgacctctccattcccttctctggcgtagaggccactcccaccacctgcccttaccccctgcccacttttgtcagcctgtactgtgttgaagctcccaggagagacaactgcagtcatcactttccactgtgttcagtgatgtcagttcggcccagctggaggtattcacatcatggaaacagaccatcagatttggtgtgtgtgtgttttattttgctttttcagagagccagctgttaaacactagccaacaccccattgatgctgttccttctacctgaaacacctcgcattgccggtgagctctaaagacaaaaggacctgggtctgcatttcccaaaggcaagactctggtatcacctgcatattattttcccatatttgagcaccactgccttttgcattatttacttagcagttttgctcctgtcaactcacttttttaaaactaaacttattttaaaaagaaaagttttggccgggagcggctggtctcaagctcctggactcaggtcatcctaccacctaggccttctaaagtgttaggatgagccctgaaccttgtaacatgaacatttattagttatatctggaaaaaaatataaagttatttttatttgggtgatactgccttcaaaaa

SEQ ID NO: 419063 - DNA, 568 bp, Homo sapiens
ctctcgaggacccccacgcagtatacagcctcatcttgcacagcccctccatacccagacctcacccactctatttgccatctccagaacatacccctaactttctcacctctgtgcctttgtgcaagctgctccctctacctggaaacctccatttgtcaagctgctgctgtcttcaagatctacctggtcagaatctcctgctgtcctcttctgccacccacagcaatgtgagccttcactggctggccttccctactcactggagcagagctacggcatcagaatgccctggagcaggggttagaaacacagatttctgagtctacactcgaagatttttttttctttctttctttttttttgttttccaatttttctaattttagagatggggtctcaccacgttgcccaggctggtctcaagctcctggactcaggtcatcctaccacctaggccttctaaagtgttaggatgagccctgaaccttgtaacatgaacatttattagttatatctggaaaaaaatataaagttatttttatttgggtgatactgccttcaaaaa

SEQ ID NO: 419064 - DNA, 730 bp, Homo sapiens
gcactccagcctccttgcaagcttggggcgcctcattctctcccgtgccccttctcccagctgggtctgagcccccgcccccctggctcctccgttctgcttctcccagcttctctgtccatctcccccaatggcctctctctacactctctgcctcagcttccaggtctctgctggtccctaggaagcactttgacctctgcttccccttcaaatgctgtggatcaagcctccccaaccccaccatcccaccaaagggggctgctgaccgagagagctcactcagccagctgctccctctacctggaaacctccatttgtcaagctgctgctgtcttcaagatctacctggtcagaatctcctgctgtcctcttctgccacccacagcaatgtgagccttcactggctggccttccctactcactggagcagagctacggcatcagaatgccctggagcaggggttagaaacacagatttctgagtctacactcgaagatttttttttctttctttctttttttttgttttccaatttttctaattttagagatggggtctcaccacgttgcccaggctggtctcaagctcctggactcaggtcatcctaccacctaggccttctaaagtgttaggatgagccctgaaccttgtaacatgaacatttattagttatatctggaaaaaaatataaagttatttttatttgggtgatactgccttcaaaaa

SEQ ID NO: 419065 - DNA, 363 bp, Homo sapiens
ccactgcacttcagcctgggtgacggagtgagactctgtctcaaaaaaagaaaaagaaaaagagtaccccttgccataaatagcaagcagtcattcagacatggaaatgaggcattcacacttgttcttgtttcacactaaggccctaagcctaaggagggtttctctatgttgaaaggaaattaggcagtgttcagaggggtgttaaagatagactagcaactaattgaaactttctcctcaatgtaagcactttagaagggactgaaaagagaatgttctccctacatgtaccatatcacctacaattacctcgtgtaccactattttgcaaataaatgccagaggcaagagtacattttg

SEQ ID NO: 419066 - DNA, 455 bp, Homo sapiens
cactcaaagccctcctcgatttgaatctttccagcctcatcttgcacagcccctccatacccagacctcacccactctatttgccatctcctgtcctcttctgccacccacagcaatgtgagccttcactggctggccttccctactcactggagcagagctacggcatcagaatgccctggagcaggggttagaaacacagatttctgagtctacactcgaagatttttttttctttctttctttttttttgttttccaatttttctaattttagagatggggtctcaccacgttgcccaggctggtctcaagctcctggactcaggtcatcctaccacctaggccttctaaagtgttaggatgagccctgaaccttgtaacatgaacatttattagttatatctggaaaaaaatataaagttatttttatttgggtgatactgccttcaaaaa

SEQ ID NO: 419067 - DNA, 505 bp, Homo sapiens
gcactccagcctccttgcaagcttggggcgcctcattctctcccgtgccccttctcccagctgggtctgagcccccgcccccctggctcctccgttctgcttctcccagcttctctgtccatctcccccaatggcctctctctacactctctgcctcagcttccaggtctctgctggtccctaggaagcactttgacctctgcttccccttcaaatgctgtggatcaagcctccccaaccccaccatcccaccaaagggggctgctgaccgagagagctcactcagccaggatgagggcaaaagagtttaagatggtggagccttattatgcaaaggaacccaatcccagcgtccactggaagaagactgcccaggacttctaccttcccgggaacatctgcccagagtccaccagctggaagaagactgcccaggacttctaccttcctgggaacatctgcatcagactctgtggggtagggaaataaaccttcattgtgttca

SEQ ID NO: 419068 - DNA, 281 bp, Homo sapiens
ctgggcgacagagcgagactccctctcaaaaaaaaaaaaaaaaaaaaaaagttaacatttagaataattttaaattagatttaattaaaatattatttatatattatacaaatataatgttatatttagtttaaaataatttggtttaaattaaaattttatttataaaaataactttttattttaaaaattaaagaaaataacttcacctgttccattttactttttatttttttaagagccagattcttactctgtcacccaggctggcatgatcatag

SEQ ID NO: 419069 - DNA, 908 bp, Homo sapiens
caggagacggggagtccgccagcggatggggatgtagaacgggcagcctctaatggcgcctgctggtgaggtggggtgcctgtggccatacaggaaaggggagcagctcccacctcgaggctctgtctgcctcagatgggggtctcgctctgttgcccaggctggagtgcagtggtgcaatcttggctcactgcaacctccgcctcccgggttcaagcaattctcctgcctgagcctcccgagtatctggaactacagagccagattcttactctgtcacccaggctggcatgatcatagctcacttcagcctagaactcctggcttcaagcaatcctcccacctcagcatcccaagtagctggaactacagagagccagctgttaaacactagccaacaccccattgatgctgttccttctacctgaaacacctcgcattgccggtgagctctaaagacaaaaggacctgggtctgcatttcccaaaggcaagactctggtatcacctgcatattattttcccatatttgagcaccactgccttttgcattatttacttagcagttttgctcctgtcaactcacttttttaaaactaaacttattttaaaaagaaaagttttggccgggagcggtggctcatgcctgtaatcccagcactttgggaggccgaggtgggcagatcacctgaggtcgggagttcgagaccagcctgaccaacatggagaaactccgtctctactaaaaatacaaaattagctgggcgtggtggcgcatgcctgtaatcctagctactcgggaggctgtggcaggagaattgcttgaacccaggaggcgggggttgcagtgagtcgagatcgccccattgtactccagcctggggaacaagaacgaaactccgtctcaaa

SEQ ID NO: 419070 - DNA, 889 bp, Homo sapiens
gcactccagcctccttgcaagcttggggcgcctcattctctcccgtgccccttctcccagctgggtctgagcccccgcccccctggctcctccgttctgcttctcccagcttctctgtccatctcccccaatggcctctctctacactctctgcctcagcttccaggtctctgctggtccctaggaagcactttgacctctgcttccccttcaaatgctgtggatcaagcctccccaaccccaccatcccaccaaagggggctgctgaccgagagagctcactcagccagatgggggtctcgctctgttgcccaggctggagtgcagtggtgcaatcttggctcactgcaacctccgcctcccgggttcaagcaattctcctgcctgagcctcccgagtatctggaactacagagccagattcttactctgtcacccaggctggcatgatcatagctcacttcagcctagaactcctggcttcaagcaatcctcccacctcagcatcccaagtagctggaactacagagagccagctgttaaacactagccaacaccccattgatgctgttccttctacctgaaacacctcgcattgccggtggagtctcgctctatggcccaggcaaatctcggtcactacaaactccgctcccaggttcgggcgttctccttcttcagcttctgagtagttgaacttacaggcacccgcaaaatacccatctaaattgggattatagtagagaacgacgtttcaccatggttggccaggtgtctcgaactccgggctcagcagtctccgctgggctcccaagtggttggatgcggcttagtccccgggctggcaatggattttatagcagaggacacgtaagacttctaatttctag

SEQ ID NO: 419071 - DNA, 2085 bp, Homo sapiens
atgtcactgtgtttccttcgcaaattctctaaaatagtctgctgtgtcccggggcatagtagatattcaagaaatggtggctatgagttttatcacaattctctcctactgggtgagcagctgtttgcaagactaaaattcgggcgaggcacaggcttccccttggtcttagcagctagcacaagacgagtgtcccttcagccagtctcagagctctttggcaattcaactgacccttgtccttcagtccagacaatgccccagggcccacctgcattcaaactcggactgttctccttcccacccctattatcttttcaactttatggacagtacatgcaattttctcattcattttctcatttaacatctaacagcttcatgatatccccattttacagataaggaaaccaaggctttaagaggatagggaccctaatcggctaaggcagaattaggatttgaacccagatccccatgatgccagaatctaagccttgaccaaatatgtgttactattacttttgttgttgttgttgttctgggtaactccaaccctctgctcgttggccttgtcacctcagtgctgattttgcagatgaagagactaaggttccgaggtgctagagcacagtggttaggaacacacactctagagccagagtgcctgggtttgagcctcgttctgccgtttactagccgtatggccttgggcaacttgcttaacttctctttgcctcagttcctcttctcttgggttgttaggagaatgaatgaggtgatatccacagtgtccaacaccctgcaagcggccaggtgtggtggatcacacctgcaatcccagcactttgggaggccgaggcaggtggatcatttgaggtcaggagttcgagaccagtctggccaacatggcgaaacctcatttctactaaaaatacaaaaattagccgggcgtggtggcaaacaactgtaatccgagctactagggaggctgaggcagaagaatcgcttgaacccaggagacagaggttgcagtgagccaagattgcaccactgcactccagcctgggcgacagagtgagaccctgcctcaaaaactaaaataaaaaatgaacagtgtccaacaccttgaaagcattccgcatgactgaacgatcactgttacgtgattaccaacatgacgaccccacttctcttggccaaactgagttctcttctcttgtaaaaacttctgcatatgaagtcacccattccatttgactctttagccctcatcctggcattcaagggcatggacgactcaaccccactctctagccagcctgacctctccattcccttctctggcgtagaggccactcccaccacctgcccttaccccctgcccacttttgtcagcctgtactgtgttgaagctcccaggagagacaactgcagtcatcactttccactgtgttcagtgatgtcagttcggcccagctggaggtattcacatcatggaaacagaccatcagatttggtgtgtgtgtgttttattttgctttttcagagagccagctgttaaacactagccaacaccccattgatgctgttccttctacctgaaacacctcgcattgccggtgagctctaaagacaaaaggacctgggtctgcatttcccaaaggcaagactctggtatcacctgcatattattttcccatatttgagcaccactgccttttgcattatttacttagcagttttgctcctgtcaactcacttttttaaaactaaacttattttaaaaagaaaagttttggccgggagcggtggctcatgcctgtaatcccagcactttgggaggccgaggtgggcagatcacctgaggtcgggagttcgagaccagcctgaccaacatggagaaactccgtctctactaaaaatacaaaattagctgggcgtggtggcgcatgcctgtaatcctagctactcgggaggctgtggcaggagaattgcttgaacccaggaggcgggggttgcagtgagtcgagatcgccccattgtactccagcctggggaacaagaacgaaactccgtctcaaa

SEQ ID NO: 419072 - DNA, 474 bp, Homo sapiens
ctaaacaatcaaggaagtgcagtgggctgtgtggttcttccccagccttcatccctccctgggctgtgtcatttgctgtgtgattttgaggttcctccttctaaagatgagttatgctttaaaccatacaaacagaaaactaacattggaacctaaaattactgtcaatgccaagatcattgtggttggtgcatccagtgttggaatttccttcctagagacattggtattttggtgagttgtttcactctattgattgattggtttttaaataataaaaattatcttcctacatctgaagagaacaccatcagagaacagacctgagattgtttggtactccacacaccctgcctatgtggatggatgaatcagtagaagaatattctagatcaggggttagcaaactatagccctgaggccaggcctggcttgccaactgcttttgtaaataaagctttattggaacacaaa

SEQ ID NO: 419073 - DNA, 609 bp, Homo sapiens
cgcggagaggagaggagccagaagttgagttcaaccaccagtggccaatgatttcatcaaccatgcctacacgatgaagcctccataaaaccctaaccaaagcggttaggagaacttctgggtgagaagtcatttctccagtttgtggctgaccctgtattgagaatgatacctggagtgccagctagctgacacatgtcagataggattcgagtagaatgttgcagaaacccggaggccatttctgaacactttacactactcaaggtggcaaaggagagacatggagccatttgaggcactcaatcgttgcattgcaagaaaacatggaattacatccattcctccaatgactaatatttgcttcactaatatcaaatttgcaccttgctgctcagtttctgggcctttatgggaacacaacaataagcattcatttcaatgccaaatcatgctgtaatctttttgaagacattgtcagaagcacttaaactcaacacatattgtgcgtataatgcacatgactctcttgaagtgatgacaatgaacagccatggccaagcacccatgcacaggtcagaagacttcatcatacctggcgatggatat

SEQ ID NO: 419074 - DNA, 2061 bp, Homo sapiens
  misc_feature (1545)..(1545): n is a, c, g, or t
  misc_feature (1664)..(1664): n is a, c, g, or t
  misc_feature (1923)..(1923): n is a, c, g, or t
  misc_feature (1938)..(1938): n is a, c, g, or t
  misc_feature (2012)..(2012): n is a, c, g, or t
tgcgggcagcgcgtggagtgcggcgtcctggagctgcggatgaggtgggtaacgccgtgctgactagcagcgacgcaaggactgcggtgcagggcgtccagggcgcatccccaggataaaaaatgtcagtactcacttctccaagaggaaaggtagaagttgttcattgccgaagaacagaatcacaggatgtttattgtatcaaaagccttattagaaaatttacctgcaagctgtttgggaagctaaatatcatctatcttctagaaaaggccaaccttgctgttaccctctgcaatgacaaggaggagatcatggcccaggccaccttcctggactaccccaactggaatgttgccaagcaggatgactgggtgtcagtgttccgggagctcgacagtgacatcccatgcacacccctgaatacgttgttcatgcacctctttgtggccgtggatgagtattctgttggctgttgcaaagagattcttcgaaccgtgtataaggcagtgccagagctgcacttcatatttctcatcgtgccatcctacatgagcctaggctcaactctcataactgtttttgaccaagtggggaacatcccgtgtctgacgtatgaggaagactttgcagtgcatatatgtcacaggcacagccactatcctcagctgcacgttcgcaaagccagggtggaagaccatgacgatctcatgccaatatttatgcgctatgacacaattctgaaggaaacttacggtgaatacttcctggccgaactaatagaggcccaagatgaagagaatcatgctgttgtgtgtgaggtggaaggcacagctgttgggttcatgagtgtgtgctcaagagtgaacatgcaactgctgcatgagtgctttgacttgggccctttccacggactctgtttcccacatcctgatgacgttctggaatcaccacaagacctaagtgtccgaagaagtcaagatgctgagctcaggagtagcagccaaggttcccaaaaaatagtcgaggagttgcaggaacctgtctctccagataccatggaaaacatccagggaaatattgccagagaagctgcatccgaggaagctttaacagcagtccaaagtggaaatgttagtgaaccggaggacatagaaaaactcagtgacatctccactggatatgcacagtatcaccatgtcagcagtaggagcttggcatcgctcgtactgcctgaagagcccgtccacttccgccccatctacaggggagcctcagctgctttttgtattcagctgttttgtattgatgagaaatatgaagcaaggtcgctggattttatgaattttgttttcagtcttttttctgataagaacttctgtgtaatttctctgccccatctcacccccgagttcttcctcatccagaatttcgtgaaaatggtccctttcaacacctgcaccctcgagcaggacctctacgtcttccaccgggctggattgctcaaaaacatttgtctgggaaggagttcatagcatcaccagngtgtcaaagggctctgtggcatgcaagagtttcagacccacggccagagtggacttttcttccttgtgctcagagctagctcggagcaccgtagccacattgcagcccacagggaaggntggaatgagaaatggaagaggggaagcactttcctcttaggggacatgaatcacctctgttcatattatgtgatcaggaacttggttgcatggccctacttagctgcaagggagcctggaagatatgttgctggtaggttgggcatgtgtccagtaaaaaactcagttgattccttaattaaaaagaagaggaaaaaggatactatgggaacattatatctagtttttatcttgtgtatgtatagaagttctaaaaagntacacaggatttcantaaccttatatgcctctgggaaacaggactgggaattgtaggtgaagatggtgactgactttgcattatgtctntctgttatgtttgatttttttgttttaattaataaactttttttttttg

SEQ ID NO: 419075 - DNA, 2019 bp, Homo sapiens
  misc_feature (1503)..(1503): n is a, c, g, or t
  misc_feature (1622)..(1622): n is a, c, g, or t
  misc_feature (1881)..(1881): n is a, c, g, or t
  misc_feature (1896)..(1896): n is a, c, g, or t
  misc_feature (1970)..(1970): n is a, c, g, or t
tgcgggcagcgcgtggagtgcggcgtcctggagctgcggatgagtggacttttttctctcttttggggacaggataaaaaatgtcagtactcacttctccaagaggaaaggtagaagttgttcattgccgaagaacagaatcacaggatgtttattgtatcaaaagccttattagaaaatttacctgcaagctgtttgggaagctaaatatcatctatcttctagaaaaggccaaccttgctgttaccctctgcaatgacaaggaggagatcatggcccaggccaccttcctggactaccccaactggaatgttgccaagcaggatgactgggtgtcagtgttccgggagctcgacagtgacatcccatgcacacccctgaatacgttgttcatgcacctctttgtggccgtggatgagtattctgttggctgttgcaaagagattcttcgaaccgtgtataaggcagtgccagagctgcacttcatatttctcatcgtgccatcctacatgagcctaggctcaactctcataactgtttttgaccaagtggggaacatcccgtgtctgacgtatgaggaagactttgcagtgcatatatgtcacaggcacagccactatcctcagctgcacgttcgcaaagccagggtggaagaccatgacgatctcatgccaatatttatgcgctatgacacaattctgaaggaaacttacggtgaatacttcctggccgaactaatagaggcccaagatgaagagaatcatgctgttgtgtgtgaggtggaaggcacagctgttgggttcatgagtgtgtgctcaagagtgaacatgcaactgctgcatgagtgctttgacttgggccctttccacggactctgtttcccacatcctgatgacgttctggaatcaccacaagacctaagtgtccgaagaagtcaagatgctgagctcaggagtagcagccaaggttcccaaaaaatagtcgaggagttgcaggaacctgtctctccagataccatggaaaacatccagggaaatattgccagagaagctgcatccgaggaagctttaacagcagtccaaagtggaaatgttagtgaaccggaggacatagaaaaactcagtgacatctccactggatatgcacagtatcaccatgtcagcagtaggagcttggcatcgctcgtactgcctgaagagcccgtccacttccgccccatctacaggggagcctcagctgctttttgtattcagctgttttgtattgatgagaaatatgaagcaaggtcgctggattttatgaattttgttttcagtcttttttctgataagaacttctgtgtaatttctctgccccatctcacccccgagttcttcctcatccagaatttcgtgaaaatggtccctttcaacacctgcaccctcgagcaggacctctacgtcttccaccgggctggattgctcaaaaacatttgtctgggaaggagttcatagcatcaccagngtgtcaaagggctctgtggcatgcaagagtttcagacccacggccagagtggacttttcttccttgtgctcagagctagctcggagcaccgtagccacattgcagcccacagggaaggntggaatgagaaatggaagaggggaagcactttcctcttaggggacatgaatcacctctgttcatattatgtgatcaggaacttggttgcatggccctacttagctgcaagggagcctggaagatatgttgctggtaggttgggcatgtgtccagtaaaaaactcagttgattccttaattaaaaagaagaggaaaaaggatactatgggaacattatatctagtttttatcttgtgtatgtatagaagttctaaaaagntacacaggatttcantaaccttatatgcctctgggaaacaggactgggaattgtaggtgaagatggtgactgactttgcattatgtctntctgttatgtttgatttttttgttttaattaataaactttttttttttg

SEQ ID NO: 419076 - DNA, 2167 bp, Homo sapiens
ggcttaagagagagcctcttcagaactccaagatttggatgtttttctatttttcccagaagaattcgtgttgaggtggaaggcacagctgttgggttcatgagtgtgtgctcaagagtgaacatgcaactgctgcatgagtgctttgacttgggccctttccacggactctgtttcccacatcctgatgacgttctggaatcaccacaagacctaagtgtccgaagaagtcaagagacaaggtctcattttgttgcccaggctggggtacagtggtgcaagtatggctcactgcagccttgaactctttctgggctcaagtgatcctcctacttcagcttcctgagtagctggactatagatgctgagctcaggagtagcagccaaggttcccaaaaaatagtcgaggagttgcaggaacctgtctctccagataccatggaaaacatccagggaaatattgccagagaagctgcatccgaggaagctttaacagcagtccaaagtggaaatgttagtgaaccggaggtcgctggattttatgaattttgttttcagtcttttttctgataagaacttctgtgtaatttctctgccccatctcacccccgagttcttcctcatccagaatttcgtgaaaatggtccctttcaacacctgcaccctcgagcaggacctctacgtcttccaccgggctggattgctcaagtccattaatataagatttgccactctcttggatactcctggtgtggaaaatcttgtcagcaccctcatgttgaataaaagcatattggaggacttagaccgttacaacaaggctcgcaaagaccctgacattgagtacatacggtcccattacaacattgaagatttcatctacttcagtcaccaccagcgcgaagaacacgggcacatgcatcactttgccctcaaccccattttccggcactacaccaagttctttctgaaggagatcctgcgtttaggctttaaatcctgtctctactaccgtgtttacccaaaatccagagaaggcaagttccagaacccctacgcccactccctgacatctgcccttcattacttggttcccgtgcgaccacgacgacagattgtctatcctctggaaaagcttggcataaacgctccatcaaaggcggtctccaaggatccgatgagttatgctttaaaccatacaaacagaaaactaacattggaacctaaaattactgtcaatgccaagatcattgtggttggtgcatccagtgttggaatttccttcctagagacattggtattttgctctcacatgaagtttaataatcttaccctgatttcaactcatggactcccaggaaaaaaacttctggacactgaacaaaggaaatttttagccagcgaccactgttttaatgataaagattatgcactgatgtcactgtgctcctgggttaatgtcgtggtgggtagaatgaccggcatagaccgagcagccaagcacgttgtgctttccacggacgagatcgtgccctacgaccacctcatcctctgcaccgggcagcagtaccaggtcccatgccctacagaggctgatattagtcaacacctgacaaacagggaggttcccaacagcagtcagcggcggtacacggggaaagttccttgcaaccatttcactctcaacgaggaagaggattgctttaaggcactgatttggataaggaataactccatcaccacagaagatggaggaagagcatcagtgttattctgctgacttgcccagttgtcagggatggtgatgctgtggtgcccccttaaagggaaatgttttttcaagatttaagactgactcccagcagccagtgcataaagccatttggagtgcctgcttttgtccaccaaatagccaggataagaagtatgtggaaattagtttcctgtcttacatgtaggtgattttctccaggtctggtgcttaatgactcccccaggcacctctcaggtaggtgctcttaacactgaaatgctaggaccaagctctgggagccttcagggaaacctgacctggccaagttcatttaactctgtgtagaggcccttttcaagtaaattctcaagtaaaaaaagttaagaaaaaatgttaacatcttgccttaaaaaa

SEQ ID NO: 419077 - DNA, 1928 bp, Homo sapiens
tactcatgcctcagccttccaagtagctggtacagggaaatattgccagagaagctgcatccgaggaagctttaacagcagtccaaagtggaaatgttagtgaaccggaggacatagaaaaactcagtgacatctccactggatatgcacagtatcaccatgtcagcagtaggagcttggcatcgctcgtactgcctgaagagcccgtccacttccgccccatctacaggggagcctcagctgctttttgtattcagctgttttgtattgatgagaaatatgaagcaaggtcgctggattttatgaattttgttttcagtcttttttctgataagaacttctgtgtaatttctctgccccatctcacccccgagttcttcctcatccagaatttcgtgaaaatggtccctttcaacacctgcaccctcgagcaggacctctacgtcttccaccgggctggattgctcaagtccattaatataagatttgccactctcttggatactcctggtgtggaaaatcttgtcagcaccctcatgttgaataaaagcatattggaggacttagaccgttacaacaaggctcgcaaagaccctgacattgagtacatacggtcccattacaacattgaagatttcatctacttcagtcaccaccagcgcgaagaacacgggcacatgcatcactttgccctcaaccccattttccggcactacaccaagttctttctgaaggagatcctgcgtttaggctttaaatcctgtctctactaccgtgtttacccaaaatccagagaaggcaagttccagaacccctacgcccactccctgacatctgcccttcattacttggttcccgtgcgaccacgacgacagattgtctatcctctggaaaagcttggcataaacgctccatcaaaggcggtctccaaggatccgatgagttatgctttaaaccatacaaacagaaaactaacattggaacctaaaattactgtcaatgccaagatcattgtggttggtgcatccagtgttggaatttccttcctagagacattggtattttgctctcacatgaagtttaataatcttaccctgatttcaactcatggactcccaggaaaaaaacttctggacactgaacaaaggaaatttttagccagcgaccactgttttaatgataaagattatgcactgatgtcactgtgctcctgggttaatgtcgtggtgggtagaatgaccggcatagaccgagcagccaagcacgttgtgctttccacggacgagatcgtgccctacgaccacctcatcctctgcaccgggcagcagtaccaggtcccatgccctacagaggctgatattagtcaacacctgacaaacagggaggttcccaacagcagtcagcggcggtacacggggaaagttccttgcaaccatttcactctcaacgaggaagaggattgctttaaggcactgatttggataaggaataactccatcaccacagaagatggaggaagagcatcagtgttattctgctgacttgcccagttgtcagggatggtgatgctgtggtgcccccttaaagggaaatgttttttcaagatttaagactgactcccagcagccagtgcataaagccatttggagtgcctgcttttgtccaccaaatagccaggataagaagtatgtggaaattagtttcctgtcttacatgtaggtgattttctccaggtctggtgcttaatgactcccccaggcacctctcaggtaggtgctcttaacactgaaatgctaggaccaagctctgggagccttcagggaaacctgacctggccaagttcatttaactctgtgtagaggcccttttcaagtaaattctcaagtaaaaaaagttaagaaaaaatgttaacatcttgccttaaaaaa

SEQ ID NO: 419078 - DNA, 1666 bp, Homo sapiens
gtaaccgttcgtacgagaatcgctgtcctctccttgcggccgccagtgtggtggaattcgaagtttcagcaaagactcaatgttgaggtgatggaacaggctcatagatttgctggaggagaattacaggtccattaatataagatttgccactctcttggatactcctggtgtggaaaatcttgtcagcaccctcatgttgaataaaagcatattggaggacttagaccgttacaacaaggctcgcaaagaccctgatggaacactgctgcaggcatttgtagctgaagttgcagaacaaatagttggtattgcagtgatcagaaatgaaatggacattgagtacatacggtcccattacaacattgaagatttcatctacttcagtcaccaccagcgcgaagaacacgggcacatgcatcactttgccctcaaccccattttccggcactacaccaagttctttctgaaggagatcctgcgtttaggctttaaatcctgtctctactaccgtgtttacccaaaatccagagaaggcaagttccagaacccctacgcccactccctgacatctgcccttcattacttggttcccgtgcgaccacgacgacagattgtctatcctctggaaaagcttggcataaacgctccatcaaaggcggtctccaaggatccgatgagttatgctttaaaccatacaaacagaaaactaacattggaacctaaaattactgtcaatgccaagatcattgtggttggtgcatccagtgttggaatttccttcctagagacattggtattttgctctcacatgaagtttaataatcttaccctgatttcaactcatggactcccaggaaaaaaacttctggacactgaacaaaggaaatttttagccagcgaccactgttttaatgataaagattatgcactgatgtcactgtgctcctgggttaatgtcgtggtgggtagaatgaccggcatagaccgagcagccaagcacgttgtgctttccacggacgagatcgtgccctacgaccacctcatcctctgcaccgggcagcagtaccaggtcccatgccctacagaggctgatattagtcaacacctgacaaacagggaggttcccaacagcagtcagcggcggtacacggggaaagttccttgcaaccatttcactctcaacgaggaagaggattgctttaaggcactgatttggataaggaataactccatcaccacagaagatggaggaagagcatcagtgttattctgctgacttgcccagttgtcagggatggtgatgctgtggtgcccccttaaagggaaatgttttttcaagatttaagactgactcccagcagccagtgcataaagccatttggagtgcctgcttttgtccaccaaatagccaggataagaagtatgtggaaattagtttcctgtcttacatgtaggtgattttctccaggtctggtgcttaatgactcccccaggcacctctcaggtaggtgctcttaacactgaaatgctaggaccaagctctgggagccttcagggaaacctgacctggccaagttcatttaactctgtgtagaggcccttttcaagtaaattctcaagtaaaaaaagttaagaaaaaatgttaacatcttgccttaaaaaa

SEQ ID NO: 419079 - DNA, 1565 bp, Homo sapiens
cgcggagaggagaggagccagaagttgagttcaaccaccagtggccaatgatttcatcaaccatgcctacacgatgaagcctccataaaaccctaaccaaagcggttaggagaacttctgggtgagaagtcatttctccagtttgtggctgaccctgtattgagaatgatacctggagtgccagctagctgacacatgtcagataggattcgagtagaatgttgcagaaacccggaggccatttctgaacactttacactactcaaggtggcaaaggagagacatggagccatttgaggcactcaatcgttgcattgcaagaaaacatggaattacatccattcctccaatgactaatatttgcttcactaatatcaaatttgcaccttgctgctcagtttctgggcctttatgggaacacaacaataagcattcatttcaatgccaaatcatgctgtaatctttttgaagacattgtcagaagcacttaaactcaacacatattgtgcgtataatgcacatgactctcttgaagtgatgacaatgaacagccatggccaagcacccatgcacagatgagttatgctttaaaccatacaaacagaaaactaacattggaacctaaaattactgtcaatgccaagatcattgtggttggtgcatccagtgttggaatttccttcctagagacattggtattttgctctcacatgaagtttaataatcttaccctgatttcaactcatggactcccaggaaaaaaacttctggacactgaacaaaggaaatttttagccagcgaccactgttttaatgataaagattatgcactgatgtcactgtgctcctgggttaatgtcgtggtgggtagaatgaccggcatagaccgagcagccaagcacgttgtgctttccacggacgagatcgtgccctacgaccacctcatcctctgcaccgggcagcagtaccaggtcccatgccctacagaggctgatattagtcaacacctgacaaacagggaggttcccaacagcagtcagcggcggtacacggggaaagttccttgcaaccatttcactctcaacgaggaagaggattgctttaaggcactgatttggataaggaataactccatcaccacagaagatggaggaagagcatcagtgttattctgctgacttgcccagttgtcagggatggtgatgctgtggtgcccccttaaagggaaatgttttttcaagatttaagactgactcccagcagccagtgcataaagccatttggagtgcctgcttttgtccaccaaatagccaggataagaagtatgtggaaattagtttcctgtcttacatgtaggtgattttctccaggtctggtgcttaatgactcccccaggcacctctcaggtaggtgctcttaacactgaaatgctaggaccaagctctgggagccttcagggaaacctgacctggccaagttcatttaactctgtgtagaggcccttttcaagtaaattctcaagtaaaaaaagttaagaaaaaatgttaacatcttgccttaaaaaa

SEQ ID NO: 419080 - DNA, 943 bp, Homo sapiens
cgcggagaggagaggagccagaagttgagttcaaccaccagtggccaatgatttcatcaaccatgcctacacgatgaagcctccataaaaccctaaccaaagcggttaggagaacttctgggtgagaagtcatttctccagtttgtggctgaccctgtattgagaatgatacctggagtgccagctagctgacacatgtcagataggattcgagtagaatgttgcagaaacccggaggccatttctgaacactttacactactcaaggtggcaaaggagagacatggagccatttgaggcactcaatcgttgcattgcaagaaaacatggaattacatccattcctccaatgactaatatttgcttcactaatatcaaatttgcaccttgctgctcagtttctgggcctttatgggaacacaacaataagcattcatttcaatgccaaatcatgctgtaatctttttgaagacattgtcagaagcacttaaactcaacacatattgtgcgtataatgcacatgactctcttgaagtgatgacaatgaacagccatggccaagcacccatgcacagatgagttatgctttaaaccatacaaacagaaaactaacattggaacctaaaattactgtcaatgccaagatcattgtggttggtgcatccagtgttggaatttccttcctagagacattggtattttggtgagttgtttcactctattgattgattggtttttaaataataaaaattatcttcctacatctgaagagaacaccatcagagaacagacctgagattgtttggtactccacacaccctgcctatgtggatggatgaatcagtagaagaatattctagatcaggggttagcaaactatagccctgaggccaggcctggcttgccaactgcttttgtaaataaagctttattggaacacaaa

SEQ ID NO: 419081 - DNA, 2966 bp, Homo sapiens
tgcgggcagcgcgtggagtgcggcgtcctggagctgcggatgaggtgggtaacgccgtgctgactagcagcgacgcaaggactgcggtgcagggcgtccagggcgcatccccaggataaaaaatgtcagtactcacttctccaagaggaaaggtagaagttgttcattgccgaagaacagaatcacaggatgtttattgtatcaaaagccttattagaaaatttacctgcaagctgtttgggaagctaaatatcatctatcttctagaaaaggccaaccttgctgttaccctctgcaatgacaaggaggagatcatggcccaggccaccttcctggactaccccaactggaatgttgccaagcaggatgactgggtgtcagtgttccgggagctcgacagtgacatcccatgcacacccctgaatacgttgttcatgcacctctttgtggccgtggatgagtattctgttggctgttgcaaagagattcttcgaaccgtgtataaggcagtgccagagctgcacttcatatttctcatcgtgccatcctacatgagcctaggctcaactctcataactgtttttgaccaagtggggaacatcccgtgtctgacgtatgaggaagactttgcagtgcatatatgtcacaggcacagccactatcctcagctgcacgttcgcaaagccagggtggaagaccatgacgatctcatgccaatatttatgcgctatgacacaattctgaaggaaacttacggtgaatacttcctggccgaactaatagaggcccaagatgaagagaatcatgctgttgtgtgtgaggtggaaggcacagctgttgggttcatgagtgtgtgctcaagagtgaacatgcaactgctgcatgagtgctttgacttgggccctttccacggactctgtttcccacatcctgatgacgttctggaatcaccacaagacctaagtgtccgaagaagtcaagatgctgagctcaggagtagcagccaaggttcccaaaaaatagtcgaggagttgcaggaacctgtctctccagataccatggaaaacatccagggaaatattgccagagaagctgcatccgaggaagctttaacagcagtccaaagtggaaatgttagtgaaccggaggacatagaaaaactcagtgacatctccactggatatgcacagtatcaccatgtcagcagtaggagcttggcatcgctcgtactgcctgaagagcccgtccacttccgccccatctacaggggagcctcagctgctttttgtattcagctgttttgtattgatgagaaatatgaagcaaggtcgctggattttatgaattttgttttcagtcttttttctgataagaacttctgtgtaatttctctgccccatctcacccccgagttcttcctcatccagaatttcgtgaaaatggtccctttcaacacctgcaccctcgagcaggacctctacgtcttccaccgggctggattgctcaagtccattaatataagatttgccactctcttggatactcctggtgtggaaaatcttgtcagcaccctcatgttgaataaaagcatattggaggacttagaccgttacaacaaggctcgcaaagaccctgacattgagtacatacggtcccattacaacattgaagatttcatctacttcagtcaccaccagcgcgaagaacacgggcacatgcatcactttgccctcaaccccattttccggcactacaccaagttctttctgaaggagatcctgcgtttaggctttaaatcctgtctctactaccgtgtttacccaaaatccagagaaggcaagttccagaacccctacgcccactccctgacatctgcccttcattacttggttcccgtgcgaccacgacgacagattgtctatcctctggaaaagcttggcataaacgctccatcaaaggcggtctccaaggatccgatgagttatgctttaaaccatacaaacagaaaactaacattggaacctaaaattactgtcaatgccaagatcattgtggttggtgcatccagtgttggaatttccttcctagagacattggtattttgctctcacatgaagtttaataatcttaccctgatttcaactcatggactcccaggaaaaaaacttctggacactgaacaaaggaaatttttagccagcgaccactgttttaatgataaagattatgcactgatgtcactgtgctcctgggttaatgtcgtggtgggtagaatgaccggcatagaccgagcagccaagcacgttgtgctttccacggacgagatcgtgccctacgaccacctcatcctctgcaccgggcagcagtaccaggtcccatgccctacagaggctgatattagtcaacacctgacaaacagggaggttcccaacagcagtcagcggcggtacacggggaaagttccttgcaaccatttcactctcaacgaggaagaggattgctttaaggcactgatttggataaggaataactccatcaccacagaagatggaggaagagcatcagtgttattctgctgacttgcccagttgtcagggatggtgatgctgtggtgcccccttaaagggaaatgttttttcaagatttaagactgactcccagcagccagtgcataaagccatttggagtgcctgcttttgtccaccaaatagccaggataagaagtatgtggaaattagtttcctgtcttacatgtaggtgattttctccaggtctggtgcttaatgactcccccaggcacctctcaggtaggtgctcttaacactgaaatgctaggaccaagctctgggagccttcagggaaacctgacctggccaagttcatttaactctgtgtagaggcccttttcaagtaaattctcaagtaaaaaaagttaagaaaaaatgttaacatcttgccttaaaaaa

SEQ ID NO: 419082 - DNA, 1956 bp, Homo sapiens
gtaaccgttcgtacgagaatcgctgtcctctccttgcggccgccagtgtggtggaattcgaagggaaatattgccagagaagctgcatccgaggaagctttaacagcagtccaaagtggaaatgttagtgaaccggaggacatagaaaaactcagtgacatctccactggatatgcacagtatcaccatgtcagcagtaggagcttggcatcgctcgtactgcctgaagagcccgtccacttccgccccatctacaggggagcctcagctgctttttgtattcagctgttttgtattgatgagaaatatgaagcaaggtcgctggattttatgaattttgttttcagtcttttttctgataagaacttctgtgtaatttctctgccccatctcacccccgagttcttcctcatccagaatttcgtgaaaatggtccctttcaacacctgcaccctcgagcaggacctctacgtcttccaccgggctggattgctcaagtccattaatataagatttgccactctcttggatactcctggtgtggaaaatcttgtcagcaccctcatgttgaataaaagcatattggaggacttagaccgttacaacaaggctcgcaaagaccctgacattgagtacatacggtcccattacaacattgaagatttcatctacttcagtcaccaccagcgcgaagaacacgggcacatgcatcactttgccctcaaccccattttccggcactacaccaagttctttctgaaggagatcctgcgtttaggctttaaatcctgtctctactaccgtgtttacccaaaatccagagaaggcaagttccagaacccctacgcccactccctgacatctgcccttcattacttggttcccgtgcgaccacgacgacagattgtctatcctctggaaaagcttggcataaacgctccatcaaaggcggtctccaaggatccgatgagttatgctttaaaccatacaaacagaaaactaacattggaacctaaaattactgtcaatgccaagatcattgtggttggtgcatccagtgttggaatttccttcctagagacattggtattttgctctcacatgaagtttaataatcttaccctgatttcaactcatggactcccaggaaaaaaacttctggacactgaacaaaggaaatttttagccagcgaccactgttttaatgataaagattatgcactgatgtcactgtgctcctgggttaatgtcgtggtgggtagaatgaccggcatagaccgagcagccaagcacgttgtgctttccacggacgagatcgtgccctacgaccacctcatcctctgcaccgggcagcagtaccaggtcccatgccctacagaggctgatattagtcaacacctgacaaacagggaggttcccaacagcagtcagcggcggtacacggggaaagttccttgcaaccatttcactctcaacgaggaagaggattgctttaaggcactgatttggataaggaataactccatcaccacagaagatggaggaagagcatcagtgttattctgctgacttgcccagttgtcagggatggtgatgctgtggtgcccccttaaagggaaatgttttttcaagatttaagactgactcccagcagccagtgcataaagccatttggagtgcctgcttttgtccaccaaatagccaggataagaagtatgtggaaattagtttcctgtcttacatgtaggtgattttctccaggtctggtgcttaatgactcccccaggcacctctcaggtaggtgctcttaacactgaaatgctaggaccaagctctgggagccttcagggaaacctgacctggccaagttcatttaactctgtgtagaggcccttttcaagtaaattctcaagtaaaaaaagttaagaaaaaatgttaacatcttgccttaaaaaa

SEQ ID NO: 419083 - DNA, 2499 bp, Homo sapiens
  misc_feature (3)..(5): n is a, c, g, or t
  misc_feature (7)..(7): n is a, c, g, or t
ggnnngnggcgcctgcgcagtggcggtgaccaccggctcgcggcgcgtggaggctgctcccagccgcgcgcgagtcagactcgggtgggggtcccggcggcggtagcggcggcggcggtgcgagcatgtcgtggctcttcggcattaacaagggccccaagggtgaaggcgcggggccgccgccgcctttgccgcccgcgcagcccggggccgagggcggcggggaccgcgggttgggagaccggccggcgcccaaggacaaatggagcaacttcgaccccaccggcctggagcgcgccgccaaggcggcgcgcgagctggagcactcgcgttatgccaaggacgccctgaatctggcacagatgcaggagcagacgctgcagttggagcaacagtccaagctcaaagagtatgaggccgccgtggagcagctcaagagcgagcagatccgggcgcaggctgaggagaggaggaagaccctgagcgaggagacccggcagcaccaggccagggcccagtatcaagacaagctggcccggcagcgctacgaggaccaactgaagcagcagcaacttctcaatgaggagaatttacggaagcaggaggagtccgtgcagaagcaggaagccatgcggcgagccaccgtggagcgggagatggagctgcggcacaagaatgagatgctgcgagtggaggccgaggcccgggcgcgcgccaaggccgagcgggagaatgcagacatcatccgcgagcagatccgcctgaaggcggccgagcaccgtcagaccgtcttggagtccatcaggacggctggcaccttgtttggggaaggattccgtgcctttgtgacagactgggacaaagtgacagccacggtggctgggctgacgctgctggctgttggggtctactcagccaagaatgccacgcttgtcgccggccgcttcatcgaggctcggctggggaagccgtccctagtgagggagacgtcccgcatcacggtgcttgaggcgctgcggcaccccatccaggtcagccggcggctcctcagtcgaccccaggacgcgctggagggtgttgtgctcagtcccagcctggaagcacgggtgcgcgacatcgccatagcaacaaggaacaccaagaagaaccgcagcctgtacaggaacatcctgatgtacgggccaccaggcaccgggaagacgctgtttgccaagaaactcgccctgcactcaggcatggactacgccatcatgacaggcggggacgtggcccccatggggcgggaaggcgtgaccgccatgcacaagctctttgactgggccaataccagccggcgcggcctcctgctctttgtggatgaagcggacgccttccttcggaagcgagccaccgagaagataagcgaggacctcagggccacactgaacgccttcctgtaccgcacgggccagcacagcaacaagttcatgctggtcctggccagcaaccaaccagagcagttcgactgggccatcaatgaccgcatcaatgagatggtccacttcgacctgccagggcaggaggaacgggagcgcctggtgagaatgtattttgacaagtatgttcttaagccggccacagaaggaaagcagcgcctgaagctggcccagtttgactacgggaggaagtgctcggaggtcgctcggctgacggagggcatgtcgggccgggagatcgctcagctggccgtgtcctggcaggccacggcgtatgcctccgaggacggggtcctgaccgaggccatgatggacacccgcgtgcaagatgctgtccagcagcaccagcagaagatgtgctggctgaaggcggaagggcctgggcgtggggacgagccctccccatcctgagtccacagggagatccacagctcacggagcctggccgcggacccctcccacccctgccttgccggcccctgcacatttaggatatgctcctggatggggactgggctgtgcccagggcctctgtcccccaggatgtcttgtggtggcggtcggccgttctgccccccagggcaccccctgttgtaggcactggctagggaggggcaggcctccttcctgcccctcgagacactcttgggagatgcattttccgtctggctcacagggggagggtgaggctttgcaccccagcccctgcccaggccactgtgagggtgggtgctggctgagcccccggggcagcaggagccaggcaggtgatgtctttgttctcggctcccacagcagagccaggtgagggggcgcctgccagggccagacccaggtggggcagcctgaaccctgcttccccctgtggccggcatgccccgatctttcacacactggtgaccctgagagaggagggaggagggaacctggcgggggtgtctgaggccgcactgtcagctggccggtccaagcctgtggctggagctggggtctgtttacctaataaagtcccacaggtgcctca

SEQ ID NO: 419084 - DNA, 2416 bp, Homo sapiens
  misc_feature (3)..(5): n is a, c, g, or t
  misc_feature (7)..(7): n is a, c, g, or t
ggnnngnggcgcctgcgcagtggcggtgaccaccggctcgcggcgcgtggaggctgctcccagccgcgcgcgagtcagactcgggtgggggtcccggcgccgcctttgccgcccgcgcagcccggggccgagggcggcggggaccgcgggttgggagaccggccggcgcccaaggacaaatggagcaacttcgaccccaccggcctggagcgcgccgccaaggcggcgcgcgagctggagcactcgcgttatgccaaggacgccctgaatctggcacagatgcaggagcagacgctgcagttggagcaacagtccaagctcaaagagtatgaggccgccgtggagcagctcaagagcgagcagatccgggcgcaggctgaggagaggaggaagaccctgagcgaggagacccggcagcaccaggccagggcccagtatcaagacaagctggcccggcagcgctacgaggaccaactgaagcagcagcaacttctcaatgaggagaatttacggaagcaggaggagtccgtgcagaagcaggaagccatgcggcgagccaccgtggagcgggagatggagctgcggcacaagaatgagatgctgcgagtggaggccgaggcccgggcgcgcgccaaggccgagcgggagaatgcagacatcatccgcgagcagatccgcctgaaggcggccgagcaccgtcagaccgtcttggagtccatcaggacggctggcaccttgtttggggaaggattccgtgcctttgtgacagactgggacaaagtgacagccacggtggctgggctgacgctgctggctgttggggtctactcagccaagaatgccacgcttgtcgccggccgcttcatcgaggctcggctggggaagccgtccctagtgagggagacgtcccgcatcacggtgcttgaggcgctgcggcaccccatccaggtcagccggcggctcctcagtcgaccccaggacgcgctggagggtgttgtgctcagtcccagcctggaagcacgggtgcgcgacatcgccatagcaacaaggaacaccaagaagaaccgcagcctgtacaggaacatcctgatgtacgggccaccaggcaccgggaagacgctgtttgccaagaaactcgccctgcactcaggcatggactacgccatcatgacaggcggggacgtggcccccatggggcgggaaggcgtgaccgccatgcacaagctctttgactgggccaataccagccggcgcggcctcctgctctttgtggatgaagcggacgccttccttcggaagcgagccaccgagaagataagcgaggacctcagggccacactgaacgccttcctgtaccgcacgggccagcacagcaacaagttcatgctggtcctggccagcaaccaaccagagcagttcgactgggccatcaatgaccgcatcaatgagatggtccacttcgacctgccagggcaggaggaacgggagcgcctggtgagaatgtattttgacaagtatgttcttaagccggccacagaaggaaagcagcgcctgaagctggcccagtttgactacgggaggaagtgctcggaggtcgctcggctgacggagggcatgtcgggccgggagatcgctcagctggccgtgtcctggcaggccacggcgtatgcctccgaggacggggtcctgaccgaggccatgatggacacccgcgtgcaagatgctgtccagcagcaccagcagaagatgtgctggctgaaggcggaagggcctgggcgtggggacgagccctccccatcctgagtccacagggagatccacagctcacggagcctggccgcggacccctcccacccctgccttgccggcccctgcacatttaggatatgctcctggatggggactgggctgtgcccagggcctctgtcccccaggatgtcttgtggtggcggtcggccgttctgccccccagggcaccccctgttgtaggcactggctagggaggggcaggcctccttcctgcccctcgagacactcttgggagatgcattttccgtctggctcacagggggagggtgaggctttgcaccccagcccctgcccaggccactgtgagggtgggtgctggctgagcccccggggcagcaggagccaggcaggtgatgtctttgttctcggctcccacagcagagccaggtgagggggcgcctgccagggccagacccaggtggggcagcctgaaccctgcttccccctgtggccggcatgccccgatctttcacacactggtgaccctgagagaggagggaggagggaacctggcgggggtgtctgaggccgcactgtcagctggccggtccaagcctgtggctggagctggggtctgtttacctaataaagtcccacaggtgcctca

SEQ ID NO: 419085 - DNA, 2348 bp, Homo sapiens
tctggtgagtggtacttcagttgtgagtccgccgcctttgccgcccgcgcagcccggggccgagggcggcggggaccgcgggttgggagaccggccggcgcccaaggacaaatggagcaacttcgaccccaccggcctggagcgcgccgccaaggcggcgcgcgagctggagcactcgcgttatgccaaggacgccctgaatctggcacagatgcaggagcagacgctgcagttggagcaacagtccaagctcaaagagtatgaggccgccgtggagcagctcaagagcgagcagatccgggcgcaggctgaggagaggaggaagaccctgagcgaggagacccggcagcaccaggccagggcccagtatcaagacaagctggcccggcagcgctacgaggaccaactgaagcagcagcaacttctcaatgaggagaatttacggaagcaggaggagtccgtgcagaagcaggaagccatgcggcgagccaccgtggagcgggagatggagctgcggcacaagaatgagatgctgcgagtggaggccgaggcccgggcgcgcgccaaggccgagcgggagaatgcagacatcatccgcgagcagatccgcctgaaggcggccgagcaccgtcagaccgtcttggagtccatcaggacggctggcaccttgtttggggaaggattccgtgcctttgtgacagactgggacaaagtgacagccacggtggctgggctgacgctgctggctgttggggtctactcagccaagaatgccacgcttgtcgccggccgcttcatcgaggctcggctggggaagccgtccctagtgagggagacgtcccgcatcacggtgcttgaggcgctgcggcaccccatccaggtcagccggcggctcctcagtcgaccccaggacgcgctggagggtgttgtgctcagtcccagcctggaagcacgggtgcgcgacatcgccatagcaacaaggaacaccaagaagaaccgcagcctgtacaggaacatcctgatgtacgggccaccaggcaccgggaagacgctgtttgccaagaaactcgccctgcactcaggcatggactacgccatcatgacaggcggggacgtggcccccatggggcgggaaggcgtgaccgccatgcacaagctctttgactgggccaataccagccggcgcggcctcctgctctttgtggatgaagcggacgccttccttcggaagcgagccaccgagaagataagcgaggacctcagggccacactgaacgccttcctgtaccgcacgggccagcacagcaacaagttcatgctggtcctggccagcaaccaaccagagcagttcgactgggccatcaatgaccgcatcaatgagatggtccacttcgacctgccagggcaggaggaacgggagcgcctggtgagaatgtattttgacaagtatgttcttaagccggccacagaaggaaagcagcgcctgaagctggcccagtttgactacgggaggaagtgctcggaggtcgctcggctgacggagggcatgtcgggccgggagatcgctcagctggccgtgtcctggcaggccacggcgtatgcctccgaggacggggtcctgaccgaggccatgatggacacccgcgtgcaagatgctgtccagcagcaccagcagaagatgtgctggctgaaggcggaagggcctgggcgtggggacgagccctccccatcctgagtccacagggagatccacagctcacggagcctggccgcggacccctcccacccctgccttgccggcccctgcacatttaggatatgctcctggatggggactgggctgtgcccagggcctctgtcccccaggatgtcttgtggtggcggtcggccgttctgccccccagggcaccccctgttgtaggcactggctagggaggggcaggcctccttcctgcccctcgagacactcttgggagatgcattttccgtctggctcacagggggagggtgaggctttgcaccccagcccctgcccaggccactgtgagggtgggtgctggctgagcccccggggcagcaggagccaggcaggtgatgtctttgttctcggctcccacagcagagccaggtgagggggcgcctgccagggccagacccaggtggggcagcctgaaccctgcttccccctgtggccggcatgccccgatctttcacacactggtgaccctgagagaggagggaggagggaacctggcgggggtgtctgaggccgcactgtcagctggccggtccaagcctgtggctggagctggggtctgtttacctaataaagtcccacaggtgcctca

SEQ ID NO: 419086 - DNA, 2215 bp, Homo sapiens
aagacaaaggggcaggataaggagtgtgagccatctccagtgataggttatgccaaggacgccctgaatctggcacagatgcaggagcagacgctgcagttggagcaacagtccaagctcaaagagtatgaggccgccgtggagcagctcaagagcgagcagatccgggcgcaggctgaggagaggaggaagaccctgagcgaggagacccggcagcaccaggccagggcccagtatcaagacaagctggcccggcagcgctacgaggaccaactgaagcagcagcaacttctcaatgaggagaatttacggaagcaggaggagtccgtgcagaagcaggaagccatgcggcgagccaccgtggagcgggagatggagctgcggcacaagaatgagatgctgcgagtggaggccgaggcccgggcgcgcgccaaggccgagcgggagaatgcagacatcatccgcgagcagatccgcctgaaggcggccgagcaccgtcagaccgtcttggagtccatcaggacggctggcaccttgtttggggaaggattccgtgcctttgtgacagactgggacaaagtgacagccacggtggctgggctgacgctgctggctgttggggtctactcagccaagaatgccacgcttgtcgccggccgcttcatcgaggctcggctggggaagccgtccctagtgagggagacgtcccgcatcacggtgcttgaggcgctgcggcaccccatccaggtcagccggcggctcctcagtcgaccccaggacgcgctggagggtgttgtgctcagtcccagcctggaagcacgggtgcgcgacatcgccatagcaacaaggaacaccaagaagaaccgcagcctgtacaggaacatcctgatgtacgggccaccaggcaccgggaagacgctgtttgccaagaaactcgccctgcactcaggcatggactacgccatcatgacaggcggggacgtggcccccatggggcgggaaggcgtgaccgccatgcacaagctctttgactgggccaataccagccggcgcggcctcctgctctttgtggatgaagcggacgccttccttcggaagcgagccaccgagaagataagcgaggacctcagggccacactgaacgccttcctgtaccgcacgggccagcacagcaacaagttcatgctggtcctggccagcaaccaaccagagcagttcgactgggccatcaatgaccgcatcaatgagatggtccacttcgacctgccagggcaggaggaacgggagcgcctggtgagaatgtattttgacaagtatgttcttaagccggccacagaaggaaagcagcgcctgaagctggcccagtttgactacgggaggaagtgctcggaggtcgctcggctgacggagggcatgtcgggccgggagatcgctcagctggccgtgtcctggcaggccacggcgtatgcctccgaggacggggtcctgaccgaggccatgatggacacccgcgtgcaagatgctgtccagcagcaccagcagaagatgtgctggctgaaggcggaagggcctgggcgtggggacgagccctccccatcctgagtccacagggagatccacagctcacggagcctggccgcggacccctcccacccctgccttgccggcccctgcacatttaggatatgctcctggatggggactgggctgtgcccagggcctctgtcccccaggatgtcttgtggtggcggtcggccgttctgccccccagggcaccccctgttgtaggcactggctagggaggggcaggcctccttcctgcccctcgagacactcttgggagatgcattttccgtctggctcacagggggagggtgaggctttgcaccccagcccctgcccaggccactgtgagggtgggtgctggctgagcccccggggcagcaggagccaggcaggtgatgtctttgttctcggctcccacagcagagccaggtgagggggcgcctgccagggccagacccaggtggggcagcctgaaccctgcttccccctgtggccggcatgccccgatctttcacacactggtgaccctgagagaggagggaggagggaacctggcgggggtgtctgaggccgcactgtcagctggccggtccaagcctgtggctggagctggggtctgtttacctaataaagtcccacaggtgcctca

SEQ ID NO: 419087 - DNA, 2605 bp, Homo sapiens
  misc_feature (3)..(5): n is a, c, g, or t
  misc_feature (7)..(7): n is a, c, g, or t
ggnnngnggcgcctgcgcagtggcggtgaccaccggctcgcggcgcgtggaggctgctcccagccgcgcgcgagtcagactcgggtgggggtcccggcggcggtagcggcggcggcggtgcgagcatgtcgtggctcttcggcattaacaagggccccaagggtgaaggcgcggggccgccgccgcctttgccgcccgcgcagcccggggccgagggcggcggggaccgcgggttgggagaccggccggcgcccaaggacaaatggagcaacttcgaccccaccggcctggagcgcgccgccaaggcggcgcgcgagctggagcactcgcgttatgccaaggacgccctgaatctggcacagatgcaggagcagacgctgcagttggagcaacagtccaagctcaaagagtatgaggccgccgtggagcagctcaagagcgagcagatccgggcgcaggctgaggagaggaggaagaccctgagcgaggagacccggcagcaccaggccagggcccagtatcaagacaagctggcccggcagcgctacgaggaccaactgaagcagcagcaacttctcaatgaggagaatttacggaagcaggaggagtccgtgcagaagcaggaagccatgcggcgagccaccgtggagcgggagatggagctgcggcacaagaatgagatgctgcgagtggaggccgaggcccgggcgcgcgccaaggccgagcgggagaatgcagacatcatccgcgagcagatccgcctgaaggcggccgagcaccgtcagaccgtcttggagtccatcaggacggctggcaccttgtttggggaaggattccgtgcctttgtgacagactgggacaaagtgacagccacggtggctgggctgacgctgctggctgttggggtctactcagccaagaatgccacgcttgtcgccggccgcttcatcgaggctcggctggggaagccgtccctagtgagggagacgtcccgcatcacggtgcttgaggcgctgcggcaccccatccaggtcagccggcggctcctcagtcgaccccaggacgcgctggagggtgttgtgctcagtcccagcctggaagcacgggtgcgcgacatcgccatagcaacaaggaacaccaagaagaaccgcagcctgtacaggaacatcctgatgtacgggccaccaggcaccgggaagacgctgtttgccaagaaactcgccctgcactcaggcatggactacgccatcatgacaggcggggacgtggcccccatggggcgggaaggcgtgaccgccatgcacaagctctttgactgggccaataccagccggcgcggcctcctgctctttgtggatgaagcggacgccttccttcggaagcgagccaccgagaagataagcgaggacctcagggccacactgaacgccttcctgtaccgcacgggccagcacagcaacaagttcatgctggtcctggccagcaaccaaccagagcagttcgactgggccatcaatgaccgcatcaatgagatggtccacttcgacctgccagggcaggaggaacgggagcgcctggtgagaatgtattttgacaagtatgttcttaagccggccacagaaggaaagcagcgcctgaagctggcccagtttgactacgggaggaagtgctcggaggtcgctcggctgacggagggcatgtcgggccgggagatcgctcagctggccgtgtcctggcaggccacggcgtatgcctccgaggacggggtcctgaccgaggccatgatggacacccgcgtgcaagatgctgtccagcagcaccagcagaagatgtgctggctgaaggcggaagggcctgggcgtggggacgagccctccccatcctgagtccacagggagatccacagctcacggagcctggccgcggacccctcccacccctgccttgccggcccctgcacatttaggatatgctcctggatggggactgggctgtgcccagggcctctgtcccccaggatgtcttgtggtggcggtcggccgttctgccccccagggcaccccctgttgtaggcactggctagggaggggcaggcctccttcctgcccctcgagacactcttgggagatgcattttccgtctggctcacagggggagggtgaggctttgcaccccagcccctgcccaggccactgtgagggtgggtgctggctgagcccccggggcagcaggagccaggcaggtgatgtctttgttctcggctcccacagcagagccaggtgagggggcgcctgccagggccagacccaggtggggcagcctgaaccctgcttccccctgtggccggcatgccccgatctttcacacactggtgaccctgagagaggagggaggagggaacctggcgggggtgtctgaggccgcactgtcagctggccggtccaagcctgtggctggagctggggtctgtttacctaataaagtcccacaggtgcctcaaaaaaaaaaacacaaaaaaacacaataaccaaaacagcacacataacacccagacaccacaaacagagtaaacacccaaccacatacaaaacagggtacccaacaa

SEQ ID NO: 419088 - DNA, 2446 bp, Homo sapiens
  misc_feature (3)..(5): n is a, c, g, or t
  misc_feature (7)..(7): n is a, c, g, or t
ggnnngnggcgcctgcgcagtggcggtgaccaccggctcgcggcgcgtggaggctgctcccagccgcgcgcgagtcagactcgggtgggggtcccggcggcggtagcggcggcggcggtgcgagcatgtcgtggctcttcggcattaacaagggccccaagggtgaaggcgcggggccgccgccgcctttgccgcccgcgcagcccggggccgagggcggcggggaccgcgggttgggagaccggccggcgcccaaggacaaatggagcaacttcgaccccaccggcctggagcgcgccgccaaggcggcgcgcgagctggagcactcgcgttatgccaaggacgccctgaatctggcacagatgcaggagcagacgctgcagttggagcaacagtccaagctcaaagagtatgaggccgccgtggagcagctcaagagcgagcagatccgggcgcaggctgaggagaggaggaagaccctgagcgaggagacccggcagcaccaggccagggcccagtatcaagacaagctggcccggcagcgctacgaggaccaactgaagcagcagcaacttctcaatgaggagaatttacggaagcaggaggagtccgtgcagaagcaggaagccatgcggcgagccaccgtggagcgggagatggagctgcggcacaagaatgagatgctgcgagtggaggccgaggcccgggcgcgcgccaaggccgagcgggagaatgcagacatcatccgcgagcagatccgcctgaaggcggccgagcaccgtcagaccgtcttggagtccatcaggacggctggcaccttgtttggggaaggattccgtgcctttgtgacagactgggacaaagtgacagccacggtggctgggctgacgctgctggctgttggggtctactcagccaagaatgccacgcttgtcgccggccgcttcatcgaggctcggctggggaagccgtccctagtgagggagacgtcccgcatcacggtgcttgaggcgctgcggcaccccatccaggtcagccggcggctcctcagtcgaccccaggacgcgctggagggtgttgtgctcagtcccagcctggaagcacgggtgcgcgacatcgccatagcaacaaggaacaccaagaagaaccgcagcctgtacaggaacatcctgatgtacgggccaccaggcaccgggaagacgctgtttgccaagaaactcgccctgcactcaggcatggactacgccatcatgacaggcggggacgtggcccccatggggcgggaaggcgtgaccgccatgcacaagctctttgactgggccaataccagccggcgcggcctcctgctctttgtggatgaagcggacgccttccttcggaagcgagccaccgagaagataagcgaggacctcagggccacactgaacgccttcctgtaccgcacgggccagcacagcaacaagttcatgctggtcctggccagcaaccaaccagagcagttcgactgggccatcaatgaccgcatcaatgagatggtccacttcgacctgccagggcaggaggaacgggagcgcctggcgcctgaagctggcccagtttgactacgggaggaagtgctcggaggtcgctcggctgacggagggcatgtcgggccgggagatcgctcagctggccgtgtcctggcaggccacggcgtatgcctccgaggacggggtcctgaccgaggccatgatggacacccgcgtgcaagatgctgtccagcagcaccagcagaagatgtgctggctgaaggcggaagggcctgggcgtggggacgagccctccccatcctgagtccacagggagatccacagctcacggagcctggccgcggacccctcccacccctgccttgccggcccctgcacatttaggatatgctcctggatggggactgggctgtgcccagggcctctgtcccccaggatgtcttgtggtggcggtcggccgttctgccccccagggcaccccctgttgtaggcactggctagggaggggcaggcctccttcctgcccctcgagacactcttgggagatgcattttccgtctggctcacagggggagggtgaggctttgcaccccagcccctgcccaggccactgtgagggtgggtgctggctgagcccccggggcagcaggagccaggcaggtgatgtctttgttctcggctcccacagcagagccaggtgagggggcgcctgccagggccagacccaggtggggcagcctgaaccctgcttccccctgtggccggcatgccccgatctttcacacactggtgaccctgagagaggagggaggagggaacctggcgggggtgtctgaggccgcactgtcagctggccggtccaagcctgtggctggagctggggtctgtttacctaataaagtcccacaggtgcctca

SEQ ID NO: 419089 - DNA, 2129 bp, Homo sapiens
cgggggatgacgtaggctgcgcctgtgcatgcgcagggaggggagaccttggcggagcggcggaggcgcccagcggaggtgaaagtattggcggaaaggaaaatacagcggaaaaatgcagagctggagtcgtgtgtactgctccttggccaagagaggccatttcaatcgaatatctcatggcctacagggactttctgcagtgcctctgagaacttacgcagatcagccgattgatgctgatgtaacagttataggttctggtcctggaggatatgttgctgctattaaagctgcccagttaggcttcaagacagtctgcattgagaaaaatgaaacacttggtggaacatgcttgaatgttggttgtattccttctaaggctttattgaacaactctcattattaccatatggcccatggaaaagattttgcatctagaggaattgaaatgtccgaagttcgcttgaatttagacaagatgatggagcagaagagtactgcagtaaaagctttaacaggtggaattgcccacttattcaaacagaataaggttgttcatgtcaatggatatggaaagataactggcaaaaatcaagtcactgctacgaaagctgatggcggcactcaggttattgatacaaagaacattcttatagccacgggttcagaagttactccttttcctggaatcacgatagatgaagatacaatagtgtcatctacaggtgctttatctttaaaaaaagttccagaaaagatggttgttattggtgcaggagtaataggtgtagaattgggttcagtttggcaaagacttggtgcagatgtgacagcagttgaatttttaggtcatgtaggtggagttggaattgatatggagatatctaaaaactttcaacgcatccttcaaaaacaggggtttaaatttaaattgaatacaaaggttactggtgctaccaagaagtcagatggaaaaattgatgtttctattgaagctgcttctggtggtaaagctgaagttatcacttgtgatgtactcttggtttgcattggccgacgaccctttactaagaatttgggactagaagagctgggaattgaactagatcccagaggtagaattccagtcaataccagatttcaaactaaaattccaaatatctatgccattggtgatgtagttgctggtccaatgctggctcacaaagcagaggatgaaggcattatctgtgttgaaggaatggctggtggtgctgtgcacattgactacaattgtgtgccatcagtgatttacacacaccctgaagttgcttgggttggcaaatcagaagagcagttgaaagaagagggtattgagtacaaagttgggaaattcccatttgctgctaacagcagagctaagacaaatgctgacacagatggcatggtgaagatccttgggcagaaatcgacagacagagtactgggagcacatattcttggaccaggtgctggagaaatggtaaatgaagctgctcttgctttggaatatggagcatcctgtgaagatatagctagagtctgtcatgcacatccgaccttatcagaagcttttagagaagcaaatcttgctgcgtcatttggcaaatcaatcaacttttgaattagaagattatataattttttttctgaaatttcctgggagcttttgtagaagtcacattcctgaacaggatattctcacagctccaagaatttctaggactgaattatgaaacttttggaaggtatttaataggtttggacaaaatggaatactcttatatctatattttacataaatttagtattttgtttcagtgcactaatatgtaagacaaaaagctacttattgtagcatcctggaatatctccgtcaactcatattttcatgctgttcatgaaagattcaatgcccctgaatttaaatagcttttttctctgatacagaaaagttgaattttacatggctggagctagaatttgatatgtgaacagttgtgtttgaagcacagtgatcaagttatttttaatttggttttcacattggaaacaagtcagtcattcagatatgattcaaatgtctataaaccgaactgatgtaagta

SEQ ID NO: 419090 - DNA, 2310 bp, Homo sapiens
cgggggatgacgtaggctgcgcctgtgcatgcgcagggaggggagaccttggcggagcggcggaggcgcccagcggaggtgaaagtattggcggaaaggaaaatacagcggaaaaatgcagagctggagtcgtgtgtactgctccttggccaagagaggccatttcaatcgaatatctcatggcctacagggactttctgcagtgcctctgagaacttacgcagatcagccgattgatgctgatgtaacagttataggttctggtcctggaggatatgttgctgctattaaagctgcccagttaggcttcaagacagtctgcattgagaaaaatgaaacacttggtggaacatgcttgaatgttggttgtattccttctaaggctttattgaacaactctcattattaccatatggcccatggaaaagattttgcatctagaggaattgaaatgtccgaagttcgcttgaatttagacaagatgatggagcagaagagtactgcagtaaaagctttaacaggtggaattgcccacttattcaaacagaataaggttgttcatgtcaatggatatggaaagataactggcaaaaatcaagtcactgctacgaaagctgatggcggcactcaggttattgatacaaagaacattcttatagccacgggttcagaagttactccttttcctggaatcacgatagatgaagatacaatagtgtcatctacaggtgctttatctttaaaaaaagttccagaaaagatggttgttattggtgcaggagtaataggtgtagaattgggttcagtttggcaaagacttggtgcagatgtgacagcagttgaatttttaggtcatgtaggtggagttggaattgatatggagatatctaaaaactttcaacgcatccttcaaaaacaggggtttaaatttaaattgaatacaaaggttactggtgctaccaagaagtcagatggaaaaattgatgtttctattgaagctgcttctggtggtaaagctgaagttatcacttgtgatgtactcttggtttgcattggccgacgaccctttactaagaatttgggactagaagagctgggaattgaactagatcccagaggtagaattccagtcaataccagatttcaaactaaaattccaaactcacaaagcagaggatgaaggcattatctgtgttgaaggaatggctggtggtgctgtgcacattgactacaattgtgtgccatcagtgatttacacacaccctgaagttgcttgggttggcaaatcagaagagcagttgaaagaagagggtattgagtacaaagttgggaaattcccatttgctgctaacagcagagctaagacaaatgctgacacagatggcatggtgaagatccttgggcagaaatcgacagacagagtactgggagcacatattcttggaccaggtgctggagaaatggtaaatgaagctgctcttgctttggaatatggagcatcctgtgaagatatagctagagtctgtcatgcacatccgaccttatcagaagcttttagagaagcaaatcttgctgcgtcatttggcaaatcaatcaacttttgaattagaagattatataattttttttctgaaatttcctgggagcttttgtagaagtcacattcctgaacaggatattctcacagctccaagaatttctaggactgaattatgaaacttttggaaggtatttaataggtttggacaaaatggaatactcttatatctatattttacataaatttagtattttgtttcagtgcactaatatgtaagacaaaaagctacttattgtagcatcctggaatatctccgtcaactcatattttcatgctgttcatgaaagattcaatgcccctgaatttaaatagcttttttctctgatacagaaaagttgaattttacatggctggagctagaatttgatatgtgaacagttgtgtttgaagcacagtgatcaagttatttttaatttggttttcacattggaaacaagtcagtcattcagatatgattcaaatgtctataaaccgaactgatgtaagtaaatggtctctcacttgttttatttaacctctaaattctttcattttaggggtagcatttgtgttgaagaggttttaaagcttccattgttgtctgcaactctgaagggtaattatatagttacccaaattaagagagtctatttacggaactcaaatacgtgggcattcaaatgtattacagtggggaatgaagatactgaaataaacgtcttaaatattca

SEQ ID NO: 419091 - DNA, 2202 bp, Homo sapiens
cgggggatgacgtaggctgcgcctgtgcatgcgcagggaggggagaccttggcggagcggcggaggcgcccagcggaggtgaaagtattggcggaaaggaaaatacagcggaaaaatgcagagctggagtcgtgtgtactgctccttggccaagagaggccatttcaatcgaatatctcatggcctacagggactttctgcagtgcctctgagaacttacgcagatcagccgagctttattgaacaactctcattattaccatatggcccatggaaaagattttgcatctagaggaattgaaatgtccgaagttcgcttgaatttagacaagatgatggagcagaagagtactgcagtaaaagctttaacaggtggaattgcccacttattcaaacagaataaggttgttcatgtcaatggatatggaaagataactggcaaaaatcaagtcactgctacgaaagctgatggcggcactcaggttattgatacaaagaacattcttatagccacgggttcagaagttactccttttcctggaatcacgatagatgaagatacaatagtgtcatctacaggtgctttatctttaaaaaaagttccagaaaagatggttgttattggtgcaggagtaataggtgtagaattgggttcagtttggcaaagacttggtgcagatgtgacagcagttgaatttttaggtcatgtaggtggagttggaattgatatggagatatctaaaaactttcaacgcatccttcaaaaacaggggtttaaatttaaattgaatacaaaggttactggtgctaccaagaagtcagatggaaaaattgatgtttctattgaagctgcttctggtggtaaagctgaagttatcacttgtgatgtactcttggtttgcattggccgacgaccctttactaagaatttgggactagaagagctgggaattgaactagatcccagaggtagaattccagtcaataccagatttcaaactaaaattccaaatatctatgccattggtgatgtagttgctggtccaatgctggctcacaaagcagaggatgaaggcattatctgtgttgaaggaatggctggtggtgctgtgcacattgactacaattgtgtgccatcagtgatttacacacaccctgaagttgcttgggttggcaaatcagaagagcagttgaaagaagagggtattgagtacaaagttgggaaattcccatttgctgctaacagcagagctaagacaaatgctgacacagatggcatggtgaagatccttgggcagaaatcgacagacagagtactgggagcacatattcttggaccaggtgctggagaaatggtaaatgaagctgctcttgctttggaatatggagcatcctgtgaagatatagctagagtctgtcatgcacatccgaccttatcagaagcttttagagaagcaaatcttgctgcgtcatttggcaaatcaatcaacttttgaattagaagattatataattttttttctgaaatttcctgggagcttttgtagaagtcacattcctgaacaggatattctcacagctccaagaatttctaggactgaattatgaaacttttggaaggtatttaataggtttggacaaaatggaatactcttatatctatattttacataaatttagtattttgtttcagtgcactaatatgtaagacaaaaagctacttattgtagcatcctggaatatctccgtcaactcatattttcatgctgttcatgaaagattcaatgcccctgaatttaaatagcttttttctctgatacagaaaagttgaattttacatggctggagctagaatttgatatgtgaacagttgtgtttgaagcacagtgatcaagttatttttaatttggttttcacattggaaacaagtcagtcattcagatatgattcaaatgtctataaaccgaactgatgtaagtaaatggtctctcacttgttttatttaacctctaaattctttcattttaggggtagcatttgtgttgaagaggttttaaagcttccattgttgtctgcaactctgaagggtaattatatagttacccaaattaagagagtctatttacggaactcaaatacgtgggcattcaaatgtattacagtggggaatgaagatactgaaataaacgtcttaaatattca

SEQ ID NO: 419092 - DNA, 2530 bp, Homo sapiens
cgggggatgacgtaggctgcgcctgtgcatgcgcagggaggggagaccttggcggagcggcggaggcgcccagcggaggtgaaagtattggcggaaaggaaaatacagcggaaaaatgcagagctggagtcgtgtgtactgctccttggccaagagaggccatttcaatcgaatatctcatggcctacagggactttctgcagtgcctctgagaacttacgcagatcagccgattgatgctgatgtaacagttataggttctggtcctggaggatatgttgctgctattaaagctgcccagttaggcttcaagacagtctgcattgagaaaaatgaaacacttggtggaacatgcttgaatgttggttgtattccttctaaggctttattgaacaactctcattattaccatatggcccatggaaaagattttgcatctagaggaattgaaaacttataaccatcgtaaagtgttcagaggatatgttatcacagtgggatataatgttttattttggactgcctttttacccaagcattaggttgaaattttccagttggtgagtgaaaaacactgcatattgcttcaagaatttagctaagaactaaagattaattgaacaaattacagtgtccgaagttcgcttgaatttagacaagatgatggagcagaagagtactgcagtaaaagctttaacaggtggaattgcccacttattcaaacagaataaggttgttcatgtcaatggatatggaaagataactggcaaaaatcaagtcactgctacgaaagctgatggcggcactcaggttattgatacaaagaacattcttatagccacgggttcagaagttactccttttcctggaatcacgatagatgaagatacaatagtgtcatctacaggtgctttatctttaaaaaaagttccagaaaagatggttgttattggtgcaggagtaataggtgtagaattgggttcagtttggcaaagacttggtgcagatgtgacagcagttgaatttttaggtcatgtaggtggagttggaattgatatggagatatctaaaaactttcaacgcatccttcaaaaacaggggtttaaatttaaattgaatacaaaggttactggtgctaccaagaagtcagatggaaaaattgatgtttctattgaagctgcttctggtggtaaagctgaagttatcacttgtgatgtactcttggtttgcattggccgacgaccctttactaagaatttgggactagaagagctgggaattgaactagatcccagaggtagaattccagtcaataccagatttcaaactaaaattccaaatatctatgccattggtgatgtagttgctggtccaatgctggctcacaaagcagaggatgaaggcattatctgtgttgaaggaatggctggtggtgctgtgcacattgactacaattgtgtgccatcagtgatttacacacaccctgaagttgcttgggttggcaaatcagaagagcagttgaaagaagagggtattgagtacaaagttgggaaattcccatttgctgctaacagcagagctaagacaaatgctgacacagatggcatggtgaagatccttgggcagaaatcgacagacagagtactgggagcacatattcttggaccaggtgctggagaaatggtaaatgaagctgctcttgctttggaatatggagcatcctgtgaagatatagctagagtctgtcatgcacatccgaccttatcagaagcttttagagaagcaaatcttgctgcgtcatttggcaaatcaatcaacttttgaattagaagattatataattttttttctgaaatttcctgggagcttttgtagaagtcacattcctgaacaggatattctcacagctccaagaatttctaggactgaattatgaaacttttggaaggtatttaataggtttggacaaaatggaatactcttatatctatattttacataaatttagtattttgtttcagtgcactaatatgtaagacaaaaagctacttattgtagcatcctggaatatctccgtcaactcatattttcatgctgttcatgaaagattcaatgcccctgaatttaaatagcttttttctctgatacagaaaagttgaattttacatggctggagctagaatttgatatgtgaacagttgtgtttgaagcacagtgatcaagttatttttaatttggttttcacattggaaacaagtcagtcattcagatatgattcaaatgtctataaaccgaactgatgtaagtaaatggtctctcacttgttttatttaacctctaaattctttcattttaggggtagcatttgtgttgaagaggttttaaagcttccattgttgtctgcaactctgaagggtaattatatagttacccaaattaagagagtctatttacggaactcaaatacgtgggcattcaaatgtattacagtggggaatgaagatactgaaataaacgtcttaaatattca

SEQ ID NO: 419093 - DNA, 2479 bp, Homo sapiens
actggctcagcccggccctgggctccgaggtggccgctcatcctgcagcaggcgagggacggggctgggcccaggctgtggcgagtcctttcgggttgtgtgacggccggcggtcacacatgccacacccccaagcctgggccgagggccatcccggtcacacataggcctctaccttggaggaagtagaggccatttcaatcgaatatctcatggcctacagggactttctgcagtgcctctgagaacttacgcagatcagccgattgatgctgatgtaacagttataggttctggtcctggaggatatgttgctgctattaaagctgcccagttaggcttcaagacagtctgcattgagaaaaatgaaacacttggtggaacatgcttgaatgttggttgtattccttctaaggctttattgaacaactctcattattaccatatggcccatggaaaagattttgcatctagaggaattgaaacattaggttgaaattttccagttggtgagtgaaaaacactgcatattgcttcaagaatttagctaagaactaaagattaattgaacaaattacagtgtccgaagttcgcttgaatttagacaagatgatggagcagaagagtactgcagtaaaagctttaacaggtggaattgcccacttattcaaacagaataaggttgttcatgtcaatggatatggaaagataactggcaaaaatcaagtcactgctacgaaagctgatggcggcactcaggttattgatacaaagaacattcttatagccacgggttcagaagttactccttttcctggaatcacgatagatgaagatacaatagtgtcatctacaggtgctttatctttaaaaaaagttccagaaaagatggttgttattggtgcaggagtaataggtgtagaattgggttcagtttggcaaagacttggtgcagatgtgacagcagttgaatttttaggtcatgtaggtggagttggaattgatatggagatatctaaaaactttcaacgcatccttcaaaaacaggggtttaaatttaaattgaatacaaaggttactggtgctaccaagaagtcagatggaaaaattgatgtttctattgaagctgcttctggtggtaaagctgaagttatcacttgtgatgtactcttggtttgcattggccgacgaccctttactaagaatttgggactagaagagctgggaattgaactagatcccagaggtagaattccagtcaataccagatttcaaactaaaattccaaatatctatgccattggtgatgtagttgctggtccaatgctggctcacaaagcagaggatgaaggcattatctgtgttgaaggaatggctggtggtgctgtgcacattgactacaattgtgtgccatcagtgatttacacacaccctgaagttgcttgggttggcaaatcagaagagcagttgaaagaagagggtattgagtacaaagttgggaaattcccatttgctgctaacagcagagctaagacaaatgctgacacagatggcatggtgaagatccttgggcagaaatcgacagacagagtactgggagcacatattcttggaccaggtgctggagaaatggtaaatgaagctgctcttgctttggaatatggagcatcctgtgaagatatagctagagtctgtcatgcacatccgaccttatcagaagcttttagagaagcaaatcttgctgcgtcatttggcaaatcaatcaacttttgaattagaagattatataattttttttctgaaatttcctgggagcttttgtagaagtcacattcctgaacaggatattctcacagctccaagaatttctaggactgaattatgaaacttttggaaggtatttaataggtttggacaaaatggaatactcttatatctatattttacataaatttagtattttgtttcagtgcactaatatgtaagacaaaaagctacttattgtagcatcctggaatatctccgtcaactcatattttcatgctgttcatgaaagattcaatgcccctgaatttaaatagcttttttctctgatacagaaaagttgaattttacatggctggagctagaatttgatatgtgaacagttgtgtttgaagcacagtgatcaagttatttttaatttggttttcacattggaaacaagtcagtcattcagatatgattcaaatgtctataaaccgaactgatgtaagtaaatggtctctcacttgttttatttaacctctaaattctttcattttaggggtagcatttgtgttgaagaggttttaaagcttccattgttgtctgcaactctgaagggtaattatatagttacccaaattaagagagtctatttacggaactcaaatacgtgggcattcaaatgtattacagtggggaatgaagatactgaaataaacgtcttaaatattca

SEQ ID NO: 419094 - DNA, 205 bp, Homo sapiens
caaagcagaggatgaaggcattatctgtgttgaaggaatggctggtggtgctgtgcacattgactacaattgtgtgccatcagtgatttacacacaccctgaagttgcttgggttggcaaatcagaagagcagttgaaagaagaggtaagtctgaacatgggtggttttaagccaatgtgtgagttgtgccaatgacattggtgg

SEQ ID NO: 419095 - DNA, 2351 bp, Homo sapiens
cgggggatgacgtaggctgcgcctgtgcatgcgcagggaggggagaccttggcggagcggcggaggcgcccagcggaggtgaaagtattggcggaaaggaaaatacagcggaaaaatgcagagctggagtcgtgtgtactgctccttggccaagagaggccatttcaatcgaatatctcatggcctacagggactttctgcagtgcctctgagaacttacgcagatcagccgattgatgctgatgtaacagttataggttctggtcctggaggatatgttgctgctattaaagctgcccagttaggcttcaagacagtctgcattgagaaaaatgaaacacttggtggaacatgcttgaatgttggttgtattccttctaaggctttattgaacaactctcattattaccatatggcccatggaaaagattttgcatctagaggaattgaaatgtccgaagttcgcttgaatttagacaagatgatggagcagaagagtactgcagtaaaagctttaacaggtggaattgcccacttattcaaacagaataaggttgttcatgtcaatggatatggaaagataactggcaaaaatcaagtcactgctacgaaagctgatggcggcactcaggttattgatacaaagaacattcttatagccacgggttcagaagttactccttttcctggaatcacgatagatgaagatacaatagtgtcatctacaggtgctttatctttaaaaaaagttccagaaaagatggttgttattggtgcaggagtaataggtgtagaattgggttcagtttggcaaagacttggtgcagatgtgacagcagttgaatttttaggtcatgtaggtggagttggaattgatatggagatatctaaaaactttcaacgcatccttcaaaaacaggggtttaaatttaaattgaatacaaaggttactggtgctaccaagaagtcagatggaaaaattgatgtttctattgaagctgcttctggtggtaaagctgaagttatcacttgtgatgtactcttggtttgcattggccgacgaccctttactaagaatttgggactagaagagctgggaattgaactagatcccagaggtagaattccagtcaataccagatttcaaactaaaattccaaatatctatgccattggtgatgtagttgctggtccaatgctggctcacaaagcagaggatgaaggcattatctgtgttgaaggaatggctggtggtgctgtgcacattgactacaattgtgtgccatcagtgatttacacacaccctgaagttgcttgggttggcaaatcagaagagcagttgaaagaagagggtattgagtacaaagttgggaaattcccatttgctgctaacagcagagctaagacaaatgctgacacagatggcatggtgaagatccttgggcagaaatcgacagacagagtactgggagcacatattcttggaccaggtgctggagaaatggtaaatgaagctgctcttgctttggaatatggagcatcctgtgaagatatagctagagtctgtcatgcacatccgaccttatcagaagcttttagagaagcaaatcttgctgcgtcatttggcaaatcaatcaacttttgaattagaagattatataattttttttctgaaatttcctgggagcttttgtagaagtcacattcctgaacaggatattctcacagctccaagaatttctaggactgaattatgaaacttttggaaggtatttaataggtttggacaaaatggaatactcttatatctatattttacataaatttagtattttgtttcagtgcactaatatgtaagacaaaaagctacttattgtagcatcctggaatatctccgtcaactcatattttcatgctgttcatgaaagattcaatgcccctgaatttaaatagcttttttctctgatacagaaaagttgaattttacatggctggagctagaatttgatatgtgaacagttgtgtttgaagcacagtgatcaagttatttttaatttggttttcacattggaaacaagtcagtcattcagatatgattcaaatgtctataaaccgaactgatgtaagtaaatggtctctcacttgttttatttaacctctaaattctttcattttaggggtagcatttgtgttgaagaggttttaaagcttccattgttgtctgcaactctgaagggtaattatatagttacccaaattaagagagtctatttacggaactcaaatacgtgggcattcaaatgtattacagtggggaatgaagatactgaaataaacgtcttaaatattca

SEQ ID NO: 419096 - DNA, 3715 bp, Homo sapiens
cgggggatgacgtaggctgcgcctgtgcatgcgcagggaggggagaccttggcggagcggcggaggcgcccagcggaggtgaaagtattggcggaaaggaaaatacagcggaaaaatgcagagctggagtcgtgtgtactgctccttggccaagagaggccatttcaatcgaatatctcatggcctacagggactttctgcagtgcctctgagaacttacgcagatcagccgattgatgctgatgtaacagttataggttctggtcctggaggatatgttgctgctattaaagctgcccagttaggcttcaagacagtctgcattgagaaaaatgaaacacttggtggaacatgcttgaatgttggttgtattccttctaaggctttattgaacaactctcattattaccatatggcccatggaaaagattttgcatctagaggaattgaaatgtccgaagttcgcttgaatttagacaagatgatggagcagaagagtactgcagtaaaagctttaacaggtggaattgcccacttattcaaacagaataaggttgttcatgtcaatggatatggaaagataactggcaaaaatcaagtcactgctacgaaagctgatggcggcactcaggttattgatacaaagaacattcttatagccacgggttcagaagttactccttttcctggaatcacgatagatgaagatacaatagtgtcatctacaggtgctttatctttaaaaaaagttccagaaaagatggttgttattggtgcaggagtaataggtgtagaattgggttcagtttggcaaagacttggtgcagatgtgacagcagttgaatttttaggtcatgtaggtggagttggaattgatatggagatatctaaaaactttcaacgcatccttcaaaaacaggggtttaaatttaaattgaatacaaaggttactggtgctaccaagaagtcagatggaaaaattgatgtttctattgaagctgcttctggtggtaaagctgaagttatcacttgtgatgtactcttggtttgcattggccgacgaccctttactaagaatttgggactagaagagctgggaattgaactagatcccagaggtagaattccagtcaataccagatttcaaactaaaattccaaatatctatgccattggtgatgtagttgctggtccaatgctggctcacaaagcagaggatgaaggcattatctgtgttgaaggaatggctggtggtgctgtgcacattgactacaattgtgtgccatcagtgatttacacacaccctgaagttgcttgggttggcaaatcagaagagcagttgaaagaagagggtattgagtacaaagttgggaaattcccatttgctgctaacagcagagctaagacaaatgctgacacagatggcatggtgaagatccttgggcagaaatcgacagacagagtactgggagcacatattcttggaccaggtgctggagaaatggtaaatgaagctgctcttgctttggaatatggagcatcctgtgaagatatagctagagtctgtcatgcacatccgaccttatcagaagcttttagagaagcaaatcttgctgcgtcatttggcaaatcaatcaacttttgaattagaagattatataattttttttctgaaatttcctgggagcttttgtagaagtcacattcctgaacaggatattctcacagctccaagaatttctaggactgaattatgaaacttttggaaggtatttaataggtttggacaaaatggaatactcttatatctatattttacataaatttagtattttgtttcagtgcactaatatgtaagacaaaaagctacttattgtagcatcctggaatatctccgtcaactcatattttcatgctgttcatgaaagattcaatgcccctgaatttaaatagcttttttctctgatacagaaaagttgaattttacatggctggagctagaatttgatatgtgaacagttgtgtttgaagcacagtgatcaagttatttttaatttggttttcacattggaaacaagtcagtcattcagatatgattcaaatgtctataaaccgaactgatgtaagtaaatggtctctcacttgttttatttaacctctaaattctttcattttaggggtagcatttgtgttgaagaggttttaaagcttccattgttgtctgcaactctgaagggtaattatatagttacccaaattaagagagtctatttacggaactcaaatacgtgggcattcaaatgtattacagtggggaatgaagatactgaaataaacgtcttaaatattcatttactggttatcatgagtacgtgttgagatggtcatagttttttttatgactacttctagtgtatattctaatttcttttctaggcctgaatgtatctttattttcatgttataggacaatattaaggcattttaaaggtcatcatcctttcatctattttagatacacctactaaatgtttaatatatacttttggagaagtacaacataaggggagtctttaatctgtgttttccttggctgggttaatgactgtttatttaaagagtgttgtaaaattggatgtgtggtgtttaaaatggccatgtcctgaggaaacttaagtaacaaagtactaaatgctaagtaggcttttgcatattgtaactaaatttaagaataattcagattaagtagttctgaaatttggtatagatagcatagattgtctcatgctcatgagtgacataatgaccctggattctgttacatacttctaaagaaaattgattgttgtcttaggaggcagttaacttggctgaacaccaactccacactctgtcttgtttgtaggtggcagcagctgaaatctcttctcagttgttttagctttagctatgctgctggaagtctttcccatgcaagtgtgtagttcaggggtcaaccagagtttgggcagaaggaagtctgccccttctgtgcctcctgttttttgggggtttcccctttatgttccagctgttgtggttgccccatattctgccctctgatccttaaccaataaaacttggcttttgtttccccctcaagtgagaacccgttaaaaatgagacattgagccagtgctgttcactttttaagtgccaacttccctctactttccacttgtttatagttgtttccagtgcctttagttttttctaaaatatatttgttcagagtttgcagttgctatcagcaggagggttggtctgatatctgtgtgctactttgccattattggaagtgaactctgcatctttttaaaaatttgaaatcccggtatcatgtgaagtgctgtttatgtaaatctcaacatatcccttactcagggaaaaaaaagtttttagttagggaatagtgaaatataatttaatatggaattctagctgtagagttaaatccatctttaagtgtttacattcagtatgagaatgcaaatttatctgtatggggaataaagtcctaggaataaaacaagttttaagtgttcacttactgttatctactaagctgtcaatatttttgtggcttgtgaagagtgaaattaattgtccacttcattgaactgattaaaattagtaatttcaactggctgggagcggtggctcactcctgtaatcc

SEQ ID NO: 419097 - DNA, 2261 bp, Homo sapiens
cgggggatgacgtaggctgcgcctgtgcatgcgcagggaggggagaccttggcggagcggcggaggcgcccagcggaggtgaaagtattggcggaaaggaaaatacagcggaaaaatgcagagctggagtcgtgtgtactgctccttggccaagagaggccatttcaatcgaatatctcatggcctacagggactttctgcagtgcctctgagaacttacgcagatcagccgattgatgctgatgtaacagttataggttctggtcctggaggatatgttgctgctattaaagctgcccagttaggcttcaagacagtctgcattgagaaaaatgaaacacttggtggaacatgcttgaatgttggttgtattccttctaaggctttattgaacaactctcattattaccatatggcccatggaaaagattttgcatctagaggaattgaaatgtccgaagttcgcttgaatttagacaagatgatggagcagaagagtactgcagtaaaagctttaacaggtggaattgcccacttattcaaacagaataaggttgttcatgtcaatggatatggaaagataactggcaaaaatcaagtcactgctacgaaagctgatggcggcactcaggttattgatacaaagaacattcttatagccacgggttcagaagttactccttttcctggaatcacgatagatgaagatacaatagtgtcatctacaggtgctttatctttaaaaaaagttccagaaaagatggttgttattggtgcaggagtaataggtgtagaattgggttcagtttggcaaagacttggtgcagatgtgacagcagttgaatttttaggtcatgtaggtggagttggaattgatatggagatatctaaaaactttcaacgcatccttcaaaaacaggggtttaaatttaaattgaatacaaaggttactggtgctaccaagaagtcagatggaaaaattgatgtttctattgaagctgcttctggtggtaaagctgaagttatcacttgtgatgtactcttggtttgcattggccgacgaccctttactaagaatttgggactagaagagctgggaattgaactagatcccagaggtagaattccagtcaataccagatttcaaactaaaattccaaatatctatgccattggtgatgtagttgctggtccaatgctggctcacaaagcagaggatgaaggcattatctgtgttgaaggaatggctggtggtgctgtgcacattgactacaattgtgtgccatcagtgatttacacacaccctgaagttgcttgggttggcaaatcagaagagcagttgaaagaagagggtattgagtacaaagttgggaaattcccatttgctgctaacagcagagctaagacaaatgctgacacagatggcatggtgaagatccttgggcagaaatcgacagacagagtactgggagcacatattcttggaccaaccttatcagaagcttttagagaagcaaatcttgctgcgtcatttggcaaatcaatcaacttttgaattagaagattatataattttttttctgaaatttcctgggagcttttgtagaagtcacattcctgaacaggatattctcacagctccaagaatttctaggactgaattatgaaacttttggaaggtatttaataggtttggacaaaatggaatactcttatatctatattttacataaatttagtattttgtttcagtgcactaatatgtaagacaaaaagctacttattgtagcatcctggaatatctccgtcaactcatattttcatgctgttcatgaaagattcaatgcccctgaatttaaatagcttttttctctgatacagaaaagttgaattttacatggctggagctagaatttgatatgtgaacagttgtgtttgaagcacagtgatcaagttatttttaatttggttttcacattggaaacaagtcagtcattcagatatgattcaaatgtctataaaccgaactgatgtaagtaaatggtctctcacttgttttatttaacctctaaattctttcattttaggggtagcatttgtgttgaagaggttttaaagcttccattgttgtctgcaactctgaagggtaattatatagttacccaaattaagagagtctatttacggaactcaaatacgtgggcattcaaatgtattacagtggggaatgaagatactgaaataaacgtcttaaatattca

SEQ ID NO: 419098 - DNA, 2646 bp, Homo sapiens
cgggggatgacgtaggctgcgcctgtgcatgcgcagggaggggagaccttggcggagcggcggaggcgcccagcggaggtgaaagtattggcggaaaggaaaatacagcggaaaaatgcagagctggagtcgtgtgtactgctccttggccaagagaggccatttcaatcgaatatctcatggcctacagggactttctgcagtgcctctgagaacttacgcagatcagccgattgatgctgatgtaacagttataggttctggtcctggaggatatgttgctgctattaaagctgcccagttaggcttcaagacagtctgcattgagaaaaatgaaacacttggtggaacatgcttgaatgttggttgtattccttctaaggctttattgaacaactctcattattaccatatggcccatggaaaagattttgcatctagaggaattgaaaacttataaccatcgtaaagtgttcagaggatatgttatcacagtgggatataatgttttattttggactgcctttttacccaaggtagacattttatagtgtttgataggttctgtttctgtgatacaatgatgttggccttttgtcaactataattataagttattacattttgaaactttaatactgccttttataagcattaggttgaaattttccagttggtgagtgaaaaacactgcatattgcttcaagaatttagctaagaactaaagattaattgaacaaattacagtgtccgaagttcgcttgaatttagacaagatgatggagcagaagagtactgcagtaaaagctttaacaggtggaattgcccacttattcaaacagaataaggttgttcatgtcaatggatatggaaagataactggcaaaaatcaagtcactgctacgaaagctgatggcggcactcaggttattgatacaaagaacattcttatagccacgggttcagaagttactccttttcctggaatcacgatagatgaagatacaatagtgtcatctacaggtgctttatctttaaaaaaagttccagaaaagatggttgttattggtgcaggagtaataggtgtagaattgggttcagtttggcaaagacttggtgcagatgtgacagcagttgaatttttaggtcatgtaggtggagttggaattgatatggagatatctaaaaactttcaacgcatccttcaaaaacaggggtttaaatttaaattgaatacaaaggttactggtgctaccaagaagtcagatggaaaaattgatgtttctattgaagctgcttctggtggtaaagctgaagttatcacttgtgatgtactcttggtttgcattggccgacgaccctttactaagaatttgggactagaagagctgggaattgaactagatcccagaggtagaattccagtcaataccagatttcaaactaaaattccaaatatctatgccattggtgatgtagttgctggtccaatgctggctcacaaagcagaggatgaaggcattatctgtgttgaaggaatggctggtggtgctgtgcacattgactacaattgtgtgccatcagtgatttacacacaccctgaagttgcttgggttggcaaatcagaagagcagttgaaagaagagggtattgagtacaaagttgggaaattcccatttgctgctaacagcagagctaagacaaatgctgacacagatggcatggtgaagatccttgggcagaaatcgacagacagagtactgggagcacatattcttggaccaggtgctggagaaatggtaaatgaagctgctcttgctttggaatatggagcatcctgtgaagatatagctagagtctgtcatgcacatccgaccttatcagaagcttttagagaagcaaatcttgctgcgtcatttggcaaatcaatcaacttttgaattagaagattatataattttttttctgaaatttcctgggagcttttgtagaagtcacattcctgaacaggatattctcacagctccaagaatttctaggactgaattatgaaacttttggaaggtatttaataggtttggacaaaatggaatactcttatatctatattttacataaatttagtattttgtttcagtgcactaatatgtaagacaaaaagctacttattgtagcatcctggaatatctccgtcaactcatattttcatgctgttcatgaaagattcaatgcccctgaatttaaatagcttttttctctgatacagaaaagttgaattttacatggctggagctagaatttgatatgtgaacagttgtgtttgaagcacagtgatcaagttatttttaatttggttttcacattggaaacaagtcagtcattcagatatgattcaaatgtctataaaccgaactgatgtaagtaaatggtctctcacttgttttatttaacctctaaattctttcattttaggggtagcatttgtgttgaagaggttttaaagcttccattgttgtctgcaactctgaagggtaattatatagttacccaaattaagagagtctatttacggaactcaaatacgtgggcattcaaatgtattacagtggggaatgaagatactgaaataaacgtcttaaatattca

SEQ ID NO: 419099 - DNA, 2312 bp, Homo sapiens
cgggggatgacgtaggctgcgcctgtgcatgcgcagggaggggagaccttggcggagcggcggaggcgcccagcggaggtgaaagtattggcggaaaggaaaatacagcggaaaaatgcagagctggagtcgtgtgtactgctccttggccaagagaggccatttcaatcgaatatctcatggcctacagggactttctgcagtgcctctgagaacttacgcagatcagccgattgatgctgatgtaacagttataggttctggtcctggaggatatgttgctgctattaaagctgcccagttaggcttcaagacagtctgcattgagaaaaatgaaacacttggtggaacatgcttgaatgttggttgtattccttctaaggctttattgaacaactctcattattaccatatggcccatggaaaagattttgcatctagaggaattgaaatgtccgaagttcgcttgaatttagacaagatgatggagcagaagagtactgcagtaaaagctttaacaggtggaattgcccacttattcaaacagaataaggttgttcatgtcaatggatatggaaagataactggcaaaaatcaagtcactgctaacattcttatagccacgggttcagaagttactccttttcctggaatcacgatagatgaagatacaatagtgtcatctacaggtgctttatctttaaaaaaagttccagaaaagatggttgttattggtgcaggagtaataggtgtagaattgggttcagtttggcaaagacttggtgcagatgtgacagcagttgaatttttaggtcatgtaggtggagttggaattgatatggagatatctaaaaactttcaacgcatccttcaaaaacaggggtttaaatttaaattgaatacaaaggttactggtgctaccaagaagtcagatggaaaaattgatgtttctattgaagctgcttctggtggtaaagctgaagttatcacttgtgatgtactcttggtttgcattggccgacgaccctttactaagaatttgggactagaagagctgggaattgaactagatcccagaggtagaattccagtcaataccagatttcaaactaaaattccaaatatctatgccattggtgatgtagttgctggtccaatgctggctcacaaagcagaggatgaaggcattatctgtgttgaaggaatggctggtggtgctgtgcacattgactacaattgtgtgccatcagtgatttacacacaccctgaagttgcttgggttggcaaatcagaagagcagttgaaagaagagggtattgagtacaaagttgggaaattcccatttgctgctaacagcagagctaagacaaatgctgacacagatggcatggtgaagatccttgggcagaaatcgacagacagagtactgggagcacatattcttggaccaggtgctggagaaatggtaaatgaagctgctcttgctttggaatatggagcatcctgtgaagatatagctagagtctgtcatgcacatccgaccttatcagaagcttttagagaagcaaatcttgctgcgtcatttggcaaatcaatcaacttttgaattagaagattatataattttttttctgaaatttcctgggagcttttgtagaagtcacattcctgaacaggatattctcacagctccaagaatttctaggactgaattatgaaacttttggaaggtatttaataggtttggacaaaatggaatactcttatatctatattttacataaatttagtattttgtttcagtgcactaatatgtaagacaaaaagctacttattgtagcatcctggaatatctccgtcaactcatattttcatgctgttcatgaaagattcaatgcccctgaatttaaatagcttttttctctgatacagaaaagttgaattttacatggctggagctagaatttgatatgtgaacagttgtgtttgaagcacagtgatcaagttatttttaatttggttttcacattggaaacaagtcagtcattcagatatgattcaaatgtctataaaccgaactgatgtaagtaaatggtctctcacttgttttatttaacctctaaattctttcattttaggggtagcatttgtgttgaagaggttttaaagcttccattgttgtctgcaactctgaagggtaattatatagttacccaaattaagagagtctatttacggaactcaaatacgtgggcattcaaatgtattacagtggggaatgaagatactgaaataaacgtcttaaatattca

SEQ ID NO: 419100 - DNA, 1127 bp, Homo sapiens
  misc_feature (7)..(7): n is a, c, g, or t
agcggantcgcgcccttgccgctgccaccgcaccccgccatggagcggccgtcgctgcgcgccctgctcctcggcgccgctgggctgctgctcctgctcctgcccctctcctcttcctcctcttcggacacctgcggcccctgcgagccggcctcctgcccgcccctgcccccgctgggctgcctgctgggcgagacccgcgacgcgtgcggctgctgccctatgtgcgcccgcggcgagggcgagccgtgcgggggtggcggcgccggcagggggtactgcgcgccgggcatggagtgcgtgaagagccgcaagaggcggaagggtaaagccggggcagcagccggcggtccgggtgtaagcggcgtgtgcgtgtgcaagagccgctacccggtgtgcggcagcgacggcaccacctacccgagcggctgccagctgcgcgccgccagccagagggccgagagccgcggggagaaggccatcacccaggtcagcaagggcacctgcgagcaaggtccttccatagtgacgccccccaaggacatctggaatgtcactggtgcccaggtgtacttgagctgtgaggtcatcggaatcccgacacctgtcctcatctggaacaaggtaaaaaggggtcactatggagttcaaaggacagaactcctgcctggtgaccgggacaacctggccattcagacccggggtggcccagaaaagcatgaagtaactggctgggtgctggtatctcctctaagtaaggaagatgctggagaatatgagtgccatgcatccaattcccaaggacaggcttcagcatcagcaaaaattacagtggttgatgccttacatgaaataccagtgaaaaaaggtgaaggtgccgagctataaacctccagaatattattagtctgcatggttaaaagtagtcatggataactacattacctgttcttgcctaataagtttcttttaatccaatccactaacactttagttatattcactggttttacacagagaaatacaaaataaagatcacacatcaagactatctacaaaaatttattatatatttacagaagaaaagcatgcatatcattaaacaaataaaatactttttatcacaa

SEQ ID NO: 419101 - DNA, 1051 bp, Homo sapiens
  misc_feature (7)..(7): n is a, c, g, or t
agcggantcgcgcccttgccgctgccaccgcaccccgccatggagcggccgtcgctgcgcgccctgctcctcggcgccgctgggctgctgctcctgctcctgcccctctcctcttcctcctcttcggacacctgcggcccctgcgagccggcctcctgcccgcccctgcccccgctgggctgcctgctgggcgagacccgcgacgcgtgcggctgctgccctatgtgcgcccgcggcgagggcgagccgtgcgggggtggcggcgccggcagggggtactgcgcgccgggcatggagtgcgtgaagagccgcaagaggcggaagggtaaagccggggcagcagccggcggtccgggtgtaagcggcgtgtgcgtgtgcaagagccgctacccggtgtgcggcagcgacggcaccacctacccgagcggctgccagctgcgcgccgccagccagagggccgagagccgcggggagaaggccatcacccaggtcagcaagggcacctgcgagcaaggtccttccatagtgacgccccccaaggacatctggaatgtcactggtgcccaggtgtacttgagctgtgaggtcatcggaatcccgacacctgtcctcatctggaacaaggtaaaaaggggtcactatggagttcaaaggacagaactcctgcctggtgaccgggacaacctggccattcagacccggggtggcccagaaaagcatgaagtaactggctgggtgctggtatctcctctaagtaaggaagatgctggagaatatgagtgccatgcatccaattcccaaggacaggcttcagcatcagcaaaaattacagtggttgatgccttacatgaaataccagtgaaaaaaggtgaaggtgccgagctataaacctccagaatattattagtctgcatggttaaaagtagtcatggataactacattacctgttcttgcctaataagtttcttttaatccaatccactaacactttagttatattcactggttttacacagagaaatacaaaataaagatcacacatcaagacta

SEQ ID NO: 419102 - DNA, 1423 bp, Homo sapiens
  misc_feature (7)..(7): n is a, c, g, or t
agcggantcgcgcccttgccgctgccaccgcaccccgccatggagcggccgtcgctgcgcgccctgctcctcggcgccgctgggctgctgctcctgctcctgcccctctcctcttcctcctcttcggacacctgcggcccctgcgagccggcctcctgcccgcccctgcccccgctgggctgcctgctgggcgagacccgcgacgcgtgcggctgctgccctatgtgcgcccgcggcgagggcgagccgtgcgggggtggcggcgccggcagggggtactgcgcgccgggcatggagtgcgtgaagagccgcaagaggcggaagggtaaagccggggcagcagccggcggtccgggtgtaagcggcgtgtgcgtgtgcaagagccgctacccggtgtgcggcagcgacggcaccacctacccgagcggctgccagctgcgcgccgccagccagagggccgagagccgcggggagaaggccatcacccaggtcagcaagggcacctgcgagcaaggtccttccatagtgacgccccccaaggacatctggaatgtcactggtgcccaggtgtacttgagctgtgaggtcatcggaatcccgacacctgtcctcatctggaacaaggtaaaaaggggtcactatggagttcaaaggacagaactcctgcctggtgaccgggacaacctggccattcagacccggggtggcccagaaaagcatgaagtaactggctgggtgctggtatctcctctaagtaaggaagatgctggagaatatgagtgccatgcatccaattcccaaggacaggcttcagcatcagcaaaaattacagtggttgatgccttacatgaaataccagtgaaaaaaggtgaaggtgccgagctataaacctccagaatattattagtctgcatggttaaaagtagtcatggataactacattacctgttcttgcctaataagtttcttttaatccaatccactaacactttagttatattcactggttttacacagagaaatacaaaataaagatcacacatcaagactatctacaaaaatttattatatatttacagaagaaaagcatgcatatcattaaacaaataaaatactttttatcacaaaaaaaaaaaaaaaaaaaaaaaaaaaaaaaaaaaaaaaaaaaaaaaaaaaaaaaaaaaaaaaaaaaaaaaaaacccaataaaaaaaaaaaaaaaaaaaaaaaaaaatttggggcccctttgccccaagcatttttaaacttggccaagttttttcttggggcccaatttggggctcatttggccaattccccttataagggggcctttaaaaattaatggccccgggtttccaaacgttggaattggaaaaacctggggttccccaattaggctttagaatcccctttacccttggg

SEQ ID NO: 419103 - DNA, 644 bp, Homo sapiens
tgcccccatcttctgcatgaagccttccacaaatgtctgtccattatgtttttgatttatgtaaacttttttccgagttataatattctgcaagaccatactactatcaacctctctgatctctagtgtcagtctcccagacccaaaaggggtcactatggagttcaaaggacagaactcctgcctggtgaccgggacaacctggccattcagacccggggtggcccagaaaagcatgaagtaactggctgggtgctggtatctcctctaagtaaggaagatgctggagaatatgagtgccatgcatccaattcccaaggacaggcttcagcatcagcaaaaattacagtggttgatgccttacatgaaataccagtgaaaaaaggtgaaggtgccgagctataaacctccagaatattattagtctgcatggttaaaagtagtcatggataactacattacctgttcttgcctaataagtttcttttaatccaatccactaacactttagttatattcactggttttacacagagaaatacaaaataaagatcacacatcaagactatctacaaaaatttattatatatttacagaagaaaagcatgcatatcattaaacaaataaaatactttttatcacaa

SEQ ID NO: 419104 - DNA, 1151 bp, Homo sapiens
  misc_feature (7)..(7): n is a, c, g, or t
agcggantcgcgcccttgccgctgccaccgcaccccgccatggagcggccgtcgctgcgcgccctgctcctcggcgccgctgggctgctgctcctgctcctgcccctctcctcttcctcctcttcggacacctgcggcccctgcgagccggcctcctgcccgcccctgcccccgctgggctgcctgctgggcgagacccgcgacgcgtgcggctgctgccctatgtgcgcccgcggcgagggcgagccgtgcgggggtggcggcgccggcagggggtactgcgcgccgggcatggagtgcgtgaagagccgcaagaggcggaagggtaaagccggggcagcagccggcggtccgggtgtaagcggcgtgtgcgtgtgcaagagccgctacccggtgtgcggcagcgacggcaccacctacccgagcggctgccagctgcgcgccgccagccagagggccgagagccgcggggagaaggccatcacccaggtcagcaagggcacctgcgagcaaggtccttccatagtgacgccccccaaggacatctggaatgtcactggtgcccaggtgtacttgagctgtgaggtcatcggaatcccgacacctgtcctcatctggaacaaggtaaaaaggggtcactatggagttcaaaggacagaactcctgcctggtgaccgggacaacctggccattcagacccggggtggcccagaaaagcatgaagtaactggctgggtgctggtatctcctctaagtaaggaagatgctggagaatatgagtgccatgcatccaattcccaaggacaggcttcagcatcagcaaaaattacagtggttgatgccttacatgaaataccagtgaaaaaaggtgaaggtgccgagctataaacctccagaatattattagtctgcatggttaaaagtagtcatggataactacattacctgttcttgcctaataagtttcttttaatccaatccactaacactttagttatattcactggttttacacagagaaatacaaaataaagatcacacatcaagactatctacaaaaatttattatatatttacagaagaaaagcatgcatatcattaaacaaataaaatactttttatcacaacacagtacatatttgtcattttta

SEQ ID NO: 419105 - DNA, 457 bp, Homo sapiens
caggtagttgcgtttcttctcaggtagttgcgtttcttctcaggtagttgcgtttcttctcaggtagttgcgtttctcctctaagtaaggaagatgctggagaatatgagtgccatgcatccaattcccaaggacaggcttcagcatcagcaaaaattacagtggttgatgccttacatgaaataccagtgaaaaaaggtgaaggtgccgagctataaacctccagaatattattagtctgcatggttaaaagtagtcatggataactacattacctgttcttgcctaataagtttcttttaatccaatccactaacactttagttatattcactggttttacacagagaaatacaaaataaagatcacacatcaagactatctacaaaaatttattatatatttacagaagaaaagcatgcatatcattaaacaaataaaatactttttatcacaa

SEQ ID NO: 419106 - DNA, 1047 bp, Homo sapiens
  misc_feature (7)..(7): n is a, c, g, or t
  misc_feature (1004)..(1004): n is a, c, g, or t
  misc_feature (1015)..(1015): n is a, c, g, or t
  misc_feature (1042)..(1042): n is a, c, g, or t
  misc_feature (1045)..(1045): n is a, c, g, or t
agcggantcgcgcccttgccgctgccaccgcaccccgccatggagcggccgtcgctgcgcgccctgctcctcggcgccgctgggctgctgctcctgctcctgcccctctcctcttcctcctcttcggacacctgcggcccctgcgagccggcctcctgcccgcccctgcccccgctgggctgcctgctgggcgagacccgcgacgcgtgcggctgctgccctatgtgcgcccgcggcgagggcgagccgtgcgggggtggcggcgccggcagggggtactgcgcgccgggcatggagtgcgtgaagagccgcaagaggcggaagggtaaagccggggcagcagccggcggtccgggtgtaagcggcgtgtgcgtgtgcaagagccgctacccggtgtgcggcagcgacggcaccacctacccgagcggctgccagctgcgcgccgccagccagagggccgagagccgcggggagaaggccatcacccaggtcagcaagggcacctgcgagcaaggtccttccatagtgacgccccccaaggacatctggaatgtcactggtgcccaggtgtacttgagctgtgaggtcatcggaatcccgacacctgtcctcatctggaacaaggtaaaaaggggtcactatggagttcaaaggacagaactcctgcctggtgaccgggacaacctggccattcagacccggggtggcccagaaaagcatgaagtaactggctgggtgctggtatctcctctaagtaaggaagatgctggagaatatgagtgccatgcatccaattcccaaggacaggcttcagcatcagcaaaaattacagtggttgatgccttacatgaaataccagtgaaaaaaggtgaaggtgccgagctataaacctccagaatattattagtctgcatggttaaaagtagtcatggataactacattacctgttcttgcctaataagtttcttttaatccaatccactaactactggacccatcgcgnactactggggnaccgagcgggttttgcaaagggtttcnaantg

SEQ ID NO: 419107 - DNA, 912 bp, Homo sapiens
  misc_feature (912)..(912): n is a, c, g, or t
ctactactactactaaattgcggccgcgtcgacggagaatatgagtgccatgcatccaattcccaaggacaggcttcagcatcagcaaaaattacagtggttgatgccttacatgaaataccagtgaaaaaaggtgaaggtgccgagctataaacctccagaatattattagtctgcatggttaaaagtagtcatggataactacattacctgttcttgcctaataagtttcttttaatccaatccactaacactttagttatattcactggttttacacagagaaatacaaaataaagatcacacatcaagactatctacaaaaatttattatatatttacagaagaaaagcatgcatatcattaaacaaataaaatactttttatcacaaaaaaaaaaaaaaaaaaaaaaaaaacaaaaaaaaaaaaaaaaaaacaaaaaaagaaaacaaaaacagaaaaaaatatcaaaattcaaacaaagaaagcgacgaaagtcgagaagagaagcatgaagaagatcagagagacaagagagagagagacgatgccacaaggacgattacgtcacaggcaggaggcgaatgagtaggaaggactgcagagaaaacagaagaaaaagaggggtgctcgtactcctagagacagagctctgtagaagagaaccaatctaaaacgccgctgaacaaagaggatacaagaaaggcacgacgaatcaagcgagaagagcaagcagcaaggaaagcgacacgagcaagcagccatgcgcaggacgagagaatagagagagagatgcagcagaacagcttaagcctaacagtcggaagagatgactgcgctagagcctaagagcaagagtagcacctcaagaggaaggaggagcgagagagagcagctagagagagaagagtn

SEQ ID NO: 419108 - DNA, 934 bp, Homo sapiens
  misc_feature (7)..(7): n is a, c, g, or t
agcggantcgcgcccttgccgctgccaccgcaccccgccatggagcggccgtcgctgcgcgccctgctcctcggcgccgctgggctgctgctcctgctcctgcccctctcctcttcctcctcttcggacacctgcggcccctgcgagccggcctcctgcccgcccctgcccccgctgggctgcctgctgggcgagacccgcgacgcgtgcggctgctgccctatgtgcgcccgcggcgagggcgagccgtgcgggggtggcggcgccggcagggggtactgcgcgccgggcatggagtgcgtgaagagccgcaagaggcggaagggtaaagccggggcagcagccggcggtccgggtgtaagcggcgtgtgcgtgtgcaagagccgctacccggtgtgcggcagcgacggcaccacctacccgagcggctgccagctgcgcgccgccagccagagggccgagagccgcggggagaaggccatcacccaggtcagcaagggcacctgcgagcaaggtccttccatagtgacgccccccaaggacatctggaatgtcactggtgcccaggtgtacttgagctgtgaggtcatcggaatcccgacacctgtcctcatctggaacaaggtatctcctctaagtaaggaagatgctggagaatatgagtgccatgcatccaattcccaaggacaggcttcagcatcagcaaaaattacagtggttgatgccttacatgaaataccagtgaaaaaaggtgaaggtgccgagctataaacctccagaatattattagtctgcatggttaaaagtagtcatggataactacattacctgttcttgcctaataagtttcttttaatccaatccactaacactttagttatattcactggttttacacagagaaatacaaaataaagatcacacatcaagacta

SEQ ID NO: 419109 - DNA, 979 bp, Homo sapiens
  misc_feature (7)..(7): n is a, c, g, or t
agcggantcgcgcccttgccgctgccaccgcaccccgccatggagcggccgtcgctgcgcgccctgctcctcggcgccgctgggctgctgctcctgctcctgcccctctcctcttcctcctcttcggacacctgcggcccctgcgagccggcctcctgcccgcccctgcccccgctgggctgcctgctgggcgagccggcggtccgggtgtaagcggcgtgtgcgtgtgcaagagccgctacccggtgtgcggcagcgacggcaccacctacccgagcggctgccagctgcgcgccgccagccagagggccgagagccgcggggagaaggccatcacccaggtcagcaagggcacctgcgagcaaggtccttccatagtgacgccccccaaggacatctggaatgtcactggtgcccaggtgtacttgagctgtgaggtcatcggaatcccgacacctgtcctcatctggaacaaggtaaaaaggggtcactatggagttcaaaggacagaactcctgcctggtgaccgggacaacctggccattcagacccggggtggcccagaaaagcatgaagtaactggctgggtgctggtatctcctctaagtaaggaagatgctggagaatatgagtgccatgcatccaattcccaaggacaggcttcagcatcagcaaaaattacagtggttgatgccttacatgaaataccagtgaaaaaaggtgaaggtgccgagctataaacctccagaatattattagtctgcatggttaaaagtagtcatggataactacattacctgttcttgcctaataagtttcttttaatccaatccactaacactttagttatattcactggttttacacagagaaatacaaaataaagatcacacatcaagactatctacaaaaatttattatatatttacagaagaaaagcatgcatatcattaaacaaataaaatactttttatcacaa

SEQ ID NO: 419110 - DNA, 839 bp, Homo sapiens
  misc_feature (7)..(7): n is a, c, g, or t
agcggantcgcgcccttgccgctgccaccgcaccccgccatggagcggccgtcgctgcgcgccctgctcctcggcgccgctgggctgctgctcctgctcctgcccctctcctcttcctcctcttcggacacctgcggcccctgcgagccgcgcgccgccagccagagggccgagagccgcggggagaaggccatcacccaggtcagcaagggcacctgcgagcaaggtccttccatagtgacgccccccaaggacatctggaatgtcactggtgcccaggtgtacttgagctgtgaggtcatcggaatcccgacacctgtcctcatctggaacaaggtaaaaaggggtcactatggagttcaaaggacagaactcctgcctggtgaccgggacaacctggccattcagacccggggtggcccagaaaagcatgaagtaactggctgggtgctggtatctcctctaagtaaggaagatgctggagaatatgagtgccatgcatccaattcccaaggacaggcttcagcatcagcaaaaattacagtggttgatgccttacatgaaataccagtgaaaaaaggtgaaggtgccgagctataaacctccagaatattattagtctgcatggttaaaagtagtcatggataactacattacctgttcttgcctaataagtttcttttaatccaatccactaacactttagttatattcactggttttacacagagaaatacaaaataaagatcacacatcaagactatctacaaaaatttattatatatttacagaagaaaagcatgcatatcattaaacaaataaaatactttttatcacaa

SEQ ID NO: 419111 - DNA, 1481 bp, Homo sapiens
  misc_feature (7)..(7): n is a, c, g, or t
agcggantcgcgcccttgccgctgccaccgcaccccgccatggagcggccgtcgctgcgcgccctgctcctcggcgccgctgggctgctgctcctgctcctgcccctctcctcttcctcctcttcggacacctgcggcccctgcgagccggcctcctgcccgcccctgcccccgctgggctgcctgctgggcgagacccgcgacgcgtgcggctgctgccctatgtgcgcccgcggcgagggcgagccgtgcgggggtggcggcgccggcagggggtactgcgcgccgggcatggagtgcgtgaagagccgcaagaggcggaagggtaaagccggggcagcagccggcggtccgggtgtaagcggcgtgtgcgtgtgcaagagccgctacccggtgtgcggcagcgacggcaccacctacccgagcggctgccagctgcgcgccgccagccagagggccgagagccgcggggagaaggccatcacccaggtcagcaagggcacctgcgagcaaggtccttccatagtgacgccccccaaggacatctggaatgtcactggtgcccaggtgtacttgagctgtgaggtcatcggaatcccgacacctgtcctcatctggaacaaggtaaaaaggggtcactatggagttcaaaggacagaactcctgcctggtgaccgggacaacctggccattcagacccggggtggcccagaaaagcatgaagtaactggctgggtgctggtatctcctctaagtaaggaagatgctggagaatatgagtgccatgcatccaattcccaaggacaggcttcagcatcagcaaaaattacagtggttgatgccttacatgaaataccagtgaaaaaaggtgaaggtgccgagctataaacctccagaatattattagtctgcatggttaaaagtagtcatggataactacattacctgttcttgcctaataagtttcttttaatccaatccactaacactttagttatattcactggttttacacagagaaatacaaaataaagatcacacatcaagactatctacaaaaatttattatatatttacagaagaaaagcatgcatatcattaaacaaataaaatactttttatcacaaaaaaaaaaaaaaaaaaaaaaaaaaaaaaaaaaaaaaaaaaaaaaaaaaaaaaaaaaaaaaaaagctcccgctctttaaccttatttggcaaatctgccctatggaactccggttttatattacttgactccctttataacacgttgaacctggtaataccttagctgtccccaacttagtgccttttaagcctaatcccttttccccatttgtaactttttgaaaggcccattctggctctcctttctaagagtgctcttacttaaagtcccttcgtccttcccagcgcttttttctgctatattcctcgatcattcgctctcaaacccttttttctatccttttcgctccatc

SEQ ID NO: 419112 - DNA, 1647 bp, Homo sapiens
  misc_feature (7)..(7): n is a, c, g, or t
  misc_feature (1647)..(1647): n is a, c, g, or t
agcggantcgcgcccttgccgctgccaccgcaccccgccatggagcggccgtcgctgcgcgccctgctcctcggcgccgctgggctgctgctcctgctcctgcccctctcctcttcctcctcttcggacacctgcggcccctgcgagccggcctcctgcccgcccctgcccccgctgggctgcctgctgggcgagacccgcgacgcgtgcggctgctgccctatgtgcgcccgcggcgagggcgagccgtgcgggggtggcggcgccggcagggggtactgcgcgccgggcatggagtgcgtgaagagccgcaagaggcggaagggtaaagccggggcagcagccggcggtccgggtgtaagcggcgtgtgcgtgtgcaagagccgctacccggtgtgcggcagcgacggcaccacctacccgagcggctgccagctgcgcgccgccagccagagggccgagagccgcggggagaaggccatcacccaggtcagcaagggcacctgcgagcaaggtccttccatagtgacgccccccaaggacatctggaatgtcactggtgcccaggtgtacttgagctgtgaggtcatcggaatcccgacacctgtcctcatctggaacaaggtaaaaaggggtcactatggagttcaaaggacagaactcctgcctggtgaccgggacaacctggccattcagacccggggtggcccagaaaagcatgaagtaactggctgggtgctggtatctcctctaagtaaggaagatgctggagaatatgagtgccatgcatccaattcccaaggacaggcttcagcatcagcaaaaattacagtggttgatgccttacatgaaataccagtgaaaaaaggtgaaggtgccgagctataaacctccagaatattattagtctgcatggttaaaagtagtcatggataactacattacctgttcttgcctaataagtttcttttaatccaatccactaacactttagttatattcactggttttacacagagaaatacaaaataaagatcacacatcaagactatctacaaaaatttattatatatttacagaagaaaagcatgcatatcattaaacaaataaaatactttttatcacaaaaaaaaaaaaaaaaaaaaaaaaaacaaaaaaaaaaaaaaaaaaacaaaaaaagaaaacaaaaacagaaaaaaatatcaaaattcaaacaaagaaagcgacgaaagtcgagaagagaagcatgaagaagatcagagagacaagagagagagagacgatgccacaaggacgattacgtcacaggcaggaggcgaatgagtaggaaggactgcagagaaaacagaagaaaaagaggggtgctcgtactcctagagacagagctctgtagaagagaaccaatctaaaacgccgctgaacaaagaggatacaagaaaggcacgacgaatcaagcgagaagagcaagcagcaaggaaagcgacacgagcaagcagccatgcgcaggacgagagaatagagagagagatgcagcagaacagcttaagcctaacagtcggaagagatgactgcgctagagcctaagagcaagagtagcacctcaagaggaaggaggagcgagagagagcagctagagagagaagagtn

SEQ ID NO: 419113 - DNA, 1108 bp, Homo sapiens
  misc_feature (7)..(7): n is a, c, g, or t
agcggantcgcgcccttgccgctgccaccgcaccccgccatggagcggccgtcgctgcgcgccctgctcctcggcgccgctgggctgctgctcctgctcctgcccctctcctcttcctcctcttcggacacctgcggcccctgcgagccggcctcctgcccgcccctgcccccgctgggctgcctgctgggcgagacccgcgacgcgtgcggctgctgccctatgtgcgcccgcggcgagggcgagccgtgcgggggtggcggcgccggcagggggtactgcgcgccgggcatggagtgcgtgaagagccgcaagaggcggaagggtaaagccggggcagcagccggcggtccgggtgtaagcggcgtgtgcgtgtgcaagagccgctacccggtgtgcggcagcgacggcaccacctacccgagcggctgccagctgcgcgccgccagccagagggccgagagccgcggggagaaggccatcacccaggtcagcaagggcacctgcgagcaaggtccttccatagtgacgccccccaaggacatctggaatgtcactggtgcccaggtgtacttgagctgtgaggtcatcggaatcccgacacctgtcctcatctggaacaaggtaaaaaggggtcactatggagttcaaaggacagaactcctgcctggtgaccgggacaacctggccattcagacccggggtggcccagaaaagcatgaagtaactggctgggtgctggtatctcctctaagtaaggaagatgctggagaatatgagtgccatgcatccaattcccaaggacaggcttcagcatcagcaaaaattacagtggttgatgccttacatgaaataccagtgaaaaaaggtgaaggtgccgagctataaacctccagaatattattagtctgcatggttaaaagtagtcatggataactacattacctgttcttgcctaataagtttcttttaatccaatccactaacactttagttatattcactggttttacacagagaaatacaaaataaagatcacacatcaagactatctacaaaaatttattatatatttacagaagaacgcatctacctggggtcggcatca

SEQ ID NO: 419114 - DNA, 1056 bp, Homo sapiens
  misc_feature (7)..(7): n is a, c, g, or t
agcggantcgcgcccttgccgctgccaccgcaccccgccatggagcggccgtcgctgcgcgccctgctcctcggcgccgctgggctgctgctcctgctcctgcccctctcctcttcctcctcttcggacacctgcggcccctgcgagccggcctcctgcccgcccctgcccccgctgggctgcctgctgggcgagacccgcgacgcgtgcggctgctgccctatgtgcgcccgcggcgagggcgagccgtgcgggggtggcggcgccggcagggggtactgcgcgccgggcatggagtgcgtgaagagccgcaagaggcggaagggtaaagccggggcagcagccggcggtccgggtgtaagcggcgtgtgcgtgtgcaagagccgctacccggtgtgcggcagcgacggcaccacctacccgagcggctgccagctgcgcgccgccagccagagggccgagagccgcggggagaaggccatcacccaggtcagcaagggcacctgcgagcaaggtccttccatagtgacgccccccaaggacatctggaatgtcactggtgcccaggtgtacttgagctgtgaggtcatcggaatcccgacacctgtcctcatctggaacaaggtaaaaaggggtcactatggagttcaaaggacagaactcctgcctggtgaccgggacaacctggccattcagacccggggtggcccagaaaagcatgaagtaactggctgggtgctggtatctcctctaagtaaggaagatgctggagaatatgagtgccatgcatccaattcccaaggacaggcttcagcatcagcaaaaattacagtggttgatgccttacatgaaataccagtgaaaaaaggtgaaggtgccgagctataaacctccagaatattattagtctgcatggactttagttatattcactggttttacacagagaaatacaaaataaagatcacacatcaagactatctacaaaaatttattatatatttacagaagaaaagcatgcatatcattaaacaaataaaatactttttatcacaa

SEQ ID NO: 419115 - DNA, 678 bp, Homo sapiens
  misc_feature (14)..(14): n is a, c, g, or t
  misc_feature (61)..(61): n is a, c, g, or t
  misc_feature (65)..(65): n is a, c, g, or t
ggggagctattttncacattgttagttagcgcactttgcaatatcaccaggatcatttttntaangaaaaagtatttgctgaggtgaaaaaatctgatgtttgaggaagtttttatttttatttatttgttttgttttttttttttttgaggcagactctctgtcgccaggcttctcctgcctcagcctcacgagtagctgggactacaggcatgcaccaccacgcccagctaatttttgtatttttagcagagacagggaggaagtttttatttttataaacaaaatctgatgttcagaggccccgtttcttacaataaatgttgagtcttagttaagcaggaatttatgaacacccatttcctgactttttgctttaatttagatttttctccatcctgtttctagcacaaaaatttgcctgctgtgttacaaaaataaatttatgttgtcctgtgccataaagtgatatatttaatatttttattctttggttttgaacattgtaagttcctaaaaacattttattaaacaagtagacattttgttattaaaaaaatgtgatctgtaatttctttgtgcagaatgatttgaagtattgtattcagtttacatgcattattggtttataattaatatctaatgaaaatacatgttgttatattgtaaaaaaaaaaa

SEQ ID NO: 419116 - DNA, 1376 bp, Homo sapiens
  misc_feature (449)..(449): n is a, c, g, or t
  misc_feature (463)..(463): n is a, c, g, or t
  misc_feature (466)..(466): n is a, c, g, or t
tccccagattgcagagggagacgtggacgtgagtggagcggggcggtccccagcacactagaggaagtcgtgctacccccgcggagttgtcgtgtgttctggattcattccggcaccaccatgtcgaaggtttcctttaagatcacgctgacgtcggacccacggctgccgtacaaagtactcagtgttcctgaaagtacacctttcacagcagtcttaaagtttgcagcagaagaatttaaagttcctgctgcaacaagtgcaattattaccaatgatggaataggaataaatcctgcacagactgctggaaatgtttttctaaaacatggttcagaactgcggattattcctagagatcgtgttggaagttgttaatatctgctacttggaacatacgattgcctttcagaataaatattggtattttttgttgttgtaaaaaaaanaaaaaaaaaaaaanaanaaaaaaaaaaaaaaaaaaaaaaaaaaaaaaaaaaaaaaaaaaaaaaaaaaaaaaaaaaaaaaacaaaagaagagaagaaacaaaaagagcagagataaaaaatatagaaaaagatcagggacaacaaaagaggacagaaaataaaacaacaaaaaaggagagagaaaaaaaaaacaacacgcgaaaaccacacagaggaaacacacagagagggaacaaaaaaggagacaaaacggagagaaaagacaagccaaaacaacaccggaaagagagacacagaaacaaagagacggacacacaaccctcaacacacaaaaaaaaagaatacaaacaaaaagcacctacaaggcggaacgcaacagacacacaaaaacaaaacaaaacgcgacgtaacacacacgagggacaaaaaaaacgacagagggaaacaaagaaaagaagacgaagaaaaggagaagaacaagaacagtagagaacaaagagaagagaacagcataaagaaacaaagggagacaggaagaagaaaaagcaatgcaagaagagaccgcagggggaggactcactacaacgggaagaagagaaaaaaagaagagcaaagaccaaccagaagagcagcaaagagaagcgaagggagaaagaagcacgcacagagaagcagaagacggacagcgcagaacacaagggaggacgcgaagagagagagagaagagaggaaagaagagagaaagagaagaaagagaaaggaagcagcagagcgagaagtaacagtaacaagacagtgagcaaggacagccgggagcaacgtagaagacgagatgagactagaaacgagagagaggagagagcgtagaagaaaaggaagaggacgaaaagaaaagaagagaaggccagaaagccaaacgaagaaagt

SEQ ID NO: 419117 - DNA, 565 bp, Homo sapiens
tccccagattgcagagggagacgtggacgtgagtggagcggggcggtccccagcacactagaggaagtcgtgctacccccgcggagttgtcgtgtgttctggattcattccggcaccaccatgtcgaaggtttcctttaagatcacgctgacgtcggacccacggctgccgtacaaagtactcagtgttcctgaaagtacacctttcacagcagtcttaaagtttgcagcagaagaatttaaagttcctgctgcaacaagtgcaattattaccaatgatggaataggaataaatcctgcacagactgctggaaatgtttttctaaaacatggttcagaactgcggattattcctagagatcgtgttggaagttgttaatatctgctacttggaacatacgattgcctttcagaacacgtcgaagcttcgacggtgttctgtaagtttgccctttgcagacaggctcttcaagtaagaaaacaagattgaatattttaataggatgtaggagaccgccaccgatgaggagattcaatcagacatggatgtagggtgtacgaccgcc

SEQ ID NO: 419118 - DNA, 374 bp, Homo sapiens
  misc_feature (9)..(9): n is a, c, g, or t
gcctttagnacctatttatccttttttttaagtgatgttttttaaacaccagcatcaataggacagaagaagacatctgttttccaattagctgtgtcagtagattccattcattgtttgtagttcccaatcagctttaaaaaaaaaagtttttcaaatttgcatacaagtcatctaaaatattctttggttttgaacattgtaagttcctaaaaacattttattaaacaagtagacattttgttattaaaaaaatgtgatctgtaatttctttgtgcagaatgatttgaagtattgtattcagtttacatgcattattggtttataattaatatctaatgaaaatacatgttgttatattgtaaaaaaaaaaa

SEQ ID NO: 419119 - DNA, 1482 bp, Homo sapiens
tccccagattgcagagggagacgtggacgtgagtggagcggggcggtccccagcacactagaggaagtcgtgctacccccgcggagttgtcgtgtgttctggattcattccggcaccaccatgtcgaaggtttcctttaagatcacgctgacgtcggacccacggctgccgtacaaagtgtgagtagctcggccgagatgggccttttggggccggacaagacggggctgggttggggatgatccgagcttttccaacaactaccccacgcagtcttcatctcttcacttcatctactttcctggctcgcgcccttccaggagcctttcccaccggagcctgcgaggagagactcagtgttcctgaaagtacacctttcacagcagtcttaaagtttgcagcagaagaagtaagtacagaagttggaacaacctttatggaatgcggtttgccaatatgcttcaaatgtctttaagagttgcatgcactttgacccatcatttccatgtggcttcattactaggtttatgttatcaaaaagtaggatgatagttaagacttactttcagatataagaagcatgagttaaacaaattgacatatctgattaatgcaaccattgaaaattataagaatttaatgaatttttatgagaatttttatgaaaactaaaaaggtgctgatttttaaatgttttttaaaatgcaacattatatcacattatattctatatactcatattttactagtcttgattccaaaattgcaatttcatagaatctttatcatagttttcaaattttctatatgagcatgtggactgtcagtaaaatttgttgttttgaaaagtttctagttttttaaaacatgtttgaattttctgtttcataagaaacaatttttttcatccaaaattattagaaatatctataatgcaactttttggacatgacacttgaaaaagtagcttgatctgttagaaatggcacccaaatgtgacttcggagacttagggttcctgttgtaggtgcgtcattagttagctatgtgacatgatgcaaatccctcttttttattctgcaaaatggaagtagttaatacctgtccttcctctctgatcaagtgatttcgagtaaaaacattatttcctgaaattttctgttgaagttaaaagtgctaaacaggtacgttgtaacccaaatcaaaacgttttggttcagaatcttttgaaaagtttatagtcacagaaaaataattttcttaactacattaataaaaaatagcttaacacacaatcctgccctgtacttcactgatttatggcaagtcagccaatccatcagtgctcaaagctccttgtattgtcaggaatcactaacattatttgtcactcattcagaattaaactgccaactagtagcatttgttttgtgtctgatagattcttcatgcagaaagaataagtaaaatgagatgggacac

SEQ ID NO: 419120 - DNA, 2558 bp, Homo sapiens
tccccagattgcagagggagacgtggacgtgagtggagcggggcggtccccagcacactagaggaagtcgtgctacccccgcggagttgtcgtgtgttctggattcattccggcaccaccatgtcgaaggtttcctttaagatcacgctgacgtcggacccacggctgccgtacaaagtactcagtgttcctgaaagtacacctttcacagcagtcttaaagtttgcagcagaagaatttaaagttcctgctgcaacaagtgcaattattaccaatgatggaataggaataaatcctgcacagactgctggaaatgtttttctaaaacatggttcagaactgcggattattcctagagatcgtgttggaagttgttaatatctgctacttggaacatacgattgcctttcagaataaatattggtattttttgttgttgtaaaattgaaatcaggcatttaacatactatgaaaacaccaggagtcaatgattaatgaaaggtgactcatctgtccctttttgttgtccatactcttcctatgaagagggaatgcgtatgaattaaggctactactgtcacagaagatcatagtctttgatgctacctcacaacacaaacaggtagttcgttgggggcaaatgaattagccaactgttaactggaagcttttgataatttttttttttagaacaatttggaacattaaaatttactgaatcgtatatattcatctgagataaaaatataaaaagaattatggaccctggatggcaatttgcttgatagcatctgatttgcagactcataatttgatttttaattaaatatataggttatgatgaagtgaatagacatatcagtgaacagttaactatattaaatttttatcatttactttttttaagattcagacctcagttatataaatttcagtttaatatcaaccaaaaaattaaaattttaatctaacccttatgtgtataaattggtgtcccataccagcttttaatggtggacctatagaatccagtacttttaatggtgggaatttacagtagaagcatcctttgctgagttatacattcctttatcaatctcttttgatacaacatttaaaacaagtagcttcaagaaaccactggtgttttgaggatagtatttctaaatagcattcaggaacagagtattattgcacagatctgaagatcaaaaaaaagctcaaggaaatacagatcggaagtgctgatgagttatatttattgaaaacccaacttttaaggaagtgctaagatcagtcacccatgtgaataagaagccaggaaaggaaagatggggaagcccagatcaccaggcttctattaaggaggaaagcaacagaggaaacagtgaaggggaacagaagggggtagcaaagtgttacagaaaagcggactggatagacaaaactgcagaaggtgtatgttggggagaactgaaagggaaaacaaaatacttgacatagtcttaagtagaagaaggcagttagagaaaacaaagtatctactggccttgtcaacatacagacttctgcccttccggaagaaatcagtatctatgcaaatcttgaaagacgaaatcaaagcccattaatgattcagaatcagtgcttgacctcctgtattctgaatggtgaactctggaagcagggattgtgtctggctctttttagagctggaagtgtagtggctttcattaaatacttgctgtaaagtctttctaagaccaattattatcttagcatgtttcagtatcttctctatcataggccctaagttcattgggggaaaaaaaataagaagattcaacagaatcagcatttgaagtgtaccattggtagttgtttatgaaattaccagatattcataaatgtgacaaatgaacagcaggattatgaattatcaaaggaaaaagtatttgctgaggtgaaaaaatctgatgtttgaggaagtttttatttttatttatttgttttgttttttttttttttgaggcagactctctgtcgccaggcttctcctgcctcagcctcacgagtagctgggactacaggcatgcaccaccacgcccagctaatttttgtatttttagcagagacagggaggaagtttttatttttataaacaaaatctgatgttcagaggccccgtttcttacaataaatgttgagtcttagttaagcaggaatttatgaacacccatttcctgactttttgctttaatttagatttttctccatcctgtttctagcacaaaaatttgcctgctgtgttacaaaaataaatttatgttgtcctgtgccataaagtgatatatttaatatttttattctttggttttgaacattgtaagttcctaaaaacattttattaaacaagtagacattttgttattaaaaaaatgtgatctgtaatttctttgtgcagaatgatttgaagtattgtattcagtttacatgcattattggtttataattaatatctaatgaaaatacatgttgttatattgtaaaaaaaaaaa

SEQ ID NO: 419121 - DNA, 3425 bp, Homo sapiens
  misc_feature (2498)..(2498): n is a, c, g, or t
  misc_feature (2512)..(2512): n is a, c, g, or t
  misc_feature (2515)..(2515): n is a, c, g, or t
tccccagattgcagagggagacgtggacgtgagtggagcggggcggtccccagcacactagaggaagtcgtgctacccccgcggagttgtcgtgtgttctggattcattccggcaccaccatgtcgaaggtttcctttaagatcacgctgacgtcggacccacggctgccgtacaaagtactcagtgttcctgaaagtacacctttcacagcagtcttaaagtttgcagcagaagaatttaaagttcctgctgcaacaagtgcaattattaccaatgatggaataggaataaatcctgcacagactgctggaaatgtttttctaaaacatggttcagaactgcggattattcctagagatcgtgttggaagttgttaatatctgctacttggaacatacgattgcctttcagaataaatattggtattttttgttgttgtaaaattgaaatcaggcatttaacatactatgaaaacaccaggagtcaatgattaatgaaaggtgactcatctgtccctttttgttgtccatactcttcctatgaagagggaatgcgtatgaattaaggctactactgtcacagaagatcatagtctttgatgctacctcacaacacaaacaggtagttcgttgggggcaaatgaattagccaactgttaactggaagcttttgataatttttttttttagaacaatttggaacattaaaatttactgaatcgtatatattcatctgagataaaaatataaaaagaattatggaccctggatggcaatttgcttgatagcatctgatttgcagactcataatttgatttttaattaaatatataggttatgatgaagtgaatagacatatcagtgaacagttaactatattaaatttttatcatttactttttttaagattcagacctcagttatataaatttcagtttaatatcaaccaaaaaattaaaattttaatctaacccttatgtgtataaattggtgtcccataccagcttttaatggtggacctatagaatccagtacttttaatggtgggaatttacagtagaagcatcctttgctgagttatacattcctttatcaatctcttttgatacaacatttaaaacaagtagcttcaagaaaccactggtgttttgaggatagtatttctaaatagcattcaggaacagagtattattgcacagatctgaagatcaaaaaaaagctcaaggaaatacagatcggaagtgctgatgagttatatttattgaaaacccaacttttaaggaagtgctaagatcagtcacccatgtgaataagaagccaggaaaggaaagatggggaagcccagatcaccaggcttctattaaggaggaaagcaacagaggaaacagtgaaggggaacagaagggggtagcaaagtgttacagaaaagcggactggatagacaaaactgcagaaggtgtatgttggggagaactgaaagggaaaacaaaatacttgacatagtcttaagtagaagaaggcagttagagaaaacaaagtatctactggccttgtcaacatacagacttcaaaataccccttatgagaatccaaagaatgatgtgtgtaagggaagattttatttgcccttccggaagaaatcagtatctatgcaaatcttgaaagacgaaatcaaagcccattaatgattcagaatcagtgcttgacctcctgtattctgaatggtgaactctggaagcagggattgtgtctggctctttttagagctggaagtgtagtggctttcattaaatacttgctgtaaagtctttctaagaccaattattatcttagcatgtttcagtatcttctctatcataggccctaagttcattgggggaaaaaaaataagaagattcaacagaatcagcatttgaagtgtaccattggtagttgtttatgaaattaccagatattcataaatgtgacaaatgaacagcaggattatgaattatcaaaggaaaaagtatttgctgaggtgaaaaaatctgatgtttgaggaagtttttatttttatttatttgttttgttttttttttttttgaggcagactctctgtcgccaggcttctcctgcctcagcctcacgagtagctgggactacaggcatgcaccaccacgcccagctaatttttgtatttttagcagagacagggaggaagtttttatttttataaacaaaatctgatgttcagaggccccgtttcttacaataaatgttgagtcttagttaagcaggaatttatgaacacccatttcctgactttttgctttaatttagatttttctccatcctgtttctagcacaaaaatttgcctgctgtgttacaaaaataaatttatgttgtcctgtgccataaagtgatatatttaatatttttattctttggttttgaacattgtaagttcctaaaaacattttattaaacaagtagacattttgttattaaaaaaaaaaanaaaaaaaaaaaaanaanaaaaaaaaaaaaaaaaaaaaaaaaaaaaaaaaaaaaaaaaaaaaaaaaaaaaaaaaaaaaaaacaaaagaagagaagaaacaaaaagagcagagataaaaaatatagaaaaagatcagggacaacaaaagaggacagaaaataaaacaacaaaaaaggagagagaaaaaaaaaacaacacgcgaaaaccacacagaggaaacacacagagagggaacaaaaaaggagacaaaacggagagaaaagacaagccaaaacaacaccggaaagagagacacagaaacaaagagacggacacacaaccctcaacacacaaaaaaaaagaatacaaacaaaaagcacctacaaggcggaacgcaacagacacacaaaaacaaaacaaaacgcgacgtaacacacacgagggacaaaaaaaacgacagagggaaacaaagaaaagaagacgaagaaaaggagaagaacaagaacagtagagaacaaagagaagagaacagcataaagaaacaaagggagacaggaagaagaaaaagcaatgcaagaagagaccgcagggggaggactcactacaacgggaagaagagaaaaaaagaagagcaaagaccaaccagaagagcagcaaagagaagcgaagggagaaagaagcacgcacagagaagcagaagacggacagcgcagaacacaagggaggacgcgaagagagagagagaagagaggaaagaagagagaaagagaagaaagagaaaggaagcagcagagcgagaagtaacagtaacaagacagtgagcaaggacagccgggagcaacgtagaagacgagatgagactagaaacgagagagaggagagagcgtagaagaaaaggaagaggacgaaaagaaaagaagagaaggccagaaagccaaacgaagaaagt

SEQ ID NO: 419122 - DNA, 2784 bp, Homo sapiens
tccccagattgcagagggagacgtggacgtgagtggagcggggcggtccccagcacactagaggaagtcgtgctacccccgcggagttgtcgtgtgttctggattcattccggcaccaccatgtcgaaggtttcctttaagatcacgctgacgtcggacccacggctgccgtacaaagtgtgagtagctcggccgagatgggccttttggggccggacaagacggggctgggttggggatgatccgagcttttccaacaactaccccacgcagtcttcatctcttcacttcatctactttcctggctcgcgcccttccaggagcctttcccaccggagcctgcgaggagagactcagtgttcctgaaagtacacctttcacagcagtcttaaagtttgcagcagaagaatttaaagttcctgctgcaacaagtgcaattattaccaatgatggaataggaataaatcctgcacagactgctggaaatgtttttctaaaacatggttcagaactgcggattattcctagagatcgtgttggaagttgttaatatctgctacttggaacatacgattgcctttcagaataaatattggtattttttgttgttgtaaaattgaaatcaggcatttaacatactatgaaaacaccaggagtcaatgattaatgaaaggtgactcatctgtccctttttgttgtccatactcttcctatgaagagggaatgcgtatgaattaaggctactactgtcacagaagatcatagtctttgatgctacctcacaacacaaacaggtagttcgttgggggcaaatgaattagccaactgttaactggaagcttttgataatttttttttttagaacaatttggaacattaaaatttactgaatcgtatatattcatctgagataaaaatataaaaagaattatggaccctggatggcaatttgcttgatagcatctgatttgcagactcataatttgatttttaattaaatatataggttatgatgaagtgaatagacatatcagtgaacagttaactatattaaatttttatcatttactttttttaagattcagacctcagttatataaatttcagtttaatatcaaccaaaaaattaaaattttaatctaacccttatgtgtataaattggtgtcccataccagcttttaatggtggacctatagaatccagtacttttaatggtgggaatttacagtagaagcatcctttgctgagttatacattcctttatcaatctcttttgatacaacatttaaaacaagtagcttcaagaaaccactggtgttttgaggatagtatttctaaatagcattcaggaacagagtattattgcacagatctgaagatcaaaaaaaagctcaaggaaatacagatcggaagtgctgatgagttatatttattgaaaacccaacttttaaggaagtgctaagatcagtcacccatgtgaataagaagccaggaaaggaaagatggggaagcccagatcaccaggcttctattaaggaggaaagcaacagaggaaacagtgaaggggaacagaagggggtagcaaagtgttacagaaaagcggactggatagacaaaactgcagaaggtgtatgttggggagaactgaaagggaaaacaaaatacttgacatagtcttaagtagaagaaggcagttagagaaaacaaagtatctactggccttgtcaacatacagacttcaaaataccccttatgagaatccaaagaatgatgtgtgtaagggaagattttatttgcccttccggaagaaatcagtatctatgcaaatcttgaaagacgaaatcaaagcccattaatgattcagaatcagtgcttgacctcctgtattctgaatggtgaactctggaagcagggattgtgtctggctctttttagagctggaagtgtagtggctttcattaaatacttgctgtaaagtctttctaagaccaattattatcttagcatgtttcagtatcttctctatcataggccctaagttcattgggggaaaaaaaataagaagattcaacagaatcagcatttgaagtgtaccattggtagttgtttatgaaattaccagatattcataaatgtgacaaatgaacagcaggattatgaattatcaaaggaaaaagtatttgctgaggtgaaaaaatctgatgtttgaggaagtttttatttttatttatttgttttgttttttttttttttgaggcagactctctgtcgccaggcttctcctgcctcagcctcacgagtagctgggactacaggcatgcaccaccacgcccagctaatttttgtatttttagcagagacagggaggaagtttttatttttataaacaaaatctgatgttcagaggccccgtttcttacaataaatgttgagtcttagttaagcaggaatttatgaacacccatttcctgactttttgctttaatttagatttttctccatcctgtttctagcacaaaaatttgcctgctgtgttacaaaaataaatttatgttgtcctgtgccataaagtgatatatttaatatttttattctttggttttgaacattgtaagttcctaaaaacattttattaaacaagtagacattttgttattaaaaaaatgtgatctgtaatttctttgtgcagaatgatttgaagtattgtattcagtttacatgcattattggtttataattaatatctaatgaaaatacatgttgttatattgtaaaaaaaaaaa

SEQ ID NO: 419123 - DNA, 2648 bp, Homo sapiens
tccccagattgcagagggagacgtggacgtgagtggagcggggcggtccccagcacactagaggaagtcgtgctacccccgcggagttgtcgtgtgttctggattcattccggcaccaccatgtcgaaggtttcctttaagatcacgctgacgtcggacccacggctgccgtacaaagtactcagtgttcctgaaagtacacctttcacagcagtcttaaagtttgcagcagaagaatttaaagttcctgctgcaacaagtgcaattattaccaatgatggaataggaataaatcctgcacagactgctggccttgcagttgaaattcagccataaagaaaatgaagaaatgtttttctaaaacatggttcagaactgcggattattcctagagatcgtgttggaagttgttaatatctgctacttggaacatacgattgcctttcagaataaatattggtattttttgttgttgtaaaattgaaatcaggcatttaacatactatgaaaacaccaggagtcaatgattaatgaaaggtgactcatctgtccctttttgttgtccatactcttcctatgaagagggaatgcgtatgaattaaggctactactgtcacagaagatcatagtctttgatgctacctcacaacacaaacaggtagttcgttgggggcaaatgaattagccaactgttaactggaagcttttgataatttttttttttagaacaatttggaacattaaaatttactgaatcgtatatattcatctgagataaaaatataaaaagaattatggaccctggatggcaatttgcttgatagcatctgatttgcagactcataatttgatttttaattaaatatataggttatgatgaagtgaatagacatatcagtgaacagttaactatattaaatttttatcatttactttttttaagattcagacctcagttatataaatttcagtttaatatcaaccaaaaaattaaaattttaatctaacccttatgtgtataaattggtgtcccataccagcttttaatggtggacctatagaatccagtacttttaatggtgggaatttacagtagaagcatcctttgctgagttatacattcctttatcaatctcttttgatacaacatttaaaacaagtagcttcaagaaaccactggtgttttgaggatagtatttctaaatagcattcaggaacagagtattattgcacagatctgaagatcaaaaaaaagctcaaggaaatacagatcggaagtgctgatgagttatatttattgaaaacccaacttttaaggaagtgctaagatcagtcacccatgtgaataagaagccaggaaaggaaagatggggaagcccagatcaccaggcttctattaaggaggaaagcaacagaggaaacagtgaaggggaacagaagggggtagcaaagtgttacagaaaagcggactggatagacaaaactgcagaaggtgtatgttggggagaactgaaagggaaaacaaaatacttgacatagtcttaagtagaagaaggcagttagagaaaacaaagtatctactggccttgtcaacatacagacttcaaaataccccttatgagaatccaaagaatgatgtgtgtaagggaagattttatttgcccttccggaagaaatcagtatctatgcaaatcttgaaagacgaaatcaaagcccattaatgattcagaatcagtgcttgacctcctgtattctgaatggtgaactctggaagcagggattgtgtctggctctttttagagctggaagtgtagtggctttcattaaatacttgctgtaaagtctttctaagaccaattattatcttagcatgtttcagtatcttctctatcataggccctaagttcattgggggaaaaaaaataagaagattcaacagaatcagcatttgaagtgtaccattggtagttgtttatgaaattaccagatattcataaatgtgacaaatgaacagcaggattatgaattatcaaaggaaaaagtatttgctgaggtgaaaaaatctgatgtttgaggaagtttttatttttatttatttgttttgttttttttttttttgaggcagactctctgtcgccaggcttctcctgcctcagcctcacgagtagctgggactacaggcatgcaccaccacgcccagctaatttttgtatttttagcagagacagggaggaagtttttatttttataaacaaaatctgatgttcagaggccccgtttcttacaataaatgttgagtcttagttaagcaggaatttatgaacacccatttcctgactttttgctttaatttagatttttctccatcctgtttctagcacaaaaatttgcctgctgtgttacaaaaataaatttatgttgtcctgtgccataaagtgatatatttaatatttttattctttggttttgaacattgtaagttcctaaaaacattttattaaacaagtagacattttgttattaaaaaaatgtgatctgtaatttctttgtgcagaatgatttgaagtattgtattcagtttacatgcattattggtttataattaatatctaatgaaaatacatgttgttatattgtaaaaaaaaaaa

SEQ ID NO: 419124 - DNA, 2558 bp, Homo sapiens
tccccagattgcagagggagacgtggacgtgagtggagcggggcggtccccagcacactagaggaagtcgtgctacccccgcggagttgtcgtgtgttctggattcattccggcaccaccatgtcgaaggtttcctttaagatcacgctgacgtcggacccacggctgccgtacaaagtactcagtgttcctgaaagtacacctttcacagcagtcttaaagtttgcagcagaagaatttaaagttcctgctgcaacaagtgcaattattaccaatgatggaataggaataaatcctgcacagactgctggaaatgtttttctaaaacatggttcagaactgcggattattcctagagatcgtgttggaagttgttaatatctgctacttggaacatacgattgcctttcagaataaatattggtattttttgttgttgtaaaattgaaatcaggcatttaacatactatggtccatactcttcctatgaagagggaatgcgtatgaattaaggctactactgtcacagaagatcatagtctttgatgctacctcacaacacaaacaggtagttcgttgggggcaaatgaattagccaactgttaactggaagcttttgataatttttttttttagaacaatttggaacattaaaatttactgaatcgtatatattcatctgagataaaaatataaaaagaattatggaccctggatggcaatttgcttgatagcatctgatttgcagactcataatttgatttttaattaaatatataggttatgatgaagtgaatagacatatcagtgaacagttaactatattaaatttttatcatttactttttttaagattcagacctcagttatataaatttcagtttaatatcaaccaaaaaattaaaattttaatctaacccttatgtgtataaattggtgtcccataccagcttttaatggtggacctatagaatccagtacttttaatggtgggaatttacagtagaagcatcctttgctgagttatacattcctttatcaatctcttttgatacaacatttaaaacaagtagcttcaagaaaccactggtgttttgaggatagtatttctaaatagcattcaggaacagagtattattgcacagatctgaagatcaaaaaaaagctcaaggaaatacagatcggaagtgctgatgagttatatttattgaaaacccaacttttaaggaagtgctaagatcagtcacccatgtgaataagaagccaggaaaggaaagatggggaagcccagatcaccaggcttctattaaggaggaaagcaacagaggaaacagtgaaggggaacagaagggggtagcaaagtgttacagaaaagcggactggatagacaaaactgcagaaggtgtatgttggggagaactgaaagggaaaacaaaatacttgacatagtcttaagtagaagaaggcagttagagaaaacaaagtatctactggccttgtcaacatacagacttcaaaataccccttatgagaatccaaagaatgatgtgtgtaagggaagattttatttgcccttccggaagaaatcagtatctatgcaaatcttgaaagacgaaatcaaagcccattaatgattcagaatcagtgcttgacctcctgtattctgaatggtgaactctggaagcagggattgtgtctggctctttttagagctggaagtgtagtggctttcattaaatacttgctgtaaagtctttctaagaccaattattatcttagcatgtttcagtatcttctctatcataggccctaagttcattgggggaaaaaaaataagaagattcaacagaatcagcatttgaagtgtaccattggtagttgtttatgaaattaccagatattcataaatgtgacaaatgaacagcaggattatgaattatcaaaggaaaaagtatttgctgaggtgaaaaaatctgatgtttgaggaagtttttatttttatttatttgttttgttttttttttttttgaggcagactctctgtcgccaggcttctcctgcctcagcctcacgagtagctgggactacaggcatgcaccaccacgcccagctaatttttgtatttttagcagagacagggaggaagtttttatttttataaacaaaatctgatgttcagaggccccgtttcttacaataaatgttgagtcttagttaagcaggaatttatgaacacccatttcctgactttttgctttaatttagatttttctccatcctgtttctagcacaaaaatttgcctgctgtgttacaaaaataaatttatgttgtcctgtgccataaagtgatatatttaatatttttattctttggttttgaacattgtaagttcctaaaaacattttattaaacaagtagacattttgttattaaaaaaatgtgatctgtaatttctttgtgcagaatgatttgaagtattgtattcagtttacatgcattattggtttataattaatatctaatgaaaatacatgttgttatattgtaaaaaaaaaaa

SEQ ID NO: 419125 - DNA, 2508 bp, Homo sapiens
  misc_feature (2421)..(2422): n is a, c, g, or t
  misc_feature (2431)..(2432): n is a, c, g, or t
  misc_feature (2434)..(2434): n is a, c, g, or t
  misc_feature (2462)..(2462): n is a, c, g, or t
  misc_feature (2464)..(2464): n is a, c, g, or t
  misc_feature (2482)..(2482): n is a, c, g, or t
  misc_feature (2489)..(2489): n is a, c, g, or t
  misc_feature (2493)..(2494): n is a, c, g, or t
  misc_feature (2497)..(2497): n is a, c, g, or t
  misc_feature (2499)..(2499): n is a, c, g, or t
  misc_feature (2503)..(2503): n is a, c, g, or t
tccccagattgcagagggagacgtggacgtgagtggagcggggcggtccccagcacactagaggaagtcgtgctacccccgcggagttgtcgtgtgttctggattcattccggcaccaccatgtcgaaggtttcctttaagatcacgctgacgtcggacccacggctgccgtacaaagtactcagtgttcctgaaagtacacctttcacagcagtcttaaagtttgcagcagaagaatttaaagttcctgctgcaacaagtgcaattattaccaatgatggaataggaataaatcctgcacagactgctggaaatgtttttctaaaacatggttcagaactgcggattattcctagagatcgtgttggaagttgttaatatctgctacttggaacatacgattgcctttcagaataaatattggtattttttgttgttgtaaaattgaaatcaggcatttaacatactatgaaaacaccaggagtcaatgattaatgaaaggtgactcatctgtccctttttgttgtccatactcttcctatgaagagggaatgcgtatgaattaaggctactactgtcacagaagatcatagtctttgatgctacctcacaacacaaacaggtagttcgttgggggcaaatgaattagccaactgttaactggaagcttttgataatttttttttttagaacaatttggaacattaaaatttactgaatcgtatatattcatctgagataaaaatataaaaagaattatggaccctggatggcaatttgcttgatagcatctgatttgcagactcataatttgatttttaattaaatatataggttatgatgaagtgaatagacatatcagtgaacagttaactatattaaatttttatcatttactttttttaagattcagacctcagttatataaatttcagtttaatatcaaccaaaaaattaaaattttaatctaacccttatgtgtataaattggtgtcccataccagcttttaatggtggacctatagaatccagtacttttaatggtgggaatttacagtagaagcatcctttgctgagttatacattcctttatcaatctcttttgatacaacatttaaaacaagtagcttcaagaaaccactggtgttttgaggatagtatttctaaatagcattcaggaacagagtattattgcacagatctgaagatcaaaaaaaagctcaaggaaatacagatcggaagtgctgatgagttatatttattgaaaacccaacttttaaggaagtgctaagatcagtcacccatgtgaataagaagccaggaaaggaaagatggggaagcccagatcaccaggcttctattaaggaggaaagcaacagaggaaacagtgaaggggaacagaagggggtagcaaagtgttacagaaaagcggactggatagacaaaactgcagaaggtgtatgttggggagaactgaaagggaaaacaaaatacttgacatagtcttaagtagaagaaggcagttagagaaaacaaagtatctactggccttgtcaacatacagacttcaaaataccccttatgagaatccaaagaatgatgtgtgtaagggaagattttatttgcccttccggaagaaatcagtatctatgcaaatcttgaaagacgaaatcaaagcccattaatgattcagaatcagtgcttgacctcctgtattctgaatggtgaactctggaagcagggattgtgtctggctctttttagagctggaagtgtagtggctttcattaaatacttgctgtaaagtctttctaagaccaattattatcttagcatgtttcagtatcttctctatcataggccctaagttcattgggggaaaaaaaataagaagattcaacagaatcagcatttgaagtgtaccattggtagttgtttatgaaattaccagatattcataaatgtgacaaatgaacagcaggattatgaattatcaaaggaaaaagtatttgctgaggtgaaaaaatctgatgtttgaggaagtttttatttttatttatttgttttgttttttttttttttgaggcagactctctgtcgccaggcttctcctgcctcagcctcacgagtagctgggactacaggcatgcaccaccacgcccagctaatttttgtatttttagcagagacagggaggaagtttttatttttataaacaaaatctgatgttcagaggccccgtttcttacaataaatgttgagtcttagttaagcaggaatttatgaacacccatttcctgactttttgctttaatttagatttttctccatcctgtttctagcacaaaaatacaaaaattagccgggcataatggcatgcagctgtaatcccagcaactcaggagactgaggcaggagaanngcttgaacnngngaggtggaggttgcagtgagccgagatngngccattgcactccagccngggcaanagannganantccntctca

SEQ ID NO: 419126 - DNA, 2330 bp, Homo sapiens
gtcgacgaataatccgcagttctgaaccatgttttagaaaaacatttccagcagtctgtgcggattattcctagagatcgtgttggaagttgttaatatctgctacttggaacatacgattgcctttcagaataaatattggtattttttgttgttgtaaaattgaaatcaggcatttaacatactatgaaaacaccaggagtcaatgattaatgaaaggtgactcatctgtccctttttgttgtccatactcttcctatgaagagggaatgcgtatgaattaaggctactactgtcacagaagatcatagtctttgatgctacctcacaacacaaacaggtagttcgttgggggcaaatgaattagccaactgttaactggaagcttttgataatttttttttttagaacaatttggaacattaaaatttactgaatcgtatatattcatctgagataaaaatataaaaagaattatggaccctggatggcaatttgcttgatagcatctgatttgcagactcataatttgatttttaattaaatatataggttatgatgaagtgaatagacatatcagtgaacagttaactatattaaatttttatcatttactttttttaagattcagacctcagttatataaatttcagtttaatatcaaccaaaaaattaaaattttaatctaacccttatgtgtataaattggtgtcccataccagcttttaatggtggacctatagaatccagtacttttaatggtgggaatttacagtagaagcatcctttgctgagttatacattcctttatcaatctcttttgatacaacatttaaaacaagtagcttcaagaaaccactggtgttttgaggatagtatttctaaatagcattcaggaacagagtattattgcacagatctgaagatcaaaaaaaagctcaaggaaatacagatcggaagtgctgatgagttatatttattgaaaacccaacttttaaggaagtgctaagatcagtcacccatgtgaataagaagccaggaaaggaaagatggggaagcccagatcaccaggcttctattaaggaggaaagcaacagaggaaacagtgaaggggaacagaagggggtagcaaagtgttacagaaaagcggactggatagacaaaactgcagaaggtgtatgttggggagaactgaaagggaaaacaaaatacttgacatagtcttaagtagaagaaggcagttagagaaaacaaagtatctactggccttgtcaacatacagacttcaaaataccccttatgagaatccaaagaatgatgtgtgtaagggaagattttatttgcccttccggaagaaatcagtatctatgcaaatcttgaaagacgaaatcaaagcccattaatgattcagaatcagtgcttgacctcctgtattctgaatggtgaactctggaagcagggattgtgtctggctctttttagagctggaagtgtagtggctttcattaaatacttgctgtaaagtctttctaagaccaattattatcttagcatgtttcagtatcttctctatcataggccctaagttcattgggggaaaaaaaataagaagattcaacagaatcagcatttgaagtgtaccattggtagttgtttatgaaattaccagatattcataaatgtgacaaatgaacagcaggattatgaattatcaaaggaaaaagtatttgctgaggtgaaaaaatctgatgtttgaggaagtttttatttttatttatttgttttgttttttttttttttgaggcagactctctgtcgccaggcttctcctgcctcagcctcacgagtagctgggactacaggcatgcaccaccacgcccagctaatttttgtatttttagcagagacagggaggaagtttttatttttataaacaaaatctgatgttcagaggccccgtttcttacaataaatgttgagtcttagttaagcaggaatttatgaacacccatttcctgactttttgctttaatttagatttttctccatcctgtttctagcacaaaaatttgcctgctgtgttacaaaaataaatttatgttgtcctgtgccataaagtgatatatttaatatttttattctttggttttgaacattgtaagttcctaaaaacattttattaaacaagtagacattttgttattaaaaaaatgtgatctgtaatttctttgtgcagaatgatttgaagtattgtattcagtttacatgcattattggtttataattaatatctaatgaaaatacatgttgttatattgtaaaaaaaaaaa

SEQ ID NO: 419127 - DNA, 2067 bp, Homo sapiens
tccccagattgcagagggagacgtggacgtgagtggagcggggcggtccccagcacactagaggaagtcgtgctacccccgcggagttgtcgtgtgttctggattcattccggcaccaccatgtcgaaggtttcctttaagatcacgctgacgtcggacccacggctgccgtacaaagtactcagtgttcctgaaagtacacctttcacagcagtcttaaagtttgcagcagaagaatttaaagttcctgctgcaacaagtgcaattattaccaatgatggaataggaataaatcctgcacagactgctggaaatgtttttctaaaacatggttcagaactgcggattattcctagagatcgtgttggaagttgttaatatctgctacttggaacatacgattgcctttcagaataaatattggtattttttgttgttgtaaaattgaaatcaggcatttaacatactatgaaaacaccaggagtcaatgattaatgaaaggtgactcatctgtccctttttgttgtccatactcttcctatgaagagggaatgcgtatgaattaaggctactactgtcacagaagatcatagtctttgatgctacctcacaacacaaacaggtagttcgttgggggcaaatgaattagccaactgttaactggaagcttttgataatttttttttttagaacaatttggaacattaaaatttactgaatcgtatatattcatctgagataaaaatataaaaagaattatggaccctggatggcaatttgcttgatagcatctgatttgcagactcataatttgatttttaattaaatatataggttatgatgaagtgaatagacatatcagtgaacagttaactatattaaatttttatcatttactttttttaagattcagacctcagttatataaatttcagtttaatatcaaccaaaaaattaaaattttaatctaacccttatgtgtataaattggtgtcccataccagcttttaatggtggacctatagaatccagtacttttaatggtgggaatttacagtagaagcatcctttgctgagttatacattcctttatcaatctcttttgatacaacatttaaaacaagtagcttcaagaaaccactggtgttttgaggatagtatttctaaatagcattcaggaacagagtattattgcacagatctgaagatcaaaaaaaagctcaaggaaatacagatcggaagtgctgatgagttatatttattgaaaacccaacttttaaggaagtgctaagatcagtcacccatgtgaataagaagccaggaaaggaaagatggggaagcccagatcaccaggcttctattaaggaggaaagcaacagaggaaacagtgaaggggaacagaagggggtagcaaagtgttacagaaaagcggactggatagacaaaactgcagaaggtgtatgttggggagaactgaaagggaaaacaaaatacttgacatagtcttaagtagaagaaggcagttagagaaaacaaagtatctactggccttgtcaacatacagacttcaaaataccccttatgagaatccaaagaatgatgtgtgtaagggaagattttatttgcccttccggaagaaatcagtatctatgcaaatcttgaaagacgaaatcaaagcccattaatgattcagaatcagtgcttgacctcctgtattctgaatggtgaactctggaagcagggattgtgtctggctctttttagagctggaagtgtagtggctttcattaaatacttgctgtaaagtctttctaagaccaattattatcttagcatgtttcagtatcttctctatcataggccctaagttcattgggggaaaaaaaataagaagattcaacagaatcagcatttgaagtgtaccattgacattttgttattaaaaaaatgtgatctgtaatttctttgtgcagaatgatttgaagtattgtattcagtttacatgcattattggtttataattaatatctaatgaaaatacatgttgttatattgtaaaaaaaaaaa

SEQ ID NO: 419128 - DNA, 823 bp, Homo sapiens
  misc_feature (732)..(732): n is a, c, g, or t
  misc_feature (764)..(764): n is a, c, g, or t
  misc_feature (778)..(778): n is a, c, g, or t
  misc_feature (804)..(804): n is a, c, g, or t
ggggggggaagcgggggggggagggaaagggcgcaaggcaataggcgtaagacggggccggcaccaccatgtcgaaggtttcctttaagatcacgctgacgtcggacccacggctgccgtacaaagtactcagtgttcctgaaagtacacctttcacagcagtcttaaagtttgcagcagaagaatttaaagttcctgctgcaacaagtgcaattattaccaatgatggaataggaataaatcctgcacagactgctggtgagtatttgaaaactcatagaggagtgggtggggttatatatgtcaattgacactgaatagttaagctattctaattacacttgacagtattttaacataatggagctgttttttagggattatataccagtctttacctgtgtgtctgagtaataagttgtttcattgtgtatattgattgtagatgtttttggctacaagtaacagaaaacctaatagtggcttaagcattaagagtatttattatatataacaaaaagtctgtagataagattgctttctaattggagtattttttgacctacctcttaaggtagttgtgagatagtgactgtaaagtgcttcatagcttggattatttatagaaagcattcattaagtgctattattttttttaaatatagtcatttacatttcaaggggctgagtctacattcagatcttcaaactgtaactatcagtgattatggngctgacagaacagtaaagagctatactataangagctaactttaantagttatattaaatgacctagctaanctaagtaaatagctgctaa

SEQ ID NO: 419129 - DNA, 769 bp, Homo sapiens
  misc_feature (678)..(678): n is a, c, g, or t
  misc_feature (710)..(710): n is a, c, g, or t
  misc_feature (724)..(724): n is a, c, g, or t
  misc_feature (750)..(750): n is a, c, g, or t
ggggggggaagcgggggggggagggaaagggcgcaaggcaataggcgtaagacggggccggcaccaccatgtcgaaggtttcctttaagatcacgctgacgtcggacccacggctgccgtacaaagtactcagtgttcctgaaagtacacctttcacagcagtcttaaagtttgcagcagaagaatttaaagttcctgctgcaacaagtgcaattattaccaatgatggaataggaataaatcctgcacagactgctggtgagtatttgaaaactcatagaggagtgggtggggttatatatgtcaattgacactgaatagttaagctattctaattacacttgacagtattttaacataatggagctgttttttagggattatataccagtctttacctgtgtgtctgagtaataagttgtttcattgtgtatattgattgtagatgtttttggctacaaaaaaagtctgtagataagattgctttctaattggagtattttttgacctacctcttaaggtagttgtgagatagtgactgtaaagtgcttcatagcttggattatttatagaaagcattcattaagtgctattattttttttaaatatagtcatttacatttcaaggggctgagtctacattcagatcttcaaactgtaactatcagtgattatggngctgacagaacagtaaagagctatactataangagctaactttaantagttatattaaatgacctagctaanctaagtaaatagctgctaa

SEQ ID NO: 419130 - DNA, 227 bp, Homo sapiens
ctggtccagctgcccgaccctgactctctcccgctcttttcctcaggtcgaaggtttcctttaagatcacgctgacgtcggacccacggctgccgtacaaagtgtgagtagctcggccgagatgggccttttggggccggacaagacggggctgggttggggatgatccgagcttttccaacaactaccccacgcagtcttcatctcttcacttcatctactttcct

SEQ ID NO: 419131 - DNA, 2612 bp, Homo sapiens
tccccagattgcagagggagacgtggacgtgagtggagcggggcggtccccagcacactagaggaagtcgtgctacccccgcggagttgtcgtgtgttctggattcattccggcaccaccatgtcgaaggtttcctttaagatcacgctgacgtcggacccacggctgccgtacaaagtactcagtgttcctgaaagtacacctttcacagcagtcttaaagtttgcagcagaagaatttaaagttcctgctgcaacaagtgcaattattaccaatgatggaataggaataaatcctgcacagactgctggaaatgtttttctaaaacatggttcagaactgcggattattcctagagatcgtgttggaagttgttaatatctgctacttggaacatacgattgcctttcagaataaatattggtattttttgttgttgtaaaattgaaatcaggcatttaacatactatgaaaacaccaggagtcaatgattaatgaaaggtgactcatctgtccctttttgttgtccatactcttcctatgaagagggaatgcgtatgaattaaggctactactgtcacagaagatcatagtctttgatgctacctcacaacacaaacaggtagttcgttgggggcaaatgaattagccaactgttaactggaagcttttgataatttttttttttagaacaatttggaacattaaaatttactgaatcgtatatattcatctgagataaaaatataaaaagaattatggaccctggatggcaatttgcttgatagcatctgatttgcagactcataatttgatttttaattaaatatataggttatgatgaagtgaatagacatatcagtgaacagttaactatattaaatttttatcatttactttttttaagattcagacctcagttatataaatttcagtttaatatcaaccaaaaaattaaaattttaatctaacccttatgtgtataaattggtgtcccataccagcttttaatggtggacctatagaatccagtacttttaatggtgggaatttacagtagaagcatcctttgctgagttatacattcctttatcaatctcttttgatacaacatttaaaacaagtagcttcaagaaaccactggtgttttgaggatagtatttctaaatagcattcaggaacagagtattattgcacagatctgaagatcaaaaaaaagctcaaggaaatacagatcggaagtgctgatgagttatatttattgaaaacccaacttttaaggaagtgctaagatcagtcacccatgtgaataagaagccaggaaaggaaagatggggaagcccagatcaccaggcttctattaaggaggaaagcaacagaggaaacagtgaaggggaacagaagggggtagcaaagtgttacagaaaagcggactggatagacaaaactgcagaaggtgtatgttggggagaactgaaagggaaaacaaaatacttgacatagtcttaagtagaagaaggcagttagagaaaacaaagtatctactggccttgtcaacatacagacttcaaaataccccttatgagaatccaaagaatgatgtgtgtaagggaagattttatttgcccttccggaagaaatcagtatctatgcaaatcttgaaagacgaaatcaaagcccattaatgattcagaatcagtgcttgacctcctgtattctgaatggtgaactctggaagcagggattgtgtctggctctttttagagctggaagtgtagtggctttcattaaatacttgctgtaaagtctttctaagaccaattattatcttagcatgtttcagtatcttctctatcataggccctaagttcattgggggaaaaaaaataagaagattcaacagaatcagcatttgaagtgtaccattggtagttgtttatgaaattaccagatattcataaatgtgacaaatgaacagcaggattatgaattatcaaaggaaaaagtatttgctgaggtgaaaaaatctgatgtttgaggaagtttttatttttatttatttgttttgttttttttttttttgaggcagactctctgtcgccaggcttctcctgcctcagcctcacgagtagctgggactacaggcatgcaccaccacgcccagctaatttttgtatttttagcagagacagggaggaagtttttatttttataaacaaaatctgatgttcagaggccccgtttcttacaataaatgttgagtcttagttaagcaggaatttatgaacacccatttcctgactttttgctttaatttagatttttctccatcctgtttctagcacaaaaatttgcctgctgtgttacaaaaataaatttatgttgtcctgtgccataaagtgatatatttaatatttttattctttggttttgaacattgtaagttcctaaaaacattttattaaacaagtagacattttgttattaaaaaaatgtgatctgtaatttctttgtgcagaatgatttgaagtattgtattcagtttacatgcattattggtttataattaatatctaatgaaaatacatgttgttatattgtaaaaaaaaaaa

SEQ ID NO: 419132 - DNA, 948 bp, Homo sapiens
tccccagattgcagagggagacgtggacgtgagtggagcggggcggtccccagcacactagaggaagtcgtgctacccccgcggagttgtcgtgtgttctggattcattccggcaccaccatgtcgaaggtttcctttaagatcacgctgacgtcggacccacggctgccgtacaaagtactcagtgttcctgaaagtacacctttcacagcagtcttaaagtttgcagcagaagaatttaaagttcctgctgcaacaagtgcaattattaccaatgatggaataggaataaatcctgcacagactgctggaaatgtttttctaaaacatggttcagaactgcggattattcctagagatcgtgttggaagttgttaatatctgctacttggaacatacgattgcctttcagaataaatattggtattttttgttgttgtaaaattgaaatcaggcatttaacatactatgaaaacaccaggagtcaatgattaatgaaaggtgactcatctgtccctttttgttgtccatactcttcctatgaagagggaatgcgtatgaattaaggctactactgtcacagaagatcatagtctttgatgctacctcacaacacaaacaggtagttcgttgggggcaaatgaattagccaactgttaactggaagcttttgataatttttttttttagaacaatttggaacattaaaatttactgaatcgtatatattcatctgagataaaaatataaaaagaattatggaccctggatggcaatttgcttgatagcatctgatttgcagactcataatttgatttttaattaaatatataggttatgatgaagtgaatagacatatcagtgaacagttaactatattaaatttttatcatttactttttttaagattcagacctcagttatataaatttcagtttaatatcaacc

SEQ ID NO: 419133 - DNA, 1310 bp, Homo sapiens
tccccagattgcagagggagacgtggacgtgagtggagcggggcggtccccagcacactagaggaagtcgtgctacccccgcggagttgtcgtgtgttctggattcattccggcaccaccatgtcgaaggtttcctttaagatcacgctgacgtcggacccacggctgccgtacaaagtactcagtgttcctgaaagtacacctttcacagcagtcttaaagtttgcagcagaagaagtaagtacagaagttggaacaacctttatggaatgcggtttgccaatatgcttcaaatgtctttaagagttgcatgcactttgacccatcatttccatgtggcttcattactaggtttatgttatcaaaaagtaggatgatagttaagacttactttcagatataagaagcatgagttaaacaaattgacatatctgattaatgcaaccattgaaaattataagaatttaatgaatttttatgagaatttttatgaaaactaaaaaggtgctgatttttaaatgttttttaaaatgcaacattatatcacattatattctatatactcatattttactagtcttgattccaaaattgcaatttcatagaatctttatcatagttttcaaattttctatatgagcatgtggactgtcagtaaaatttgttgttttgaaaagtttctagttttttaaaacatgtttgaattttctgtttcataagaaacaatttttttcatccaaaattattagaaatatctataatgcaactttttggacatgacacttgaaaaagtagcttgatctgttagaaatggcacccaaatgtgacttcggagacttagggttcctgttgtaggtgcgtcattagttagctatgtgacatgatgcaaatccctcttttttattctgcaaaatggaagtagttaatacctgtccttcctctctgatcaagtgatttcgagtaaaaacattatttcctgaaattttctgttgaagttaaaagtgctaaacaggtacgttgtaacccaaatcaaaacgttttggttcagaatcttttgaaaagtttatagtcacagaaaaataattttcttaactacattaataaaaaatagcttaacacacaatcctgccctgtacttcactgatttatggcaagtcagccaatccatcagtgctcaaagctccttgtattgtcaggaatcactaacattatttgtcactcattcagaattaaactgccaactagtagcatttgttttgtgtctgatagattcttcatgcagaaagaataagtaaaatgagatgggacac

SEQ ID NO: 419134 - DNA, 3277 bp, Homo sapiens
tccccagattgcagagggagacgtggacgtgagtggagcggggcggtccccagcacactagaggaagtcgtgctacccccgcggagttgtcgtgtgttctggattcattccggcaccaccatgtcgaaggtttcctttaagatcacgctgacgtcggacccacggctgccgtacaaagtactcagtgttcctgaaagtacacctttcacagcagtcttaaagtttgcagcagaagaatttaaagttcctgctgcaacaagtgcaattattaccaatgatggaataggaataaatcctgcacagactgctggccttgcagttgaaattcagccataaagaaaatgaagtgatttaaaattgcaaatttttgttacttcagtagttgttaatatataattttattaaaaaggtttattgaaaatcgtgaggcactttattgtatggatgcctttaaacttagtagacaaaggtttctttttttcttaatcgagaaactttcaatattttacagtagtttgaattactgctaactctaacatactgcttgttttattatctttaaaaattgaatgtgcatatccttgatatgaagaaaatctcatcaggcaattgaccccaaatatgtcagggtatctaaatttttgtcacttgtagtaatttacattttttttcctgtccttagatatattattgtgtttgaaggaagtattcatgattaattattcacagttcttgatgaaagtttcgtcagagttttcatggctggtgttattttaattttaagcgtatgttggattgtgaagataggagaataggaacaagacttaaaaagcttggaattggggtctcatgatgcttgagcttttgtacccattttactgtttactaaatcatttattatatttaataattgtcagaatattaagataacttgatttttagatatctaactttatgttttgtttgtttgtataggaaatgtttttctaaaacatggttcagaactgcggattattcctagagatcgtgttggaagttgttaatatctgctacttggaacatacgattgcctttcagaataaatattggtattttttgttgttgtaaaattgaaatcaggcatttaacatactatgaaaacaccaggagtcaatgattaatgaaaggtgactcatctgtccctttttgttgtccatactcttcctatgaagagggaatgcgtatgaattaaggctactactgtcacagaagatcatagtctttgatgctacctcacaacacaaacaggtagttcgttgggggcaaatgaattagccaactgttaactggaagcttttgataatttttttttttagaacaatttggaacattaaaatttactgaatcgtatatattcatctgagataaaaatataaaaagaattatggaccctggatggcaatttgcttgatagcatctgatttgcagactcataatttgatttttaattaaatatataggttatgatgaagtgaatagacatatcagtgaacagttaactatattaaatttttatcatttactttttttaagattcagacctcagttatataaatttcagtttaatatcaaccaaaaaattaaaattttaatctaacccttatgtgtataaattggtgtcccataccagcttttaatggtggacctatagaatccagtacttttaatggtgggaatttacagtagaagcatcctttgctgagttatacattcctttatcaatctcttttgatacaacatttaaaacaagtagcttcaagaaaccactggtgttttgaggatagtatttctaaatagcattcaggaacagagtattattgcacagatctgaagatcaaaaaaaagctcaaggaaatacagatcggaagtgctgatgagttatatttattgaaaacccaacttttaaggaagtgctaagatcagtcacccatgtgaataagaagccaggaaaggaaagatggggaagcccagatcaccaggcttctattaaggaggaaagcaacagaggaaacagtgaaggggaacagaagggggtagcaaagtgttacagaaaagcggactggatagacaaaactgcagaaggtgtatgttggggagaactgaaagggaaaacaaaatacttgacatagtcttaagtagaagaaggcagttagagaaaacaaagtatctactggccttgtcaacatacagacttcaaaataccccttatgagaatccaaagaatgatgtgtgtaagggaagattttatttgcccttccggaagaaatcagtatctatgcaaatcttgaaagacgaaatcaaagcccattaatgattcagaatcagtgcttgacctcctgtattctgaatggtgaactctggaagcagggattgtgtctggctctttttagagctggaagtgtagtggctttcattaaatacttgctgtaaagtctttctaagaccaattattatcttagcatgtttcagtatcttctctatcataggccctaagttcattgggggaaaaaaaataagaagattcaacagaatcagcatttgaagtgtaccattggtagttgtttatgaaattaccagatattcataaatgtgacaaatgaacagcaggattatgaattatcaaaggaaaaagtatttgctgaggtgaaaaaatctgatgtttgaggaagtttttatttttatttatttgttttgttttttttttttttgaggcagactctctgtcgccaggcttctcctgcctcagcctcacgagtagctgggactacaggcatgcaccaccacgcccagctaatttttgtatttttagcagagacagggaggaagtttttatttttataaacaaaatctgatgttcagaggccccgtttcttacaataaatgttgagtcttagttaagcaggaatttatgaacacccatttcctgactttttgctttaatttagatttttctccatcctgtttctagcacaaaaatttgcctgctgtgttacaaaaataaatttatgttgtcctgtgccataaagtgatatatttaatatttttattctttggttttgaacattgtaagttcctaaaaacattttattaaacaagtagacattttgttattaaaaaaatgtgatctgtaatttctttgtgcagaatgatttgaagtattgtattcagtttacatgcattattggtttataattaatatctaatgaaaatacatgttgttatattgtaaaaaaaaaaa

SEQ ID NO: 419135 - DNA, 2572 bp, Homo sapiens
tccccagattgcagagggagacgtggacgtgagtggagcggggcggtccccagcacactagaggaagtcgtgctacccccgcggagttgtcgtgtgttctggattcattccggcaccaccatgtcgaaggtttcctttaagatcacgctgacgtcggacccacggctgccgtacaaagtactcagtgttcctgaaagtacacctttcacagcagtcttaaagtttgcagcagaagaaatggaataggaataaatcctgcacagactgctggaaatgtttttctaaaacatggttcagaactgcggattattcctagagatcgtgttggaagttgttaatatctgctacttggaacatacgattgcctttcagaataaatattggtattttttgttgttgtaaaattgaaatcaggcatttaacatactatgaaaacaccaggagtcaatgattaatgaaaggtgactcatctgtccctttttgttgtccatactcttcctatgaagagggaatgcgtatgaattaaggctactactgtcacagaagatcatagtctttgatgctacctcacaacacaaacaggtagttcgttgggggcaaatgaattagccaactgttaactggaagcttttgataatttttttttttagaacaatttggaacattaaaatttactgaatcgtatatattcatctgagataaaaatataaaaagaattatggaccctggatggcaatttgcttgatagcatctgatttgcagactcataatttgatttttaattaaatatataggttatgatgaagtgaatagacatatcagtgaacagttaactatattaaatttttatcatttactttttttaagattcagacctcagttatataaatttcagtttaatatcaaccaaaaaattaaaattttaatctaacccttatgtgtataaattggtgtcccataccagcttttaatggtggacctatagaatccagtacttttaatggtgggaatttacagtagaagcatcctttgctgagttatacattcctttatcaatctcttttgatacaacatttaaaacaagtagcttcaagaaaccactggtgttttgaggatagtatttctaaatagcattcaggaacagagtattattgcacagatctgaagatcaaaaaaaagctcaaggaaatacagatcggaagtgctgatgagttatatttattgaaaacccaacttttaaggaagtgctaagatcagtcacccatgtgaataagaagccaggaaaggaaagatggggaagcccagatcaccaggcttctattaaggaggaaagcaacagaggaaacagtgaaggggaacagaagggggtagcaaagtgttacagaaaagcggactggatagacaaaactgcagaaggtgtatgttggggagaactgaaagggaaaacaaaatacttgacatagtcttaagtagaagaaggcagttagagaaaacaaagtatctactggccttgtcaacatacagacttcaaaataccccttatgagaatccaaagaatgatgtgtgtaagggaagattttatttgcccttccggaagaaatcagtatctatgcaaatcttgaaagacgaaatcaaagcccattaatgattcagaatcagtgcttgacctcctgtattctgaatggtgaactctggaagcagggattgtgtctggctctttttagagctggaagtgtagtggctttcattaaatacttgctgtaaagtctttctaagaccaattattatcttagcatgtttcagtatcttctctatcataggccctaagttcattgggggaaaaaaaataagaagattcaacagaatcagcatttgaagtgtaccattggtagttgtttatgaaattaccagatattcataaatgtgacaaatgaacagcaggattatgaattatcaaaggaaaaagtatttgctgaggtgaaaaaatctgatgtttgaggaagtttttatttttatttatttgttttgttttttttttttttgaggcagactctctgtcgccaggcttctcctgcctcagcctcacgagtagctgggactacaggcatgcaccaccacgcccagctaatttttgtatttttagcagagacagggaggaagtttttatttttataaacaaaatctgatgttcagaggccccgtttcttacaataaatgttgagtcttagttaagcaggaatttatgaacacccatttcctgactttttgctttaatttagatttttctccatcctgtttctagcacaaaaatttgcctgctgtgttacaaaaataaatttatgttgtcctgtgccataaagtgatatatttaatatttttattctttggttttgaacattgtaagttcctaaaaacattttattaaacaagtagacattttgttattaaaaaaatgtgatctgtaatttctttgtgcagaatgatttgaagtattgtattcagtttacatgcattattggtttataattaatatctaatgaaaatacatgttgttatattgtaaaaaaaaaaa

SEQ ID NO: 419136 - DNA, 2114 bp, Homo sapiens
  misc_feature (2027)..(2028): n is a, c, g, or t
  misc_feature (2037)..(2038): n is a, c, g, or t
  misc_feature (2040)..(2040): n is a, c, g, or t
  misc_feature (2068)..(2068): n is a, c, g, or t
  misc_feature (2070)..(2070): n is a, c, g, or t
  misc_feature (2088)..(2088): n is a, c, g, or t
  misc_feature (2095)..(2095): n is a, c, g, or t
  misc_feature (2099)..(2100): n is a, c, g, or t
  misc_feature (2103)..(2103): n is a, c, g, or t
  misc_feature (2105)..(2105): n is a, c, g, or t
  misc_feature (2109)..(2109): n is a, c, g, or t
tccccagattgcagagggagacgtggacgtgagtggagcggggcggtccccagcacactagaggaagtcgtgctacccccgcggagttgtcgtgtgttctggattcattccggcaccaccatgtcgaaggtttcctttaagatcacgctgacgtcggacccacggctgccgtacaaagtactcagtgttcctgaaagtacacctttcacagcagtcttaaagtttgcagcagaagaatttaaagttcctgctgcaacaagtgcaattattaccaatgatggaataggaataaatcctgcacagactgctggaaatgtttttctaaaacatggttcagaactgcggattattcctagagatcgtgttggaagttgttaatatctgctacttggaacatacgattgcctttcagaataaatattggtattttttgttgttgtaaaattgaaatcaggcatttaacatactatgaaaacaccaggagtcaatgattaatgaaaggtgactcatctgtccctttttgttgtccatactcttcctatgaagagggaatgcgtatgaattaaggctactactgtcacagaagatcatagtctttgatgctacctcacaacacaaacaggtagttcgttgggggcaaatgaattagccaactgttaactggaagcttttgataatttttttttttagaacaatttggaacattaaaatttactgaatcgtatatattcatctgagataaaaatataaaaagaattatggaccctggatggcaatttgcttgatagcatctgatttgcagactcataatttgatttttaattaaatatataggttatgatgaagtgaatagacatatcagtgaacagttaactatattaaatttttatcatttactttttttaagattcagacctcagttatataaatttcagtttaatatcaaccaaaaaattaaaattttaatctaacccttatgtgtataaattggtgtcccataccagcttttaatggtggacctatagaatccagtacttttaatggtgggaatttacagtagaagcatcctttgctgagttatacattcctttatcaatctcttttgatacaacatttaaaacaagtagcttcaagaaaccactggtgttttgaggatagtatttctaaatagcattcaggaacagagtattattgcacagatctgaagatcaaaaaaaagctcaaggaaatacagatcggaagtgctgatgagttatatttattgaaaacccaacttttaaggaagtgctaagatcagtcacccatgtgaataagaagccaggaaaggaaagatggggaagcccagatcaccaggcttctattaaggaggaaagcaacagaggaaacagtgaaggggaacagaagggggtagcaaagtgttacagaaaagcggactggatagacaaaactgcagaaggtgtatgttggggagaactgaaagggaaaacaaaatacttgacatagtcttaagtagaagaaggcagttagagaaaacaaagtatctactggccttgtcaacatacagacttcaaaataccccttatgagaatccaaagaatgatgtgtgtaagggaagattttatttgcccttccggaagaaatcagtatctatgcaaatcttgaaagacgaaatcaaagcccattaatgattcagaatcagtgcttgacctcctgtattctgaatggtgaactctggaagcagggattgtgtctggctctttttagagctggaagtgtagtggctttcattaaatacttgctgtaaagtctttctaagaccaattattatcttagcatgtttcagtatcttctctatcataggccctaagttcattgggggaaaaaaaataagaagattcaacagaatcagcatttgaagtgtaccattggtagttgtttatgaaattaccagatattcataaatgtgacaaatgaacagcaggattatgaattatcaaaggaaaaagtatttgctgaggcaggagaanngcttgaacnngngaggtggaggttgcagtgagccgagatngngccattgcactccagccngggcaanagannganantccntctca

SEQ ID NO: 419137 - DNA, 2108 bp, Homo sapiens
ggcacgagggttccgctgtctcgggaaccgtcgtatccctcggtccggcggcggcggcggcggcggcggtagcggaggagacggtttcaggcctccggtgcggctgcaatgctgagctcccgggccgaggcggcgatgaccgcggccgacagggccatccagcgcttcctgcggaccggggcggccgtcagatataaagtcatgaagaactggggagttataggtggaattgctgctgctcttgcagcaggaatatatgttatttggggtcccattacagaaagaaagaagcgtagaaaagggcttgtgcctggccttgttaatttagggaacacctgcttcatgaactccctgctacaaggcctgtctgcctgtcctgctttcatcaggtggctggaagagttcacctcccagtactccagggatcagaaggagcccccctcacaccagtatttatccttaacactcttgcaccttctgaaagccttgtcctgccaagaagttactgatgatgaggtcttagatgcaagctgcttgttggatgtcttaagaatgtacagatggcagatctcatcatttgaagaacaggatgctcacgaattattccatgtcattacctcgtcattggaagatgagcgagaccgccagcctcgggtcacacatttgtttgatgtgcattccctggagcagcagtcagaaataactcccaaacaaattacctgccgcacaagagggtcacctcaccccacatccaatcactggaagtctcaacatccttttcatggaagactcactagtaatatggtctgcaaacactgtgaacaccagagtcctgttcgatttgatacctttgatagcctttcactaagtattccagccgccacatggggtcacccattgaccctggaccactgccttcaccacttcatctcatcagaatcagtgcgggatgttgtgtgtgacaactgtacaaagattgaagccaagggaacgttgaacggggaaaaggtggaacaccagaggaccacttttgttaaacagttaaaactagggaagctccctcagtgtctctgcatccacctacagcggctgagctggtccagccacggcacgcctctgaagcggcatgagcacgtgcagttcaatgagttcctgatgatggacatttacaagtaccacctccttggacataaacctagtcaacacaaccctaaactgaacaagaacccagggcctacactggagctgcaggatgggccgggagcccccacaccagttctgaatcagccaggggcccccaaaacacagatttttatgaatggcgcctgctccccatctttattgccaacgctgtcagcgccgatgcccttccctctcccagttgttcccgactacagctcctccacatacctcttccggctgatggcagttgtcgtccaccatggagacatgcactctggacactttgtcacttaccgacggtccccaccttctgccaggaaccctctctcaactagcaatcagtggctgtgggtctccgatgacactgtccgcaaggccagcctgcaggaggtcctgtcctccagcgcctacctgctgttctacgagcgcgtcctttccaggatgcagcaccagagccaggagtgcaagtctgaagaatgactgtgccctcctgcaaggctagagctgatggcactgtctgcactgtccaggaaaaaagtaaaactgtactgttgcgtgtgcaagcggccccactagagccttccagccttctggtgtgttctaagagcaggctccacctgggagccagccccagttcacaccaaaccaggctccctgaacagtcctgttcatgtgtgtaggtggttctgttgtgttaagaaagcattcattatgtccggagtgtctttttactcatctgatacaggtaattaaaagaactcagattcttgaagccaccgttttcatattgtaatgttaggtgttctcagaggggaggtacctttgtctaatcaacgtttccacttagatcttttatttttaataagcaggcccataaaaattgttgacaagaattaatgaaattattaaaggcaacaatttagaag

SEQ ID NO: 419138 - DNA, 883 bp, Homo sapiens
gatctctagcaggatccccgggagcgtctccatgtccggagtgtctttttactcatctgatacaggtaattaaaagaactcagattcttgaagccaccgttttcatattgtaatgttaggtgttctcagaggggaggtacctttgtctaatcaacgtttccacttagatcttttatttttaataagcaggcccataaaaattgttgacaagaattaatgaaattattaaaggcaacaatttagaagaaaaagtgcctttcactttcgattgcttttgtagcacgtccattgtgaaatattccttccaggctactcaaaggatagcaagagaacaggtaaatgatgcctaaagaacaccttcctttttctatgccttttctaatctttcaattctttctatggagtaaaggctcatctgccaaatctgccccctggggaaactctttcactactttgtcagttataagtgaagagcttacttgttgcttttatcttttgtatattggactgagatgtaattacactgtattataaaactctgtgaatagccagaactgagctggatctttgcaacacctgattcctctgctctgtggaaaactttttcttacacaaggatccactgtggacggttactttcatctgtttatttattgcccatgcagagctcttaaggtttacaggtgggagcttggggctgtataaaaaaataatccctgccctgagttgacacctggcttaggaaggaagggctgactatggggctgcagtctctctgaacctcagtttcctcatttgtgaagtgaagggttagatttgatgaccaccaaagttcagccttttcacgaaaaggagaaagcagcttttgactttttaaaaaaca

SEQ ID NO: 419139 - DNA, 2657 bp, Homo sapiens
gcggtcatcgccgcctcggcccgggagctcagcattgcagccgcaccggaggcctgaaaccgtctcctccgctaccgccgccgccgccgccgccgccggaccgagggatacgacggttcccgagacagcggaacctgcggcccggggcggccgtcagatataaagtcatgaagaactggggagttataggtggaattgctgctgctcttgcagcaggaatatatgttatttggggtcccattacagaaagaaagaagcgtagaaaagggcttgtgcctggccttgttaatttagggaacacctgcttcatgaactccctgctacaaggcctgtctgcctgtcctgctttcatcaggtggctggaagagttcacctcccagtactccagggatcagaaggagcccccctcacaccagtatttatccttaacactcttgcaccttctgaaagccttgtcctgccaagaagttactgatgatgaggtcttagatgcaagctgcttgttggatgtcttaagaatgtacagatggcagatctcatcatttgaagaacaggatgctcacgaattattccatgtcattacctcgtcattggaagatgagcgagaccgccagcctcgggtcacacatttgtttgatgtgcattccctggagcagcagtcagaaataactcccaaacaaattacctgccgcacaagagggtcacctcaccccacatccaatcactggaagtctcaacatccttttcatggaagactcactagtaatatggtctgcaaacactgtgaacaccagagtcctgttcgatttgatacctttgatagcctttcactaagtattccagccgccacatggggtcacccattgaccctggaccactgccttcaccacttcatctcatcagaatcagtgcgggatgttgtgtgtgacaactgtacaaagattgaagccaagggaacgttgaacggggaaaaggtggaacaccagaggaccacttttgttaaacagttaaaactagggaagctccctcagtgtctctgcatccacctacagcggctgagctggtccagccacggcacgcctctgaagcggcatgagcacgtgcagttcaatgagttcctgatgatggacatttacaagtaccacctccttggacataaacctagtcaacacaaccctaaactgaacaagaacccagggcctacactggagctgcaggatgggccgggagcccccacaccagttctgaatcagccaggggcccccaaaacacagatttttatgaatggcgcctgctccccatctttattgccaacgctgtcagcgccgatgcccttccctctcccagttgttcccgactacagctcctccacatacctcttccggctgatggcagttgtcgtccaccatggagacatgcactctggacactttgtcacttaccgacggtccccaccttctgccaggaaccctctctcaactagcaatcagtggctgtgggtctccgatgacactgtccgcaaggccagcctgcaggaggtcctgtcctccagcgcctacctgctgttctacgagcgcgtcctttccaggatgcagcaccagagccaggagtgcaagtctgaagaatgactgtgccctcctgcaaggctagagctgatggcactgtctgcactgtccaggaaaaaagtaaaactgtactgttgcgtgtgcaagcggccccactagagccttccagccttctggtgtgttctaagagcaggctccacctgggagccagccccagttcacaccaaaccaggctccctgaacagtcctgttcatgtgtgtaggtggttctgttgtgttaagaaagcattcattatgtccggagtgtctttttactcatctgatacaggtaatttcagaggggaggtacctttgtctaatcaacgtttccacttagatcttttatttttaataagcaggcccataaaaattgttgacaagaattaatgaaattattaaaggcaacaatttagaagaaaaagtgcctttcactttcgattgcttttgtagcacgtccattgtgaaatattccttccaggctactcaaaggatagcaagagaacaggtaaatgatgcctaaagaacaccttcctttttctatgccttttctaatctttcaattctttctatggagtaaaggctcatctgccaaatctgccccctggggaaactctttcactactttgtcagttataagtgaagagcttacttgttgcttttatcttttgtatattggactgagatgtaattacactgtattataaaactctgtgaatagccagaactgagctggatctttgcaacacctgattcctctgctctgtggaaaactttttcttacacaaggatccactgtggacggttactttcatctgtttatttattgcccatgcagagctcttaaggtttacaggtgggagcttggggctgtataaaaaaataatccctgccctgagttgacacctggcttaggaaggaagggctgactatggggctgcagtctctctgaacctcagtttcctcatttgtgaagtgaagggttagatttgatgaccaccaaagttcagccttttcacgaaaaggagaaagcagcttttgactttttaaaaaaca

SEQ ID NO: 419140 - DNA, 2858 bp, Homo sapiens
ggcacgagggttccgctgtctcgggaaccgtcgtatccctcggtccggcggcggcggcggcggcggcggtagcggaggagacggtttcaggcctccggtgcggctgcaatgctgagctcccgggccgaggcggcgatgaccgcggccgacagggccatccagcgcttcctgcggaccggggcggccgtcagccctatgaggtaggtcttatggattgtccccattgtacagatgaggaaactgaggcttagaaggtgaagtgatgccaaatgaaatagcaaagccaggattgaaccagaataagatataaagtcatgaagaactggggagttataggtggaattgctgctgctcttgcagcaggaatatatgttatttggggtcccattacagaaagaaagaagcgtagaaaagggcttgtgcctggccttgttaatttagggaacacctgcttcatgaactccctgctacaaggcctgtctgcctgtcctgctttcatcaggtggctggaagagttcacctcccagtactccagggatcagaaggagcccccctcacaccagtatttatccttaacactcttgcaccttctgaaagccttgtcctgccaagaagttactgatgatgaggtcttagatgcaagctgcttgttggatgtcttaagaatgtacagatggcagatctcatcatttgaagaacaggatgctcacgaattattccatgtcattacctcgtcattggaagatgagcgagaccgccagcctcgggtcacacatttgtttgatgtgcattccctggagcagcagtcagaaataactcccaaacaaattacctgccgcacaagagggtcacctcaccccacatccaatcactggaagtctcaacatccttttcatggaagactcactagtaatatggtctgcaaacactgtgaacaccagagtcctgttcgatttgatacctttgatagcctttcactaagtattccagccgccacatggggtcacccattgaccctggaccactgccttcaccacttcatctcatcagaatcagtgcgggatgttgtgtgtgacaactgtacaaagattgaagccaagggaacgttgaacggggaaaaggtggaacaccagaggaccacttttgttaaacagttaaaactagggaagctccctcagtgtctctgcatccacctacagcggctgagctggtccagccacggcacgcctctgaagcggcatgagcacgtgcagttcaatgagttcctgatgatggacatttacaagtaccacctccttggacataaacctagtcaacacaaccctaaactgaacaagaacccagggcctacactggagctgcaggatgggccgggagcccccacaccagttctgaatcagccaggggcccccaaaacacagatttttatgaatggcgcctgctccccatctttattgccaacgctgtcagcgccgatgcccttccctctcccagttgttcccgactacagctcctccacatacctcttccggctgatggcagttgtcgtccaccatggagacatgcactctggacactttgtcacttaccgacggtccccaccttctgccaggaaccctctctcaactagcaatcagtggctgtgggtctccgatgacactgtccgcaaggccagcctgcaggaggtcctgtcctccagcgcctacctgctgttctacgagcgcgtcctttccaggatgcagcaccagagccaggagtgcaagtctgaagaatgactgtgccctcctgcaaggctagagctgatggcactgtctgcactgtccaggaaaaaagtaaaactgtactgttgcgtgtgcaagcggccccactagagccttccagccttctggtgtgttctaagagcaggctccacctgggagccagccccagttcacaccaaaccaggctccctgaacagtcctgttcatgtgtgtaggtggttctgttgtgttaagaaagcattcattatgtccggagtgtctttttactcatctgatacaggtaattaaaagaactcagattcttgaagccaccgttttcatattgtaatgttaggtgttctcagaggggaggtacctttgtctaatcaacgtttccacttagatcttttatttttaataagcaggcccataaaaattgttgacaagaattaatgaaattattaaaggcaacaatttagaagaaaaagtgcctttcactttcgattgcttttgtagcacgtccattgtgaaatattccttccaggctactcaaaggatagcaagagaacaggtaaatgatgcctaaagaacaccttcctttttctatgccttttctaatctttcaattctttctatggagtaaaggctcatctgccaaatctgccccctggggaaactctttcactactttgtcagttataagtgaagagcttacttgttgcttttatcttttgtatattggactgagatgtaattacactgtattataaaactctgtgaatagccagaactgagctggatctttgcaacacctgattcctctgctctgtggaaaactttttcttacacaaggatccactgtggacggttactttcatctgtttatttattgcccatgcagagctcttaaggtttacaggtgggagcttggggctgtataaaaaaataatccctgccctgagttgacacctggcttaggaaggaagggctgactatggggctgcagtctctctgaacctcagtttcctcatttgtgaagtgaagggttagatttgatgaccaccaaagttcagccttttcacgaaaaggagaaagcagcttttgactttttaaaaaaca

SEQ ID NO: 419141 - DNA, 2424 bp, Homo sapiens
gaagaaaagagggtactcaccccacatcaatcactggaagtctcaacatccttttcatggaagactcactagtaatatggtctgcaaacactgtgaacaccagagtcctgttcgatttgatacctttgatagcctttcactaagtattccagccgccacatggccttgtcctgccaagaagttactgatgatgaggtcttagatgcaagctgcttgttggatgtcttaagaatgtacagatggcagatctcatcatttgaagaacaggatgctcacgaattattccatgtcattacctcgtcattggaagatgagcgagaccgccagcctcgggtcacacatttgtttgatgtgcattccctggagcagcagtcagaaataactcccaaacaaattacctgccgcacaagagggtcacctcaccccacatccaatcactggaagtctcaacatccttttcatggaagactcactagtaatatggtctgcaaacactgtgaacaccagagtcctgttcgatttgatacctttgatagcctttcactaagtattccagccgccacatggggtcacccattgaccctggaccactgccttcaccacttcatctcatcagaatcagtgcgggatgttgtgtgtgacaactgtacaaagattgaagccaagggaacgttgaacggggaaaaggtggaacaccagaggaccacttttgttaaacagttaaaactagggaagctccctcagtgtctctgcatccacctacagcggctgagctggtccagccacggcacgcctctgaagcggcatgagcacgtgcagttcaatgagttcctgatgatggacatttacaagtaccacctccttggacataaacctagtcaacacaaccctaaactgaacaagaacccagggcctacactggagctgcaggatgggccgggagcccccacaccagttctgaatcagccaggggcccccaaaacacagatttttatgaatggcgcctgctccccatctttattgccaacgctgtcagcgccgatgcccttccctctcccagttgttcccgactacagctcctccacatacctcttccggctgatggcagttgtcgtccaccatggagacatgcactctggacactttgtcacttaccgacggtccccaccttctgccaggaaccctctctcaactagcaatcagtggctgtgggtctccgatgacactgtccgcaaggccagcctgcaggaggtcctgtcctccagcgcctacctgctgttctacgagcgcgtcctttccaggatgcagcaccagagccaggagtgcaagtctgaagaatgactgtgccctcctgcaaggctagagctgatggcactgtctgcactgtccaggaaaaaagtaaaactgtactgttgcgtgtgcaagcggccccactagagccttccagccttctggtgtgttctaagagcaggctccacctgggagccagccccagttcacaccaaaccaggctccctgaacagtcctgttcatgtgtgtaggtggttctgttgtgttaagaaagcattcattatgtccggagtgtctttttactcatctgatacaggtaattaaaagaactcagattcttgaagccaccgttttcatattgtaatgttaggtgttctcagaggggaggtacctttgtctaatcaacgtttccacttagatcttttatttttaataagcaggcccataaaaattgttgacaagaattaatgaaattattaaaggcaacaatttagaagaaaaagtgcctttcactttcgattgcttttgtagcacgtccattgtgaaatattccttccaggctactcaaaggatagcaagagaacaggtaaatgatgcctaaagaacaccttcctttttctatgccttttctaatctttcaattctttctatggagtaaaggctcatctgccaaatctgccccctggggaaactctttcactactttgtcagttataagtgaagagcttacttgttgcttttatcttttgtatattggactgagatgtaattacactgtattataaaactctgtgaatagccagaactgagctggatctttgcaacacctgattcctctgctctgtggaaaactttttcttacacaaggatccactgtggacggttactttcatctgtttatttattgcccatgcagagctcttaaggtttacaggtgggagcttggggctgtataaaaaaataatccctgccctgagttgacacctggcttaggaaggaagggctgactatggggctgcagtctctctgaacctcagtttcctcatttgtgaagtgaagggttagatttgatgaccaccaaagttcagccttttcacgaaaaggagaaagcagcttttgactttttaaaaaaca

SEQ ID NO: 419142 - DNA, 609 bp, Homo sapiens
cagtgattgttaagataagaacagaatcattgtcctggggaagtaacaacagaacaattgttttcttctgttctgagaaacattgctttctgattaaagaagaaagagagcatgtaggggagaatgaggaagagaaaaagacaggagatggttactaagtgtttttgtacatttaggaagaaccaagctgtgctggataccatgataggtttcaaaaataacacacaaaggggacctgtccttctgtgcttacagtctgcggagcagtactagaaccaagccttggcacagatagaaggcctggccccagatctctgtggataaggatcttcttggatcgggattccaaatttaaggccacagcgcaggaactctgggtcccacatgggagagaaattgatcaaatgtgatatactgttctcttcttccccctgctttttttttagggcttgtgcctggccttgttaatttagggaacacctgcttcatgaactccctgctacaaggcctgtctgcctgtcctgctttcatcaggtggctggaagagttcacctcccagtactccagggatcagaaggagcccccctcacaccagtatttatccttaac

SEQ ID NO: 419143 - DNA, 2711 bp, Homo sapiens
gcggtcatcgccgcctcggcccgggagctcagcattgcagccgcaccggaggcctgaaaccgtctcctccgctaccgccgccgccgccgccgccgccggaccgagggatacgacggttcccgagacagcggaacctgcggcccggggcggccgtcagatataaagtcatgaagaactggggagttataggtggaattgctgctgctcttgcagcaggaatatatgttatttggggtcccattacagaaagaaagaagcgtagaaaagggcttgtgcctggccttgttaatttagggaacacctgcttcatgaactccctgctacaaggcctgtctgcctgtcctgctttcatcaggtggctggaagagttcacctcccagtactccagggatcagaaggagcccccctcacaccagtatttatccttaacactcttgcaccttctgaaagccttgtcctgccaagaagttactgatgatgaggtcttagatgcaagctgcttgttggatgtcttaagaatgtacagatggcagatctcatcatttgaagaacaggatgctcacgaattattccatgtcattacctcgtcattggaagatgagcgagaccgccagcctcgggtcacacatttgtttgatgtgcattccctggagcagcagtcagaaataactcccaaacaaattacctgccgcacaagagggtcacctcaccccacatccaatcactggaagtctcaacatccttttcatggaagactcactagtaatatggtctgcaaacactgtgaacaccagagtcctgttcgatttgatacctttgatagcctttcactaagtattccagccgccacatggggtcacccattgaccctggaccactgccttcaccacttcatctcatcagaatcagtgcgggatgttgtgtgtgacaactgtacaaagattgaagccaagggaacgttgaacggggaaaaggtggaacaccagaggaccacttttgttaaacagttaaaactagggaagctccctcagtgtctctgcatccacctacagcggctgagctggtccagccacggcacgcctctgaagcggcatgagcacgtgcagttcaatgagttcctgatgatggacatttacaagtaccacctccttggacataaacctagtcaacacaaccctaaactgaacaagaacccagggcctacactggagctgcaggatgggccgggagcccccacaccagttctgaatcagccaggggcccccaaaacacagatttttatgaatggcgcctgctccccatctttattgccaacgctgtcagcgccgatgcccttccctctcccagttgttcccgactacagctcctccacatacctcttccggctgatggcagttgtcgtccaccatggagacatgcactctggacactttgtcacttaccgacggtccccaccttctgccaggaaccctctctcaactagcaatcagtggctgtgggtctccgatgacactgtccgcaaggccagcctgcaggaggtcctgtcctccagcgcctacctgctgttctacgagcgcgtcctttccaggatgcagcaccagagccaggagtgcaagtctgaagaatgactgtgccctcctgcaaggctagagctgatggcactgtctgcactgtccaggaaaaaagtaaaactgtactgttgcgtgtgcaagcggccccactagagccttccagccttctggtgtgttctaagagcaggctccacctgggagccagccccagttcacaccaaaccaggctccctgaacagtcctgttcatgtgtgtaggtggttctgttgtgttaagaaagcattcattatgtccggagtgtctttttactcatctgatacaggtaattaaaagaactcagattcttgaagccaccgttttcatattgtaatgttaggtgttctcagaggggaggtacctttgtctaatcaacgtttccacttagatcttttatttttaataagcaggcccataaaaattgttgacaagaattaatgaaattattaaaggcaacaatttagaagaaaaagtgcctttcactttcgattgcttttgtagcacgtccattgtgaaatattccttccaggctactcaaaggatagcaagagaacaggtaaatgatgcctaaagaacaccttcctttttctatgccttttctaatctttcaattctttctatggagtaaaggctcatctgccaaatctgccccctggggaaactctttcactactttgtcagttataagtgaagagcttacttgttgcttttatcttttgtatattggactgagatgtaattacactgtattataaaactctgtgaatagccagaactgagctggatctttgcaacacctgattcctctgctctgtggaaaactttttcttacacaaggatccactgtggacggttactttcatctgtttatttattgcccatgcagagctcttaaggtttacaggtgggagcttggggctgtataaaaaaataatccctgccctgagttgacacctggcttaggaaggaagggctgactatggggctgcagtctctctgaacctcagtttcctcatttgtgaagtgaagggttagatttgatgaccaccaaagttcagccttttcacgaaaaggagaaagcagcttttgactttttaaaaaaca

SEQ ID NO: 419144 - DNA, 2452 bp, Homo sapiens
ggcacgagggttccgctgtctcgggaaccgtcgtatccctcggtccggcggcggcggcggcggcggcggtagcggaggagacggtttcaggcctccggtgcggctgcaatgctgagctcccgggccgaggcggcgatgaccgcggccgacagggccatccagcgcttcctgcggaccggggcggccgtcagccttgtcctgccaagaagttactgatgatgaggtcttagatgcaagctgcttgttggatgtcttaagaatgtacagatggcagatctcatcatttgaagaacaggatgctcacgaattattccatgtcattacctcgtcattggaagatgagcgagaccgccagcctcgggtcacacatttgtttgatgtgcattccctggagcagcagtcagaaataactcccaaacaaattacctgccgcacaagagggtcacctcaccccacatccaatcactggaagtctcaacatccttttcatggaagactcactagtaatatggtctgcaaacactgtgaacaccagagtcctgttcgatttgatacctttgatagcctttcactaagtattccagccgccacatggggtcacccattgaccctggaccactgccttcaccacttcatctcatcagaatcagtgcgggatgttgtgtgtgacaactgtacaaagattgaagccaagggaacgttgaacggggaaaaggtggaacaccagaggaccacttttgttaaacagttaaaactagggaagctccctcagtgtctctgcatccacctacagcggctgagctggtccagccacggcacgcctctgaagcggcatgagcacgtgcagttcaatgagttcctgatgatggacatttacaagtaccacctccttggacataaacctagtcaacacaaccctaaactgaacaagaacccagggcctacactggagctgcaggatgggccgggagcccccacaccagttctgaatcagccaggggcccccaaaacacagatttttatgaatggcgcctgctccccatctttattgccaacgctgtcagcgccgatgcccttccctctcccagttgttcccgactacagctcctccacatacctcttccggctgatggcagttgtcgtccaccatggagacatgcactctggacactttgtcacttaccgacggtccccaccttctgccaggaaccctctctcaactagcaatcagtggctgtgggtctccgatgacactgtccgcaaggccagcctgcaggaggtcctgtcctccagcgcctacctgctgttctacgagcgcgtcctttccaggatgcagcaccagagccaggagtgcaagtctgaagaatgactgtgccctcctgcaaggctagagctgatggcactgtctgcactgtccaggaaaaaagtaaaactgtactgttgcgtgtgcaagcggccccactagagccttccagccttctggtgtgttctaagagcaggctccacctgggagccagccccagttcacaccaaaccaggctccctgaacagtcctgttcatgtgtgtaggtggttctgttgtgttaagaaagcattcattatgtccggagtgtctttttactcatctgatacaggtaattaaaagaactcagattcttgaagccaccgttttcatattgtaatgttaggtgttctcagaggggaggtacctttgtctaatcaacgtttccacttagatcttttatttttaataagcaggcccataaaaattgttgacaagaattaatgaaattattaaaggcaacaatttagaagaaaaagtgcctttcactttcgattgcttttgtagcacgtccattgtgaaatattccttccaggctactcaaaggatagcaagagaacaggtaaatgatgcctaaagaacaccttcctttttctatgccttttctaatctttcaattctttctatggagtaaaggctcatctgccaaatctgccccctggggaaactctttcactactttgtcagttataagtgaagagcttacttgttgcttttatcttttgtatattggactgagatgtaattacactgtattataaaactctgtgaatagccagaactgagctggatctttgcaacacctgattcctctgctctgtggaaaactttttcttacacaaggatccactgtggacggttactttcatctgtttatttattgcccatgcagagctcttaaggtttacaggtgggagcttggggctgtataaaaaaataatccctgccctgagttgacacctggcttaggaaggaagggctgactatggggctgcagtctctctgaacctcagtttcctcatttgtgaagtgaagggttagatttgatgaccaccaaagttcagccttttcacgaaaaggagaaagcagcttttgactttttaaaaaaca

SEQ ID NO: 419145 - DNA, 1012 bp, Homo sapiens
ggcacgagggttccgctgtctcgggaaccgtcgtatccctcggtccggcggcggcggcggcggcggcggtagcggaggagacggtttcaggcctccggtgcggctgcaatgctgagctcccgggccgaggcggcgatgaccgcggccgacagggccatccagcgcttcctgcggaccggggcggccgtcagatataaagtcatgaagaactggggagttataggtggaattgctgctgctcttgcagcaggaatatatgttatttggggtcccattacagaaagaaagaagcgtagaaaagggcttgtgcctggccttgttaatttagggaacacctgcttcatgaactccctgctacaaggcctgtctgcctgtcctgctttcatcaggtggctggaagagttcacctcccagtactccagggatcagaaggagcccccctcacaccagtatttatccttaacactcttgcaccttctgaaagccttgtcctgccaagaagttactgatgatgaggtcttagatgcaagctgcttgttggatgtcttaagaatgtacagatggcagatctcatcatttgaagaacaggatgctcacgaattattccatgtcattacctcgtcattggaagatgagcgagaccgccagcctcgggtcacacatttgtttgatgtgcattccctggagcagcagtcagaaataactcccaaacaaattacctgccgcacaagagggtcacctcaccccacatccaatcactggaagtctcaacatccttttcatggaagactcactagtaatatggtctgcaaacactgtgaacaccagccattactgactccgggatcagtcaactttataacattttcattgccccctaaagaaactccatactcattagcaacctctccccatcctttccatcaccctacccttgtcaaccatgaatctacctctgtctctatggatttgcatattctggatgcttcatataaatggaatcatgtaatgt

SEQ ID NO: 419146 - DNA, 563 bp, Homo sapiens
tcatcaatacccatacaccatatgtaatacaaatggaggtgttacgattaaaaaaagtggaggtaactgattcttggggagcggagttcactgctgcccagtggagtcagggaggcagcgtttgtctcatcgttcttcttgcggttcacttcctttgggacaggaagtcttccctgcaaagcaggcagacccacacacagacagacacacataaaagacaaaattagtcatgcttctgaaaccattttttaaaattttgcttttcctgcccagcccacattatacccttgaactcttgctgttttgcaaaacagagtttacatattaaacacagttcacctgaatgtaaatattaggtctgtgaggaaatgaagtaattaaacactggccacctttgcttcagtagaatgaagtgcttctgttacggtggtgccagccatgtgtgaggcagcattccccagtgtcaggtttcttgggacagtttctagtatcagatagggcccaaccttagactgggtgattgatagatactcacaggagtgtcagttgataattataaaaaa

SEQ ID NO: 419147 - DNA, 1614 bp, Homo sapiens
taccttacagcttgcgtatttattgaacaaatactactaaaatagctaaaatacattgggtacttgtcatgagtgcatcagtaaagatcacactgttacaaaagcctgcattttcagcagtacacaactgcaactctacataaatgccacagatgcagaatactgttttcttgctctatttacacagctgatatacctattctaacgaaggagggagaggagtaatgcacaagaaactcaggccaatgggggagcaagaagaaaacgaagaagtgcagtgcatgcgtcatcggtgtttaacagtcagaagcgaaacagttcagaacaaggcctgccctgtcaaaagaagagctaaagacagttatataaaaattaaggtgggctttcagactggctaacacaacaacattccatgagtagatggtaatttatttttgtttatccatttcgttgggagcaaggacaaaaatgtaaatctacaccttgcttatcaaaattgccgaaaaaagaatgctctgccttttaaaaaagtatcatgattttgtagaccttgttttccaatttaatatttggaaaaggtgtcattttcatattcctactcagatgccagtgttttgggtttttttccagggggagtttatttaaaacggttttgctctttttttcgacaaatatcctttcaaacagaaagaacccaaagagacacctcaaaatgcctgtaaaattattgcttttctttctctaagtcaggcaggcgaggctacggaaaggaagagatttggtaagtaaattacagttttgtgattgctcccgctaccgtgactgcatgtccgtgagcgccagccaacgagacaatggtctctcacactctggtagcattcgctcaacctacaacactgaggaagaaagccacactgaagacacaaggaaaacaagtcaatccagtctagagaacaacattcagggaaacagagtaccaacaccttcttagaacatggaaataaaaaataactccatcagagctacctcgccaaggagcatgttgaaagtccaaaatagcaccattcatcagtgtctcaggtcctgtggcagcatctcggtcacttaccacaaggaaacaatgagtttcaaactacttctatacatcaaaagagtacatggataaaatatagagatatacagacaattgatgaacataaactactagaataactcaatctcagtgtgactactgatccgccgccacgtggcttcccggacacactgctgcagcgccaacagtggagaggagctctccatcacaaccagacagcagaagcacagcacagtgaagcacacctgcccacatgatgcacaatacaggtattcatttacaacagatagattttatgccctgtacaggtatgaacacagtgaagatttgacgatggtctctctttcagctgaactctggagttttaattactgacattttcttggaagaaattatcctttgtggttttaaaacatgtgggcttttttttttgttgctcaagtcacatgttctaacaagacagttttaataagccagtttgactagatgtaaagtacttggattaaagtgataatcttact

SEQ ID NO: 419148 - DNA, 1540 bp, Homo sapiens
taccttacagcttgcgtatttattgaacaaatactactaaaatagctaaaatacattgggtacttgtcatgagtgcatcagtaaagatcacactgttacaaaagcctgcattttcagcagtacacaactgcaactctacataaatgccacagatgcagaatactgttttcttgctctatttacacagctgatatacctattctaacgaaggagggagaggagtaatgcacaagaaactcaggccaatgggggagcaagaagaaaacgaagaagtgcagtgcatgcgtcatcggtgtttaacagtcagaagcgaaacagttcagaacaaggcctgccctgtcaaaagaagagctaaagacagttatataaaaattaaggtgggctttcagactggctaacacaacaacattccatgagtagatggtaatttatttttgtttatccatttcgttgggagcaaggacaaaaatgtaaatctacaccttgcttatcaaaattgccgaaaaaagaatgctctgccttttaaaaaagtatcatgattttgtagaccttgttttccaatttaatatttggaaaaggtgtcattttcatattcctactcagatgccagtgttttgggtttttttccagggggagtttatttaaaacggttttgctctttttttcgacaaatatcctttcaaacagaaagaacccaaagagacacctcaaaatgcctgtaaaattattgcttttctttctctaagtcaggcaggcgaggctacggaaaggaagagatttggtaagtaaattacagttttgtgattgctcccgctaccgtgactgcatgtccgtgagcgccagccaacgagacaatggtctctcacactctggtagcattcgctcaacctacaacactgaggaagaaagccacactgaagacacaaggaaaacaagtcaatccagtctagagaacaacattcagggaaacagagtaccaacaccttcttagaacatggaaataaaaaataactccatcagagctacctcgccaaggagcatgttgaaagtccaaaatagcaccattcatcagtgtctcaggtcctgtggcagcatctcggtcacttaccacaaggaaacaatgagtttcaaactacttctatacatcaaaagagtacatggataaaatatagagatatacagacaattgatgaacataaactactaggtttgttacatctaaatgaaaaaaaaggtgggggggggactctcagcctctgcaagaagcagtcgggagctgtgtgagtgaaaaggcaggagtggaccggttgtgtgagcgcggtgggagtttgagttgtggaagacattgttgtagcgaaccaggcctgaaggcccacctgtaagggttgtaaacgtggattcacagtgtgaaattctgagcgttttcacttgagtcagaatgattaaaaactggtttgatgacacctatttgtccactgtaaattctctaaagcaaggctcagagtcccatagtttcttcttatacttgatgatttacaca

SEQ ID NO: 419149 - DNA, 1385 bp, Homo sapiens
gcggcgcctactactactgctcgaattcaagcttctaacgatgtacggggacatgcgtcatcggtgtttaacagtcagaagcgaaacagttcagaacaaggcctgccctgtcaaaagaagagctaaagacagttatataaaaattaaggtgggctttcagactggctaacacaacaacattccatgagtagatggtaatttatttttgtttatccatttcgttgggagcaaggacaaaaatgtaaatctacaccttgcttatcaaaattgccgaaaaaagaatgctctgccttttaaaaaagtatcatgattttgtagaccttgttttccaatttaatatttggaaaaggtgtcattttcatattcctactcagatgccagtgttttgggtttttttccagggggagtttatttaaaacggttttgctctttttttcgacaaatatcctttcaaacagaaagaacccaaagagacacctcaaaatgcctgtaaaattattgcttttctttctctaagtcaggcaggcgaggctacggaaaggaagagatttggtaagtaaattacagttttgtgattgctcccgctaccgtgactgcatgtccgtgagcgccagccaacgagacaatggtctctcacactctggtagcattcgctcaacctacaacactgaggaagaaagccacactgaagacacaaggaaaacaagtcaatccagtctagagaacaacattcagggaaacagagtaccaacaccttcttagaacatggaaataaaaaataactccatcagagctacctcgccaaggagcatgttgaaagtccaaaatagcaccattcatcagtgtctcaggtcctgtggcagcatctcggtcacttaccacaaggaaacaatgagtttcaaactacttctatacatcaaaagagtacatggataaaatatagagatatacagacaattgatgaacataaactactagaataactcaatctcagtgtgactactgatccgccgccacgtggcttcccggacacactgctgcagcgccaacagtggagaggagctctccatcacaaccagacagcagaagcacagcacagtgaagcacacctgcccacatgatgcacaatacaggtattcatttacaacagatagattttatgccctgtacaggtatgaacacagtgaagatttgacgatggtctctctttcagctgaactctggagttttaattactgacattttcttggaagaaattatcctttgtggttttaaaacatgtgggcttttttttttgttgctcaagtcacatgttctaacaagacagttttaataagccagtttgactagatgtaaagtacttggattaaagtgataatcttact

SEQ ID NO: 419150 - DNA, 894 bp, Homo sapiens
ggccccacttccgggttgggccgtgggctggggagtcgtggaggcgcggtcctggtccccacccggcgcgctgggactcgcccgcctcccgtctgtcaccccctgcgcctcgccgggacaacggggtgagggcatgggggcgtggggccccagcctatgttccccgcggcactggcgcggcggccgcgccgaccgaagtccgggacgggggaggggcccgagcgccagcggccgggcgggagtctcaggagcgggttcccggtccctgcaggcggcctggcgggtggcatcgagatctgcatcaccttccccaccgagtacgtgaagacgcagctgcagctggacgagcgctcgcacccgccgcggtaccggggcatcggggactgcgtgcggcagacggttcgcagccatggcgtcctgggcctgtaccgcggccttagctccctgctctacggttccatccccaaggcggccgtcaggtttggaatgttcgagttcctcagcaaccacatgcgggatgcccagggacggctggacagcacgcgtgggctgctgtgcggcctgggcgctggcgtggccgaggccgtggtggtcgtgtgccccatggagaccatcaaggtgaagttcatccacgaccagacctccccaaaccccaagtacagaggattcttccacggggttagggagattgtgcgggaacaagggctgaaggggacgtaccagggcctcacagccactgtcctgaagcagggctcgaaccaggccatccgcttcttcgtcatgacctccctgcgcaactggtaccgaggggacaacccgaaagccaataacctctgatactgggtctcgaactttggagcgcacaggtcttggacctcctggtgtttaaccgtg

SEQ ID NO: 419151 - DNA, 266 bp, Homo sapiens
aagggctgaaggggtggtcgtgtgccccatggagaccatcaaggtgaagttcaggtcccagtccggtgccttccaccctgccctggcctaccacagctgcctccgggcctcggcctggcttcaccgcattccaggggctgcagccccctgcttctcccgccattggccttaactggccctcgggccctctctccgccccggacagggtggcacccaccactctcaggaccaccctgccaaggcagaataaaccggatcctgttgca

SEQ ID NO: 419152 - DNA, 2178 bp, Homo sapiens
cccagacaagctgcctaggagaatacagccgcttgcatttgtggtctttcctgaccttgttcgctgagcgcagaaactacaaccgggaaaggtgtgggtgggaaccggcaggtgaggcccggcccgtggctgctgcgggaggggggcccggcggcgtagccccttctcaccggcctcccgcctcccgcctccaggtttgaaacgttagagttcctctgggactgggctagccccacgtgttttcggggagggtgtgcccctggcctccgggatccctggggatcccgccgctctcgacagtcgcgcagacccgaggcccgctatcccgcggcgcggcacacagtgcaccttgacccactgctcggagctgggccacggctccgcctcccgcagccccgcccccgtcccgccgctcgcggtcgcccagggactcggcctcggccattggctgcgctttggccccgcccctacgcctgcctcggcgcgccccgcccaggcctcagtttcccggcccgcacggggcgggctgggggcggggcctggctcggaccacgcggggcgggacctggagctgacgcggccgccccgcccctgggaccataaccggccgccgccgccaccgcggaccgagcgcggagttctggagtctcggacccgaagccgccacagggcgccccgcctcccgcccgccatgcccgcgccccgcgccccgcgcgctctggcggccgccgcgcccgcgtccgggaaggccaagctgacgcacccggggaaggcgatcctggcaggcggcctggcgggtggcatcgagatctgcatcaccttccccaccgagtacgtgaagacgcagctgcagctggacgagcgctcgcacccgccgcggtaccggggcatcggggactgcgtgcggcagacggttcgcagccatggcgtcctgggcctgtaccgcggccttagctccctgctctacggttccatccccaaggcggccgtcaggtttggaatgttcgagttcctcagcaaccacatgcgggatgcccagggacggctggacagcacgcgtgggctgctgtgcggcctgggcgctggcgtggccgaggccgtggtggtcgtgtgccccatggagaccatcaaggtgaagttcatccacgaccagacctccccaaaccccaagtacagaggattcttccacggggttagggagattgtgcgggaacaagggctgaaggggacgtaccagggcctcacagccactgtcctgaagcagggctcgaaccaggccatccgcttcttcgtcatgacctccctgcgcaactggtaccgaggggacaaccccaacaagcccatgaaccctctgatcactggggtcttcggagctattgcaggcgcagccagtgtctttggaaacactcctctggatgtgattaagacccggatgcagggcctggaggcgcacaaataccggaacacgtgggactgcggcttgcagatcctgaagaaggaggggctcaaggcattctacaagggcactgtcccccgcctgggccgggtctgcctggatgtggccatagtgtttgtcatctatgatgaagtggtgaagctgctcaacaaagtgtggaagacggactaagcctagagaggccgcaaggggaccgccccaggcaccgccagagtgtcctgctacctttgtctcacatgattccagtgcagtagtgccaaaaggccccttcccacgtccctcgagctctgtagcctggtctgtgcattgtggctgtcaaatccatgtgtcccccctgtggtctgtgtgtgacaccaccactgtgtcccagtgtctggcccagccatggctggatgtgcatctggcctatgaccctgtgcctgtgtttcatgttctgtgtcacgtgaccctgtgccccgcctcccggggtgcccgtgtggcctgggtcctcggccctgtagccctggcccggtcccagtccggtgccttccaccctgccctggcctaccacagctgcctccgggcctcggcctggcttcaccgcattccaggggctgcagccccctgcttctcccgccattggccttaactggccctcgggccctctctccgccccggacagggtggcacccaccactctcaggaccaccctgccaaggcagaataaaccggatcctgttgca

SEQ ID NO: 419153 - DNA, 2202 bp, Homo sapiens
cccagacaagctgcctaggagaatacagccgcttgcatttgtggtctttcctgaccttgttcgctgagcgcagaaactacaaccgggaaaggtgtgggtgggaaccggcaggtgaggcccggcccgtggctgctgcgggaggggggcccggcggcgtagccccttctcaccggcctcccgcctcccgcctccaggtttgaaacgttagagttcctctgggactgggctagccccacgtgttttcggggagggtgtgcccctggcctccgggatccctggggatcccgccgctctcgacagtcgcgcagacccgaggcccgctatcccgcggcgcggcacacagtgcaccttgacccactgctcggagctgggccacggctccgcctcccgcagccccgcccccgtcccgccgctcgcggtcgcccagggactcggcctcggccattggctgcgctttggccccgcccctacgcctgcctcggcgcgccccgcccaggcctcagtttcccggcccgcacggggcgggctgggggcggggcctggctcggaccacgcggggcgggacctggagctgacgcggccgccccgcccctgggaccataaccggccgccgccgccaccgcggaccgagcgcggagttctggagtctcggacccgaagccgccacagggcgccccgcctcccgcccgccatgcccgcgccccgcgccccgcgcgctctggcggccgccgcgcccgcgtccgggaaggccaagctgacgcacccggggaaggcgatcctggcaggcggcctggcgggtggcatcgagatctgcatcaccttccccaccgagtacgtgaagacgcagctgcagctggacgagcgctcgcacccgccgcggtaccggggcatcggggactgcgtgcggcagacggttcgcagccatggcgtcctgggcctgtaccgcggccttagctccctgctctacggttccatccccaaggcggccgtcaggtttggaatgttcgagttcctcagcaaccacatgcgggatgcccagggacggctggacagcacgcgtgggctgctgtgcggcctgggcgctggcgtggccgaggccgtggtggtcgtgtgccccatggagaccatcaaggtgaagttcatccacgaccagacctccccaaaccccaagtacagaggattcttccacggggttagggagattgtgcgggaacaagggctgaaggggacgtaccagggcctcacagccactgtcctgaagcagggctcgaaccaggccatccgcttcttcgtcatgacctccctgcgcaactggtaccgaggggacaaccccaacaagcccatgaaccctctgatcactggggtcttcggagctattgcaggcgcagccagtgtctttggaaacactcctctggatgtgattaagacccggatgcagggcctggaggcgcacaaataccggaacacgtgggactgcggcttgcagatcctgaagaaggaggggctcaaggcattctacaagggcactgtcccccgcctgggccgggtctgcctggatgtggccatagtgtttgtcatctatgatgaagtggtgaagctgctcaacaaagtgtggaagacggactaagcctagagaggccgcaaggggaccgccccaggcaccgccagagtgtcctgctacctttgtctcacatgattccagtgcagtagtgccaaaaggccccttcccacgtccctcgagctctgtagcctggtctgtgcattgtggctgtcaaatccatgtgtcccccctgtggtctgtgtgtgacaccaccactgtgtcccagtgtctggcccagccatggctggatgtgcatctggcctatgaccctgcacttgtccatgtgcttactgtgatgcctgtgtttcatgttctgtgtcacgtgaccctgtgccccgcctcccggggtgcccgtgtggcctgggtcctcggccctgtagccctggcccggtcccagtccggtgccttccaccctgccctggcctaccacagctgcctccgggcctcggcctggcttcaccgcattccaggggctgcagccccctgcttctcccgccattggccttaactggccctcgggccctctctccgccccggacagggtggcacccaccactctcaggaccaccctgccaaggcagaataaaccggatcctgttgca

SEQ ID NO: 419154 - DNA, 1664 bp, Homo sapiens
ggccccacttccgggttgggccgtgggctggggagtcgtggaggcgcggtcctggtccccacccggcgcgctgggactcgcccgcctcccgtctgtcaccccctgcgcctcgccgggacaacggggtgagggcatgggggcgtggggccccagcctatgttccccgcggcactggcgcggcggccgcgccgaccgaagtccgggacgggggaggggcccgagcgccagcggccgggcgggagtctcaggagcgggttcccggtccctgcaggcggcctggcgggtggcatcgagatctgcatcaccttccccaccgagtacgtgaagacgcagctgcagctggacgagcgctcgcacccgccgcggtaccggggcatcggggactgcgtgcggcagacggttcgcagccatggcgtcctgggcctgtaccgcggccttagctccctgctctacggttccatccccaaggcggccgtcaggtttggaatgttcgagttcctcagcaaccacatgcgggatgcccagggacggctggacagcacgcgtgggctgctgtgcggcctgggcgctggcgtggccgaggccgtggtggtcgtgtgccccatggagaccatcaaggtgaagttcatccacgaccagacctccccaaaccccaagtacagaggattcttccacggggttagggagattgtgcgggaacaagggctgaaggggacgtaccagggcctcacagccactgtcctgaagcagggctcgaaccaggccatccgcttcttcgtcatgacctccctgcgcaactggtaccgaggggacaaccccaacaagcccatgaaccctctgatcactggggtcttcggagctattgcaggcgcagccagtgtctttggaaacactcctctggatgtgattaagacccggatgcagggcctggaggcgcacaaataccggaacacgtgggactgcggcttgcagatcctgaagaaggaggggctcaaggcattctacaagggcactgtcccccgcctgggccgggtctgcctggatgtggccatagtgtttgtcatctatgatgaagtggtgaagctgctcaacaaagtgtggaagacggactaagcctagagaggccgcaaggggaccgccccaggcaccgccagagtgtcctgctacctttgtctcacatgattccagtgcagtagtgccaaaaggccccttcccacgtccctcgagctctgtagcctggtctgtgcattgtggctgtcaaatccatgtgtcccccctgtggtctgtgtgtgacaccaccactgtgtcccagtgtctggcccagccatggctggatgtgcatctggcctatgaccctgtgcctgtgtttcatgttctgtgtcacgtgaccctgtgccccgcctcccggggtgcccgtgtggcctgggtcctcggccctgtagccctggcccggtcccagtccggtgccttccaccctgccctggcctaccacagctgcctccgggcctcggcctggcttcaccgcattccaggggctgcagccccctgcttctcccgccattggccttaactggccctcgggccctctctccgccccggacagggtggcacccaccactctcaggaccaccctgccaaggcagaataaaccggatcctgttgca

SEQ ID NO: 419155 - DNA, 2261 bp, Homo sapiens
cccagacaagctgcctaggagaatacagccgcttgcatttgtggtctttcctgaccttgttcgctgagcgcagaaactacaaccgggaaaggtgtgggtgggaaccggcaggtgaggcccggcccgtggctgctgcgggaggggggcccggcggcgtagccccttctcaccggcctcccgcctcccgcctccaggtttgaaacgttagagttcctctgggactgggctagccccacgtgttttcggggagggtgtgcccctggcctccgggatccctggggatcccgccgctctcgacagtcgcgcagacccgaggcccgctatcccgcggcgcggcacacagtgcaccttgacccactgctcggagctgggccacggctccgcctcccgcagccccgcccccgtcccgccgctcgcggtcgcccagggactcggcctcggccattggctgcgctttggccccgcccctacgcctgcctcggcgcgccccgcccaggcctcagtttcccggcccgcacggggcgggctgggggcggggcctggctcggaccacgcggggcgggacctggagctgacgcggccgccccgcccctgggaccataaccggccgccgccgccaccgcggaccgagcgcggagttctggagtctcggacccgaagccgccacagggcgccccgcctcccgcccgccatgcccgcgccccgcgccccgcgcgctctggcggccgccgcgcccgcgtccgggaaggccaagctgacgcacccggggaaggcgatcctggcaggcggcctggcgggtggcatcgagatctgcatcaccttccccaccgagtacgtgaagacgcagctgcagctggacgagcgctcgcacccgccgcggtaccggggcatcggggactgcgtgcggcagacggttcgcagccatggcgtcctgggcctgtaccgcggccttagctccctgctctacggttccatccccaaggcggccgtcaggtttggaatgttcgagttcctcagcaaccacatgcgggatgcccagggacggctggacagcacgcgtgggctgctgtgcggcctgggcgctggcgtggccgaggccgtggtggtcgtgtgccccatggagaccatcaaggtgaagttcatccacgaccagacctccccaaaccccaagtacagaggattcttccacggggttagggagattgtgcgggaacaagggctgaaggggacgtaccagggcctcacagccactgtcctgaagcagggctcgaaccaggccatccgcttcttcgtcatgacctccctgcgcaactggtaccgaggggacaaccccaacaagcccatgaaccctctgatcactggggtcttcggagctattgcaggcgcagccagtgtctttggaaacactcctctggatgtgattaagacccggatgcaggtggtggggccgggaaggggaggggaaggggggaccaggccagagctagctgctgagcccctgcctgctgatgtcccccatagggcctggaggcgcacaaataccggaacacgtgggactgcggcttgcagatcctgaagaaggaggggctcaaggcattctacaagggcactgtcccccgcctgggccgggtctgcctggatgtggccatagtgtttgtcatctatgatgaagtggtgaagctgctcaacaaagtgtggaagacggactaagcctagagaggccgcaaggggaccgccccaggcaccgccagagtgtcctgctacctttgtctcacatgattccagtgcagtagtgccaaaaggccccttcccacgtccctcgagctctgtagcctggtctgtgcattgtggctgtcaaatccatgtgtcccccctgtggtctgtgtgtgacaccaccactgtgtcccagtgtctggcccagccatggctggatgtgcatctggcctatgaccctgtgcctgtgtttcatgttctgtgtcacgtgaccctgtgccccgcctcccggggtgcccgtgtggcctgggtcctcggccctgtagccctggcccggtcccagtccggtgccttccaccctgccctggcctaccacagctgcctccgggcctcggcctggcttcaccgcattccaggggctgcagccccctgcttctcccgccattggccttaactggccctcgggccctctctccgccccggacagggtggcacccaccactctcaggaccaccctgccaaggcagaataaaccggatcctgttgca

SEQ ID NO: 419156 - DNA, 2039 bp, Homo sapiens
cccagacaagctgcctaggagaatacagccgcttgcatttgtggtctttcctgaccttgttcgctgagcgcagaaactacaaccgggaaaggtgtgggtgggaaccggcaggtgaggcccggcccgtggctgctgcgggaggggggcccggcggcgtagccccttctcaccggcctcccgcctcccgcctccaggtttgaaacgttagagttcctctgggactgggctagccccacgtgttttcggggagggtgtgcccctggcctccgggatccctggggatcccgccgctctcgacagtcgcgcagacccgaggcccgctatcccgcggcgcggcacacagtgcaccttgacccactgctcggagctgggccacggctccgcctcccgcagccccgcccccgtcccgccgctcgcggtcgcccagggactcggcctcggccattggctgcgctttggccccgcccctacgcctgcctcggcgcgccccgcccaggcctcagtttcccggcccgcacggggcgggctgggggcggggcctggctcggaccacgcggggcgggacctggagctgacgcggccgccccgcccctgggaccataaccggccgccgccgccaccgcggaccgagcgcggagttctggagtctcggacccgaagccgccacagggcgccccgcctcccgcccgccatgcccgcgccccgcgccccgcgcgctctggcggccgccgcgcccgcgtccgggaaggccaagctgacgcacccggggaaggcgatcctggcaggcggcctggcgggtggcatcgagatctgcatcaccttccccaccgagtacgtgaagacgcagctgcagctggacgagcgctcgcacccgccgcggtaccggggcatcggggactgcgtgcggcagacggttcgcagccatggcgtcctgggcctgtaccgcggccttagctccctgctctacggttccatccccaaggcggccgtcaggtgaagttcatccacgaccagacctccccaaaccccaagtacagaggattcttccacggggttagggagattgtgcgggaacaagggctgaaggggacgtaccagggcctcacagccactgtcctgaagcagggctcgaaccaggccatccgcttcttcgtcatgacctccctgcgcaactggtaccgaggggacaaccccaacaagcccatgaaccctctgatcactggggtcttcggagctattgcaggcgcagccagtgtctttggaaacactcctctggatgtgattaagacccggatgcagggcctggaggcgcacaaataccggaacacgtgggactgcggcttgcagatcctgaagaaggaggggctcaaggcattctacaagggcactgtcccccgcctgggccgggtctgcctggatgtggccatagtgtttgtcatctatgatgaagtggtgaagctgctcaacaaagtgtggaagacggactaagcctagagaggccgcaaggggaccgccccaggcaccgccagagtgtcctgctacctttgtctcacatgattccagtgcagtagtgccaaaaggccccttcccacgtccctcgagctctgtagcctggtctgtgcattgtggctgtcaaatccatgtgtcccccctgtggtctgtgtgtgacaccaccactgtgtcccagtgtctggcccagccatggctggatgtgcatctggcctatgaccctgtgcctgtgtttcatgttctgtgtcacgtgaccctgtgccccgcctcccggggtgcccgtgtggcctgggtcctcggccctgtagccctggcccggtcccagtccggtgccttccaccctgccctggcctaccacagctgcctccgggcctcggcctggcttcaccgcattccaggggctgcagccccctgcttctcccgccattggccttaactggccctcgggccctctctccgccccggacagggtggcacccaccactctcaggaccaccctgccaaggcagaataaaccggatcctgttgca

SEQ ID NO: 419157 - DNA, 1543 bp, Homo sapiens
gctaaaggcagccttaaagtctttaaaaaatacttttataaagcagaaaacaaaatgacaccttcactgccaaaactggaaaagagcagcaaacataaagggagaggctgctcacagggctgccctgtgtcccagagcatggtccgtgtgggctgccctgtgtcccggggcatggtccgtgtgggcagcccagggcggccttggctgcactgcttcctggggaagagttcccagttccctccaccctggatgggccctgggcctgccagctagccaggacccacccaggtggcagccgagaacctgcgcctttgcttctctctctcaggtgaagttcatccacgaccagacctccccaaaccccaagtacagaggattcttccacggggttagggagattgtgcgggaacaaggtgagccactcgaccttcctgatagggctcagggacctgggccagggtgggaagggcctgcacctcccatcctgccttgggctttgtgcaacacccaccccccacacacaccaattcccaaccggggcctgagaggctgcagggtaaccccgtgcctgccttcccgcagggctgaaggggacgtaccagggcctcacagccactgtcctgaagcagggctcgaaccaggccatccgcttcttcgtcatgacctccctgcgcaactggtaccgaggggacaaccccaacaagcccatgaaccctctgatcactggggtcttcggagctattgcaggcgcagccagtgtctttggaaacactcctctggatgtgattaagacccggatgcagggcctggaggcgcacaaataccggaacacgtgggactgcggcttgcagatcctgaagaaggaggggctcaaggcattctacaagggcactgtcccccgcctgggccgggtctgcctggatgtggccatagtgtttgtcatctatgatgaagtggtgaagctgctcaacaaagtgtggaagacggactaagcctagagaggccgcaaggggaccgccccaggcaccgccagagtgtcctgctacctttgtctcacatgattccagtgcagtagtgccaaaaggccccttcccacgtccctcgagctctgtagcctggtctgtgcattgtggctgtcaaatccatgtgtcccccctgtggtctgtgtgtgacaccaccactgtgtcccagtgtctggcccagccatggctggatgtgcatctggcctatgaccctgtgcctgtgtttcatgttctgtgtcacgtgaccctgtgccccgcctcccggggtgcccgtgtggcctgggtcctcggccctgtagccctggcccggtcccagtccggtgccttccaccctgccctggcctaccacagctgcctccgggcctcggcctggcttcaccgcattccaggggctgcagccccctgcttctcccgccattggccttaactggccctcgggccctctctccgccccggacagggtggcacccaccactctcaggaccaccctgccaaggcagaataaaccggatcctgttgca

SEQ ID NO: 419158 - DNA, 733 bp, Homo sapiens
cttcatcatagatgacaaacactatggccacatccaggcagatcctgaagaaggaggggctcaaggcattctacaagggcactgtcccccgcctgggccgggtctgcctggatgtggccatagtgtttgtcatctatgatgaagtggtgaagctgctcaacaaagtgtggaagacggactaagcctagagaggccgcaaggggaccgccccaggcaccgccagagtgtcctgctacctttgtctcacatgattccagtgcagtagtgccaaaaggccccttcccacgtccctcgagctctgtagcctggtctgtgcattgtggctgtcaaatccatgtgtcccccctgtggtctgtgtgtgacaccaccactgtgtcccagtgtctggcccagccatggctggatgtgcatctggcctatgaccctgtgcctgtgtttcatgttctgtgtcacgtgaccctgtgccccgcctcccggggtgcccgtgtggcctgggtcctcggccctgtagccctggcccggtcccagtccggtgccttccaccctgccctggcctaccacagctgcctccgggcctcggcctggcttcaccgcattccaggggctgcagccccctgcttctcccgccattggccttaactggccctcgggccctctctccgccccggacagggtggcacccaccactctcaggaccaccctgccaaggcagaataaaccggatcctgttgca

SEQ ID NO: 419159 - DNA, 824 bp, Homo sapiens
  misc_feature (687)..(687): n is a, c, g, or t
  misc_feature (699)..(699): n is a, c, g, or t
  misc_feature (701)..(701): n is a, c, g, or t
  misc_feature (706)..(706): n is a, c, g, or t
  misc_feature (712)..(713): n is a, c, g, or t
ggccccacttccgggttgggccgtgggctggggagtcgtggaggcgcggtcctggtccccacccggcgcgctgggactcgcccgcctcccgtctgtcaccccctgcgcctcgccgggacaacggggtgagggcatgggggcgtggggccccagcctatgttccccgcggcactggcgcggcggccgcgccgaccgaagtccgggacgggggaggggcccgagcgccagcggccgggcgggagtctcaggagcgggttcccggtccctgcaggcggcctggcgggtggcatcgagatctgcatcaccttccccaccgagtacgtgaagacgcagctgcagctggacgagcgctcgcacccgccgcggtaccggggcatcggtgaagttcatccacgaccagacctccccaaaccccaagtacagaggattcttccacggggttagggagattgtgcgggaacaagggctgaaggggacgtaccagggcctcacagccactgtcctgaagcagggctcgaaccaggccatccgcttcttcgtcatgacctccctgcgcaactggtaccgaggggacaaccccaacaagcccatgaaccctctgatcactggggtcttcggagctattgcaggcgcagccagtgtctttggaaacactcctctggatgtgattaagacccggatgcaggncgcggcgccaantnccggnacacgnnggactgggctgacattctgagaaaggggggccaaatctcaagggctgtccccgctgggcgggttgcccggttggcaagagttgccactatagacggggggctccacacggg

SEQ ID NO: 419160 - DNA, 2369 bp, Homo sapiens
cccagacaagctgcctaggagaatacagccgcttgcatttgtggtctttcctgaccttgttcgctgagcgcagaaactacaaccgggaaaggtgtgggtgggaaccggcaggtgaggcccggcccgtggctgctgcgggaggggggcccggcggcgtagccccttctcaccggcctcccgcctcccgcctccaggtttgaaacgttagagttcctctgggactgggctagccccacgtgttttcggggagggtgtgcccctggcctccgggatccctggggatcccgccgctctcgacagtcgcgcagacccgaggcccgctatcccgcggcgcggcacacagtgcaccttgacccactgctcggagctgggccacggctccgcctcccgcagccccgcccccgtcccgccgctcgcggtcgcccagggactcggcctcggccattggctgcgctttggccccgcccctacgcctgcctcggcgcgccccgcccaggcctcagtttcccggcccgcacggggcgggctgggggcggggcctggctcggaccacgcggggcgggacctggagctgacgcggccgccccgcccctgggaccataaccggccgccgccgccaccgcggaccgagcgcggagttctggagtctcggacccgaagccgccacagggcgccccgcctcccgcccgccatgcccgcgccccgcgccccgcgcgctctggcggccgccgcgcccgcgtccgggaaggccaagctgacgcacccggggaaggcgatcctggcaggcggcctggcgggtggcatcgagatctgcatcaccttccccaccgagtacgtgaagacgcagctgcagctggacgagcgctcgcacccgccgcggtaccggggcatcggggactgcgtgcggcagacggttcgcagccatggcgtcctgggcctgtaccgcggccttagctccctgctctacggttccatccccaaggcggccgtcaggtttggaatgttcgagttcctcagcaaccacatgcgggatgcccagggacggctggacagcacgcgtgggctgctgtgcggcctgggcgctggcgtggccgaggccgtggtggtcgtgtgccccatggagaccatcaaggtgaagttcatccacgaccagacctccccaaaccccaagtacagaggattcttccacggggttagggagattgtgcgggaacaagggctgaaggggacgtaccagggcctcacagccactgtcctgaagcagggctcgaaccaggccatccgcttcttcgtcatgacctccctgcgcaactggtaccgaggggacaaccccaacaagcccatgaaccctctgatcactggggtcttcggagctattgcaggcgcagccagtgtctttggaaacactcctctggatgtgattaagacccggatgcagggcctggaggcgcacaaataccggaacacgtgggactgcggcttgcagatcctgaagaaggaggggctcaaggcattctacaagggcactgtcccccgcctgggccgggtctgcctggatgtggccatagtgtttgtcatctatgatgaagtggtgaagctgctcaacaaagtgtggaagacggactaagcctagagaggccgcaaggggaccgccccaggcaccgccagagtgtcctgctacctttgtctcacatgattccagtgcagtagtgccaaaaggccccttcccacgtccctcgagctctgtagcctggtctgtgcattgtggctgtcaaatccatgtgtcccccctgtggtctgtgtgtgacaccaccactgtgtcccagtgtctggcccagccatggctggatgtgcatctggcctatgaccctgtgcctgtgtttcatgttctgtgtcacgtgaccctgtgccccgcctcccggggtgcccgtgtggcctgggtcctcggccctgtagccctggcccggtcccagtccggtgccttccaccctgccctggcctaccacagctgcctccgggcctcggcctggcttcaccgcattccaggggctgcagccccctgcttctcccgccattggccttaactggccctcgggccctctctccgccccggacagggtggcacccaccactctcaggaccaccctgccaaggcagaataaaccggatcctgttgcaaaaaaaaaaaaaaaaaaaaaaaaaaaaaaaaaaaaaaaaaaaacacaaaaacaaaaaaacaaaaaaagaaaacaaagaaaacaaaaaacacacagaaaaaaaaaacagacaagaacaacaacaacaaaaaaaaaagaaagagaggggggcaacagaaaaatatcaccggagaggacgccataaaaggacac

SEQ ID NO: 419161 - DNA, 1518 bp, Homo sapiens
ggccccacttccgggttgggccgtgggctggggagtcgtggaggcgcggtcctggtccccacccggcgcgctgggactcgcccgcctcccgtctgtcaccccctgcgcctcgccgggacaacggggcggcctggcgggtggcatcgagatctgcatcaccttccccaccgagtacgtgaagacgcagctgcagctggacgagcgctcgcacccgccgcggtaccggggcatcggggactgcgtgcggcagacggttcgcagccatggcgtcctgggcctgtaccgcggccttagctccctgctctacggttccatccccaaggcggccgtcaggtttggaatgttcgagttcctcagcaaccacatgcgggatgcccagggacggctggacagcacgcgtgggctgctgtgcggcctgggcgctggcgtggccgaggccgtggtggtcgtgtgccccatggagaccatcaaggtgaagttcatccacgaccagacctccccaaaccccaagtacagaggattcttccacggggttagggagattgtgcgggaacaagggctgaaggggacgtaccagggcctcacagccactgtcctgaagcagggctcgaaccaggccatccgcttcttcgtcatgacctccctgcgcaactggtaccgaggggacaaccccaacaagcccatgaaccctctgatcactggggtcttcggagctattgcaggcgcagccagtgtctttggaaacactcctctggatgtgattaagacccggatgcagggcctggaggcgcacaaataccggaacacgtgggactgcggcttgcagatcctgaagaaggaggggctcaaggcattctacaagggcactgtcccccgcctgggccgggtctgcctggatgtggccatagtgtttgtcatctatgatgaagtggtgaagctgctcaacaaagtgtggaagacggactaagcctagagaggccgcaaggggaccgccccaggcaccgccagagtgtcctgctacctttgtctcacatgattccagtgcagtagtgccaaaaggccccttcccacgtccctcgagctctgtagcctggtctgtgcattgtggctgtcaaatccatgtgtcccccctgtggtctgtgtgtgacaccaccactgtgtcccagtgtctggcccagccatggctggatgtgcatctggcctatgaccctgtgcctgtgtttcatgttctgtgtcacgtgaccctgtgccccgcctcccggggtgcccgtgtggcctgggtcctcggccctgtagccctggcccggtcccagtccggtgccttccaccctgccctggcctaccacagctgcctccgggcctcggcctggcttcaccgcattccaggggctgcagccccctgcttctcccgccattggccttaactggccctcgggccctctctccgccccggacagggtggcacccaccactctcaggaccaccctgccaaggcagaataaaccggatcctgttgca

SEQ ID NO: 419162 - DNA, 2315 bp, Homo sapiens
cccagacaagctgcctaggagaatacagccgcttgcatttgtggtctttcctgaccttgttcgctgagcgcagaaactacaaccgggaaaggtgtgggtgggaaccggcaggtgaggcccggcccgtggctgctgcgggaggggggcccggcggcgtagccccttctcaccggcctcccgcctcccgcctccaggtttgaaacgttagagttcctctgggactgggctagccccacgtgttttcggggagggtgtgcccctggcctccgggatccctggggatcccgccgctctcgacagtcgcgcagacccgaggcccgctatcccgcggcgcggcacacagtgcaccttgacccactgctcggagctgggccacggctccgcctcccgcagccccgcccccgtcccgccgctcgcggtcgcccagggactcggcctcggccattggctgcgctttggccccgcccctacgcctgcctcggcgcgccccgcccaggcctcagtttcccggcccgcacggggcgggctgggggcggggcctggctcggaccacgcggggcgggacctggagctgacgcggccgccccgcccctgggaccataaccggccgccgccgccaccgcggaccgagcgcggagttctggagtctcggacccgaagccgccacagggcgccccgcctcccgcccgccatgcccgcgccccgcgccccgcgcgctctggcggccgccgcgcccgcgtccgggaaggccaagctgacgcacccggggaaggcgatcctggcaggcggcctggcgggtggcatcgagatctgcatcaccttccccaccgagtacgtgaagacgcagctgcagctggacgagcgctcgcacccgccgcggtaccggggcatcggggactgcgtgcggcagacggttcgcagccatggcgtcctgggcctgtaccgcggccttagctccctgctctacggttccatccccaaggcggccgtcaggtttggaatgttcgagttcctcagcaaccacatgcgggatgcccagggacggctggacagcacgcgtgggctgctgtgcggcctgggcgctggcgtggccgaggccgtggtggtcgtgtgccccatggagaccatcaaggtgaagttcatccacgaccagacctccccaaaccccaagtacagaggattcttccacggggttagggagattgtgcgggaacaagggctgaaggggacgtaccagggcctcacagccactgtcctgaagcagggctcgaaccaggccatccgcttcttcgtcatgacctccctgcgcaactggtaccgaggggacaaccccaacaagcccatgaaccctctgatcactggggtcttcggagctattgcaggcgcagccagtgtctttggaaacactcctctggatgtgattaagacccggatgcagggcctggaggcgcacaaataccggaacacgtgggactgcggcttgcagatcctgaagaaggaggggctcaaggcattctacaagggcactgtcccccgcctgggccgggtctgcctggatgtggccatagtgtttgtcatctatgatgaagtggtgaagctgctcaacaaagtgtggaagacggactaagcctagagaggccgcaaggggaccgccccaggcaccgccagagtgtcctgctacctttgtctcacatgattccagtgcagtagtgccctgtcaaatccatgtgtcccccctgtggtctgtgtgtgacaccaccactgtgtcccagtgtctggcccagccatggctggatgtgcatctggcctatgaccctgtgcctgtgtttcatgttctgtgtcacgtgaccctgtgccccgcctcccggggtgcccgtgtggcctgggtcctcggccctgtagccctggcccggtcccagtccggtgccttccaccctgccctggcctaccacagctgcctccgggcctcggcctggcttcaccgcattccaggggctgcagccccctgcttctcccgccattggccttaactggccctcgggccctctctccgccccggacagggtggcacccaccactctcaggaccaccctgccaaggcagaataaaccggatcctgttgcaaaaaaaaaaaaaaaaaaaaaaaaaaaaaaaaaaaaaaaaaaaacacaaaaacaaaaaaacaaaaaaagaaaacaaagaaaacaaaaaacacacagaaaaaaaaaacagacaagaacaacaacaacaaaaaaaaaagaaagagaggggggcaacagaaaaatatcaccggagaggacgccataaaaggacac

SEQ ID NO: 419163 - DNA, 2354 bp, Homo sapiens
cccagacaagctgcctaggagaatacagccgcttgcatttgtggtctttcctgaccttgttcgctgagcgcagaaactacaaccgggaaaggtgtgggtgggaaccggcaggtgaggcccggcccgtggctgctgcgggaggggggcccggcggcgtagccccttctcaccggcctcccgcctcccgcctccaggtttgaaacgttagagttcctctgggactgggctagccccacgtgttttcggggagggtgtgcccctggcctccgggatccctggggatcccgccgctctcgacagtcgcgcagacccgaggcccgctatcccgcggcgcggcacacagtgcaccttgacccactgctcggagctgggccacggctccgcctcccgcagccccgcccccgtcccgccgctcgcggtcgcccagggactcggcctcggccattggctgcgctttggccccgcccctacgcctgcctcggcgcgccccgcccaggcctcagtttcccggcccgcacggggcgggctgggggcggggcctggctcggaccacgcggggcgggacctggagctgacgcggccgccccgcccctgggaccataaccggccgccgccgccaccgcggaccgagcgcggagttctggagtctcggacccgaagccgccacagggcgccccgcctcccgcccgccatgcccgcgccccgcgccccgcgcgctctggcggccgccgcgcccgcgtccgggaaggccaagctgacgcacccggggaaggcgatcctggcaggcggcctggcgggtggcatcgagatctgcatcaccttccccaccgagtacgtgaagacgcagctgcagctggacgagcgctcgcacccgccgcggtaccggggcatcggggactgcgtgcggcagacggttcgcagccatggcgtcctgggcctgtaccgcggccttagctccctgctctacggttccatccccaaggcggccgtcaggtttggaatgttcgagttcctcagcaaccacatgcgggatgcccagggacggctggacagcacgcgtgggctgctgtgcggcctgggcgctggcgtggccgaggccgtggtggtcgtgtgccccatggagaccatcaaggtgaagttcatccacgaccagacctccccaaaccccaagtacagaggattcttccacggggttagggagattgtgcgggaacaagggctgaaggggacgtaccagggcctcacagccactgtcctgaagcagggctcgaaccaggccatccgcttcttcgtcatgacctccctgcgcaactggtaccgaggggacaaccccaacaagcccatgaaccctctgatcactggggtcttcggagctattgcaggcgcagccagtgtctttggaaacactcctctggatgtgattaagacccggatgcagggcctggaggcgcacaaataccggaacacgtgggactgcggcttgcagatcctgaagaaggaggggctcaaggcgtgagtgggggaggggcagggctattgtccccacctcaaacctttcccggcctacctggcctgcccactctgtccccttcaggcctctgtgcctctcacttcagtatctggggattgccctgtgcagggacactgtgctgacctgccttcctctccccgcccctcctcccacccagattctacaagggcactgtcccccgcctgggccgggtctgcctggatgtggccatagtgtttgtcatctatgatgaagtggtgaagctgctcaacaaagtgtggaagacggactaagcctagagaggccgcaaggggaccgccccaggcaccgccagagtgtcctgctacctttgtctcacatgattccagtgcagtagtgccaaaaggccccttcccacgtccctcgagctctgtagcctggtctgtgcattgtggctgtcaaatccatgtgtcccccctgtggtctgtgtgtgacaccaccactgtgtcccagtgtctggcccagccatggctggatgtgcatctggcctatgaccctgtgcctgtgtttcatgttctgtgtcacgtgaccctgtgccccgcctcccggggtgcccgtgtggcctgggtcctcggccctgtagccctggcccggtcccagtccggtgccttccaccctgccctggcctaccacagctgcctccgggcctcggcctggcttcaccgcattccaggggctgcagccccctgcttctcccgccattggccttaactggccctcgggccctctctccgccccggacagggtggcacccaccactctcaggaccaccctgccaaggcagaataaaccggatcctgttgca

SEQ ID NO: 419164 - DNA, 2269 bp, Homo sapiens
cccagacaagctgcctaggagaatacagccgcttgcatttgtggtctttcctgaccttgttcgctgagcgcagaaactacaaccgggaaaggtgtgggtgggaaccggcaggtgaggcccggcccgtggctgctgcgggaggggggcccggcggcgtagccccttctcaccggcctcccgcctcccgcctccaggtttgaaacgttagagttcctctgggactgggctagccccacgtgttttcggggagggtgtgcccctggcctccgggatccctggggatcccgccgctctcgacagtcgcgcagacccgaggcccgctatcccgcggcgcggcacacagtgcaccttgacccactgctcggagctgggccacggctccgcctcccgcagccccgcccccgtcccgccgctcgcggtcgcccagggactcggcctcggccattggctgcgctttggccccgcccctacgcctgcctcggcgcgccccgcccaggcctcagtttcccggcccgcacggggcgggctgggggcggggcctggctcggaccacgcggggcgggacctggagctgacgcggccgccccgcccctgggaccataaccggccgccgccgccaccgcggaccgagcgcggagttctggagtctcggacccgaagccgccacagggcgccccgcctcccgcccgccatgcccgcgccccgcgccccgcgcgctctggcggccgccgcgcccgcgtccgggaaggccaagctgacgcacccggggaaggcgatcctggcaggcggcctggcgggtggcatcgagatctgcatcaccttccccaccgagtacgtgaagacgcagctgcagctggacgagcgctcgcacccgccgcggtaccggggcatcggtgaggagggggaggccgcggcgccgcggggggcgggtacccagggcggcggcaccgagggccgtggggtcctgaccgccccctcccccaggggactgcgtgcggcagacggttcgcagccatggcgtcctgggcctgtaccgcggccttagctccctgctctacggttccatccccaaggcggccgtcaggtttggaatgttcgagttcctcagcaaccacatgcgggatgcccagggacggctggacagcacgcgtgggctgctgtgcggcctgggcgctggcgtggccgaggccgtggtggtcgtgtgccccatggagaccatcaaggtgaagttcatccacgaccagacctccccaaaccccaagtacagaggattcttccacggggttagggagattgtgcgggaacaagggctgaaggggacgtaccagggcctcacagccactgtcctgaagcagggctcgaaccaggccatccgcttcttcgtcatgacctccctgcgcaactggtaccgaggggacaaccccaacaagcccatgaaccctctgatcactggggtcttcggagctattgcaggcgcagccagtgtctttggaaacactcctctggatgtgattaagacccggatgcagggcctggaggcgcacaaataccggaacacgtgggactgcggcttgcagatcctgaagaaggaggggctcaaggcattctacaagggcactgtcccccgcctgggccgggtctgcctggatgtggccatagtgtttgtcatctatgatgaagtggtgaagctgctcaacaaagtgtggaagacggactaagcctagagaggccgcaaggggaccgccccaggcaccgccagagtgtcctgctacctttgtctcacatgattccagtgcagtagtgccaaaaggccccttcccacgtccctcgagctctgtagcctggtctgtgcattgtggctgtcaaatccatgtgtcccccctgtggtctgtgtgtgacaccaccactgtgtcccagtgtctggcccagccatggctggatgtgcatctggcctatgaccctgtgcctgtgtttcatgttctgtgtcacgtgaccctgtgccccgcctcccggggtgcccgtgtggcctgggtcctcggccctgtagccctggcccggtcccagtccggtgccttccaccctgccctggcctaccacagctgcctccgggcctcggcctggcttcaccgcattccaggggctgcagccccctgcttctcccgccattggccttaactggccctcgggccctctctccgccccggacagggtggcacccaccactctcaggaccaccctgccaaggcagaataaaccggatcctgttgca

SEQ ID NO: 419165 - DNA, 2425 bp, Homo sapiens
gggagctgtcccggtgccgacccgcgagcttcccggcgtgctccgcgccctcccgcaactacttccggggcgggtgccgggggcggtgccccggcgagggagcgtggcggcgagctgtttgggggggttggcgacggcagcccgagggcggcgcaaggcctgaggcccagcacaggccaggtgcagtggctcacgcctatatttccaggactttgagaggctgaggcgggcggatcacctgagtgatgtccgagctcagcgatgaagccagcgagccggaactcctgaaccgcagcttgtccatgtggcacgggctcgggacacaggtcagcggggaggagctggatgtccccctggatcttcacacagctgcttccattggccagtatgaagtggtgaaggagtgtgtgcagcgcaaggtgcagagctagaaatgaaagacatccagggctggacagccctcttccactgtaccagcgccgggcaccagcacatggtcaggttcctcttggacagtggagccaatgccaacgtgagggagccgatatgtggatttactcccttgatggaagcagctgctgctggccatgagataatcgtgcagtattttctgaatcacggagtcaaggtggacgcgagagaccacagtggagccacagcccggatgctggccaagcagtacggacacatgaagatcgtggccttgatggacacttactcgccctctctgcccaagagcctctatcggagcccagaaaagtacgaagatctgagctcttctgacgagtcctgccctgctcctcagagacagaggccttgccggaagaagggtgtcagcatccacgagggaccgcgagccctggccaggatcacaggcattggcctgggcggcagagccccacggcctcgctatgagcaggctcctccccgtggctatgtcaccttcaacagcagtggcgagaaccccctggaagaagagggcctctgctgccgggatgtcacctcccccatcaatgagcgggatgtggagagcagcagcagcagcagcagtcgggaggaacatgctttctgtgccaacctggggcccgtccagagcagcagcagcagcgagggcctggccagagcccaggggctcagcagcgaagcttctgtggagagcaacgaggactcggatcatgcctgtaaaagctcagctcgcaaacaagctaaaagttacatgaagaccaagaatcctgacagccagtggcctccccgcactgcaactgacagggaaggctttctcgctgagtccagcccccagactcagagggccccctactcaggaccccaggaccttgccgcactgctggagcagatcgggtgtctgaagtacctgcaggtgtttgaggagcaggacgtggacctccgcatctttctgaccctcactgagagcgacctgaaggaaattggcatcacgctgtttgggcccaagaggaagatgacgtccgccattgcccgctggcacagcagtgcccgcccacccggggatgccctggagctggcctacgccgaccggctggaggctgagatgcaagagctcgccatccagctgcacaagcgctgcgaggaggtagaggccacgcggggccaggtgtgtcaggagcaggagctgcgcgccgtggtggagagctgcctgctggagcaggaccgcgcccgcgaggacctccaggcccggctgcgggagacgtgggccctggcccgggatgctgccctcgtcctggaccagctgcgagcctgtcaagctgagctgtcatctcgagtgaggcaggaccagccccctggtgcagccactctgggcctagccgtccccccagctgactccaagggctggcaagcgtccctgcaggccatgagcctccccgagctctcgggagccctggaggaccgtgtccgtgagatggggcaagcactgtgcttagtgacccagagcctggagaagctgcaggtgctgaacgggaagaagtggcgggagacctagcctgcgggccgaatctgacgttgggtgattggtccaccctgaagctgtgtgccagggagtgaggaggacagtgagcaggcagctgccatgtgcagcccaggcccagtgggggccagaggatcaggccccgggagcagccggcagacagaggcaagacgggggctgcggccctggctcggcagctcgggccagcactgaggcgggacgagggcctcacccagaacctcgtggtgaggcccagagttcatgggctgccctggcccataccaggcagggccctggggggaaagtgtatccatatacacgcacaggtgccaactgaggtgggaccttaggaatgaggactggggcacctggaaaatgccattttttggaaaataaaatttaagaacagctaaaaaaaaaaaa

SEQ ID NO: 419166 - DNA, 2063 bp, Homo sapiens
gggagctgtcccggtgccgacccgcgagcttcccggcgtgctccgcgccctcccgcaactacttccggggcgggtgccgggggcggtgccccggcgagggagcgtggcggcgagctgtttgggggggttggcgacggcagcccgagggcggcgcaaggcctgaggcccagcacagggagccgatatgtggatttactcccttgatggaagcagctgctgctggccatgagataatcgtgcagtattttctgaatcacggagtcaaggtggacgcgagagaccacagtggagccacagcccggatgctggccaagcagtacggacacatgaagatcgtggccttgatggacacttactcgccctctctgcccaagagcctctatcggagcccagaaaagtacgaagatctgagctcttctgacgagtcctgccctgctcctcagagacagaggccttgccggaagaagggtgtcagcatccacgagggaccgcgagccctggccaggatcacaggcattggcctgggcggcagagccccacggcctcgctatgagcaggctcctccccgtggctatgtcaccttcaacagcagtggcgagaaccccctggaagaagagggcctctgctgccgggatgtcacctcccccatcaatgagcgggatgtggagagcagcagcagcagcagcagtcgggaggaacatgctttctgtgccaacctggggcccgtccagagcagcagcagcagcgagggcctggccagagcccaggggctcagcagcgaagcttctgtggagagcaacgaggactcggatcatgcctgtaaaagctcagctcgcaaacaagctaaaagttacatgaagaccaagaatcctgacagccagtggcctccccgcactgcaactgacagggaaggctttctcgctgagtccagcccccagactcagagggccccctactcaggaccccaggaccttgccgcactgctggagcagatcgggtgtctgaagtacctgcaggtgtttgaggagcaggacgtggacctccgcatctttctgaccctcactgagagcgacctgaaggaaattggcatcacgctgtttgggcccaagaggaagatgacgtccgccattgcccgctggcacagcagtgcccgcccacccggggatgccctggagctggcctacgccgaccggctggaggctgagatgcaagagctcgccatccagctgcacaagcgctgcgaggaggtagaggccacgcggggccaggtgtgtcaggagcaggagctgcgcgccgtggtggagagctgcctgctggagcaggaccgcgcccgcgaggacctccaggcccggctgcgggagacgtgggccctggcccgggatgctgccctcgtcctggaccagctgcgagcctgtcaagctgagctgtcatctcgagtgaggcaggaccagccccctggtgcagccactctgggcctagccgtccccccagctgactccaagggctggcaagcgtccctgcaggccatgagcctccccgagctctcgggagccctggaggaccgtgtccgtgagatggggcaagcactgtgcttagtgacccagagcctggagaagctgcaggtgctgaacgggaagaagtggcgggagacctagcctgcgggccgaatctgacgttgggtgattggtccaccctgaagctgtgtgccagggagtgaggaggacagtgagcaggcagctgccatgtgcagcccaggcccagtgggggccagaggatcaggccccgggagcagccggcagacagaggcaagacgggggctgcggccctggctcggcagctcgggccagcactgaggcgggacgagggcctcacccagaacctcgtggtgaggcccagagttcatgggctgccctggcccataccaggcagggccctggggggaaagtgtatccatatacacgcacaggtgccaactgaggtgggaccttaggaatgaggactggggcacctggaaaatgccattttttggaaaataaaatttaagaacagctaaaaaaaaaaaa

SEQ ID NO: 419167 - DNA, 2434 bp, Homo sapiens
gggagctgtcccggtgccgacccgcgagcttcccggcgtgctccgcgccctcccgcaactacttccggggcgggtgccgggggcggtgccccggcgagggagcgtggcggcgagctgtttgggggggttggcgacggcagcccgagggcggcgcaaggcctgaggcccagcacagtgatgtccgagctcagcgatgaagccagcgagccggaactcctgaaccgcagcttgtccatgtggcacgggctcgggacacaggtcagcggggaggagctggatgtccccctggatcttcacacagctgcttccattggccagtatgaagtggtgaaggagtgtgtgcagcggagagagttagatttgaataagaagaatggtggtggctggaccccgctgatgtatgcctcctacattggccacgacacaatcgtgcacctgctgcttgaggcgggggtgagtgtgaatgtgccgaccccagaagggcagactccactgatgctggcctccagctgtggcaacgagagcatcgcctactttcttctccagggagccgatatgtggatttactcccttgatggaagcagctgctgctggccatgagataatcgtgcagtattttctgaatcacggagtcaaggtggacgcgagagaccacagtggagccacagcccggatgctggccaagcagtacggacacatgaagatcgtggccttgatggacacttactcgccctctctgcccaagagcctctatcggagcccagaaaagtacgaagatctgagctcttctgacgagtcctgccctgctcctcagagacagaggccttgccggaagaagggtgtcagcatccacgagggaccgcgagccctggccaggatcacaggcattggcctgggcggcagagccccacggcctcgctatgagcaggctcctccccgtggctatgtcaccttcaacagcagtggcgagaaccccctggaagaagagggcctctgctgccgggatgtcacctcccccatcaatgagcgggatgtggagagcagcagcagcagcagcagtcgggaggaacatgctttctgtgccaacctggggcccgtccagagcagcagcagcagcgagggcctggccagagcccaggggctcagcagcgaagcttctgtggagagcaacgaggactcggatcatgcctgtaaaagctcagctcgcaaacaagctaaaagttacatgaagaccaagaatcctgacagccagtggcctccccgcactgcaactgacagggaaggctttctcgctgagtccagcccccagactcagagggccccctactcaggaccccaggaccttgccgcactgctggagcagatcgggtgtctgaagtacctgcaggtgtttgaggagcaggacgtggacctccgcatctttctgaccctcactgagagcgacctgaaggaaattggcatcacgctgtttgggcccaagaggaagatgacgtccgccattgcccgctggcacagcagtgcccgcccacccggggatgccctggagctggcctacgccgaccggctggaggctgagatgcaagagctcgccatccagctgcacaagcgctgcgaggaggtagaggccacgcggggccaggtgtgtcaggagcaggagctgcgcgccgtggtggagagctgcctgctggagcaggaccgcgcccgcgaggacctccaggcccggctgcgggagacgtgggccctggcccgggatgctgccctcgtcctggaccagctgcgagcctgtcaagctgagctgtcatctcgagtgaggcaggaccagccccctggtgcagccactctgggcctagccgtccccccagctgactccaagggctggcaagcgtccctgcaggccatgagcctccccgagctctcgggagccctggaggaccgtgtccgtgagatggggcaagcactgtgcttagtgacccagagcctggagaagctgcaggtgctgaacgggaagaagtggcgggagacctagcctgcgggccgaatctgacgttgggtgattggtccaccctgaagctgtgtgccagggagtgaggaggacagtgagcaggcagctgccatgtgcagcccaggcccagtgggggccagaggatcaggccccgggagcagccggcagacagaggcaagacgggggctgcggccctggctcggcagctcgggccagcactgaggcgggacgagggcctcacccagaacctcgtggtgaggcccagagttcatgggctgccctggcccataccaggcagggccctggggggaaagtgtatccatatacacgcacaggtgccaactgaggtgggaccttaggaatgaggactggggcacctggaaaatgccattttttggaaaataaaatttaagaacagctaaaaaaaaaaaa

SEQ ID NO: 419168 - DNA, 2153 bp, Homo sapiens
gggagctgtcccggtgccgacccgcgagcttcccggcgtgctccgcgccctcccgcaactacttccggggcgggtgccgggggcggtgccccggcgagggagcgtggcggcgagctgtttgggggggttggcgacggcagcccgagggcggcgcaaggcctgaggcccagcacagtgatgtccgagctcagcgatgaagccagcgagccggaactcctgaaccgcagcttgtccatgtggcacgggctcgggacacaggtcagcggggaggagctggatgtccccctggatcttcacacagctgcttccattggccagtatgaagtggtgaaggagtgtgtgcagcgggagtcaaggtggacgcgagagaccacagtggagccacagcccggatgctggccaagcagtacggacacatgaagatcgtggccttgatggacacttactcgccctctctgcccaagagcctctatcggagcccagaaaagtacgaagatctgagctcttctgacgagtcctgccctgctcctcagagacagaggccttgccggaagaagggtgtcagcatccacgagggaccgcgagccctggccaggatcacaggcattggcctgggcggcagagccccacggcctcgctatgagcaggctcctccccgtggctatgtcaccttcaacagcagtggcgagaaccccctggaagaagagggcctctgctgccgggatgtcacctcccccatcaatgagcgggatgtggagagcagcagcagcagcagcagtcgggaggaacatgctttctgtgccaacctggggcccgtccagagcagcagcagcagcgagggcctggccagagcccaggggctcagcagcgaagcttctgtggagagcaacgaggactcggatcatgcctgtaaaagctcagctcgcaaacaagctaaaagttacatgaagaccaagaatcctgacagccagtggcctccccgcactgcaactgacagggaaggctttctcgctgagtccagcccccagactcagagggccccctactcaggaccccaggaccttgccgcactgctggagcagatcgggtgtctgaagtacctgcaggtgtttgaggagcaggacgtggacctccgcatctttctgaccctcactgagagcgacctgaaggaaattggcatcacgctgtttgggcccaagaggaagatgacgtccgccattgcccgctggcacagcagtgcccgcccacccggggatgccctggagctggcctacgccgaccggctggaggctgagatgcaagagctcgccatccagctgcacaagcgctgcgaggaggtagaggccacgcggggccaggtgtgtcaggagcaggagctgcgcgccgtggtggagagctgcctgctggagcaggaccgcgcccgcgaggacctccaggcccggctgcgggagacgtgggccctggcccgggatgctgccctcgtcctggaccagctgcgagcctgtcaagctgagctgtcatctcgagtgaggcaggaccagccccctggtgcagccactctgggcctagccgtccccccagctgactccaagggctggcaagcgtccctgcaggccatgagcctccccgagctctcgggagccctggaggaccgtgtccgtgagatggggcaagcactgtgcttagtgacccagagcctggagaagctgcaggtgctgaacgggaagaagtggcgggagacctagcctgcgggccgaatctgacgttgggtgattggtccaccctgaagctgtgtgccagggagtgaggaggacagtgagcaggcagctgccatgtgcagcccaggcccagtgggggccagaggatcaggccccgggagcagccggcagacagaggcaagacgggggctgcggccctggctcggcagctcgggccagcactgaggcgggacgagggcctcacccagaacctcgtggtgaggcccagagttcatgggctgccctggcccataccaggcagggccctggggggaaagtgtatccatatacacgcacaggtgccaactgaggtgggaccttaggaatgaggactggggcacctggaaaatgccattttttggaaaataaaatttaagaacagctaaaaaaaaaaaa

SEQ ID NO: 419169 - DNA, 807 bp, Homo sapiens
tttagttttagaaaactgaactgccatgtgccaaataagggtaaccccaattcataaaaagtaaaaatcatattatcatcacatacaaagaaggcttatcttcctggtcttgatagcaagggagtttgaaggaagttcatcaaaggggtaaaatctttaagatacaaagttaaaaagaaagaagatatctcccgattatgtttttttaaaatcttcaagaaacctaagaaatacccaatagaaaaatggaggctgggcacggtggctcacacttgtaattcaagcactttgggagccctggaggaccgtgtccgtgagatggggcaagcactgtgcttagtgacccagagcctggagaagctgcaggtgctgaacgggaagaagtggcgggagacctagcctgcgggccgaatctgacgttgggtgattggtccaccctgaagctgtgtgccagggagtgaggaggacagtgagcaggcagctgccatgtgcagcccaggcccagtgggggccagaggatcaggccccgggagcagccggcagacagaggcaagacgggggctgcggccctggctcggcagctcgggccagcactgaggcgggacgagggcctcacccagaacctcgtggtgaggcccagagttcatgggctgccctggcccataccaggcagggccctggggggaaagtgtatccatatacacgcacaggtgccaactgaggtgggaccttaggaatgaggactggggcacctggaaaatgccattttttggaaaataaaatttaagaacagctaaaaaaaaaaaa

SEQ ID NO: 419170 - DNA, 2247 bp, Homo sapiens
gggagctgtcccggtgccgacccgcgagcttcccggcgtgctccgcgccctcccgcaactacttccggggcgggtgccgggggcggtgccccggcgagggagcgtggcggcgagctgtttgggggggttggcgacggcagcccgagggcggcgcaaggcctgaggcccagcacagtgatgtccgagctcagcgatgaagccagcgagccggaactcctgaaccgcagcttgtccatgtggcacgggctcgggacacaggtcagcggggaggagctggatgtccccctggatcttcacacagctgcttccattggccagtatgaagtggtgaaggagtgtgtgcagcgcaaggtgcagagctagaaatgaaagacatccagggctggacagccctcttccactgtaccagcgccgggcaccagcacatggtcaggttcctcttggacagtggagccaatgccaacgtgagggagccgatatgtggatttactcccttgatggaagcagctgctgctggccatgagataatcgtgcagtattttctgaatcacggagtcaaggtggacgcgagagaccacagtggagccacagcccggatgctggccaagcagtacggacacatgaagatcgtggccttgatggacacttactcgccctctctgcccaagagcctctatcggagcccagaaaagtacgaagatctgagctcttctgacgagtcctgccctgctcctcagagacagaggccttgccggaagaagggtgtcagcatccacgagggaccgcgagccctggccaggatcacaggcattggcctgggcggcagagccccacggcctcgctatgagcaggctcctccccgtggctatgtcaccttcaacagcagtggcgagaaccccctggaagaagagggcctctgctgccgggatgtcacctcccccatcaatgagcgggatgtggagagcagcagcagcagcagcagtcgggaggaacatgctttctgtgccaacctggggcccgtccagagcagcagcagcagcgagggcctggccagagcccaggggctcagcagcgaagcttctgtggagagcaacgaggactcggatcatgcctgtaaaagctcagctcgcaaacaagctaaaagttacatgaagaccaagaatcctgacagccagtggcctccccgcactgcaactgacagggaaggctttctcgctgagtccagcccccagactcagagggccccctactcaggaccccaggaccttgccgcactgctggagcagatcgggtgtctgaagtacctgcaggtgtttgaggagcaggacgtggacctccgcatctttctgaccctcactgagagcgacctgaaggaaattggcatcacgctgtttgggcccaagaggaagatgacgtccgccattgcccgctggcacagcagtgcccgcccacccggggatgccctggagctggcctacgccgaccggctggaggctgagatgcaagagctcgccatccagctgcacaagcgctgcgaggaggtagaggccacgcggggccaggtgtgtcaggagcaggagctgcgcgccgtggtggagagctgcctgctggagcaggaccgcgcccgcgaggacctccaggcccggctgcgggagacgtgggccctggcccgggatgctgccctcgtcctggaccagctgcgagcctgtcaagctgagctgtcatctcgagtgaggcaggaccagccccctggtgcagccactctgggcctagccgtccccccagctggtaagagcagtggcctgactccgcactgggcagaggggaaggtgggggagccctgaagccaggtttgacccagtgggcttggctggttctccggccggcagccactctcccaggtccctgtgtgcacatgatcccagagtccaaggaaaagagggggccctggggacccaagcccacttcctcacctgtgacaggaaaactgcctatcccccaggggtaggaggtactcgagaaaggccctgtgcttggctggctgtgctgtgctgagaccgccagtgacttctgtagcctccagccaggggcccagacccgggtccccaccggcagagttttgccttcttttcgggctgacccgggcctcgtagtgtttgctcagcctgtgggaggaagggcacaacagggcttccctgcctcggccttgggaggttgcttagacactgtcaggcgggtagggaggtt

SEQ ID NO: 419171 - DNA, 919 bp, Homo sapiens
gggagctgtcccggtgccgacccgcgagcttcccggcgtgctccgcgccctcccgcaactacttccggggcgggtgccgggggcggtgccccggcgagggagcgtggcggcgagctgtttgggggggttggcgacggcagcccgagggcggcgcaaggcctgaggcccagcacaggccaggtgcagtggctcacgcctatatttccaggactttgagaggctgaggcgggcggatcacctgagtgatgtccgagctcagcgatgaagccagcgagccggaactcctgaaccgcagcttgtccatgtggcacgggctcgggacacaggtcagcggggaggagctggatgtccccctggatcttcacacagctgcttccattggccagtatgaagtggtgaaggagtgtgtgcagcgcaaggtgcagagctagaaatgaaagacatccagggctggacagccctcttccactgtaccagcgccgggcaccagcacatggtcaggttcctcttggacagtggagccaatgccaacgtgaggtgattgccacatctttagtggccacaggagtggcctaggtgtcatctgactctaaggagggtggctctggaggcagctaaccagagtttagggccaccctgcttcggcacgagaggctcaagatgaggggtaggaccagagtccttccaggcacaggccttttcgtacatctgtgagatgcatctcttcaagccctctcagcttccttttctttatctgaaacccacctgggtcatacagttgtaagaattacatgttttattgtatgccaggggcctaacatactgaatggcatttaaatgtcatacattacatgcaaattccttccattttcttgctttttgtatggatgaggtgaggtgatgctttgaaacagtcatg

SEQ ID NO: 419172 - DNA, 374 bp, Homo sapiens
agggctggcaagcgtccctgcaggccatgagcctccccgagctctcgggagccctggaggaccgtgtccgtgagatgggtgagtctccggggaccagacgactgagcgctccttttgtttccgagggaggcaaagggacccctttccagggaaagcgggtttgtgtctctctaccccaaggctgacctcggggctggggccataacgggtgaggggcaggtcacatcctgcagctgagaccccggggcagcaccacccagccctcctgagcctgggcgggagaggctcaaggtcatcattcctcagggcaagcactgtgcttagtgacccagagcctggagaagctgcaggtgctgaacgggaagaagtggcgg

SEQ ID NO: 419173 - DNA, 233 bp, Homo sapiens
cgtgtgtgctcgtgtaatcacttctgattcttgcagcatggccgcctggagggcgcccgccccacgcagaggagatgaggccgtaacgcacgttctgtgttctcttgaagcaaggtgcagagctagaaatgaaagacatccagggctggacagccctcttccactgtaccagcgccgggcaccagcacatggtcaggttcctcttggacagtggagccaatgccaacgtgagg

SEQ ID NO: 419174 - DNA, 2357 bp, Homo sapiens
gggagctgtcccggtgccgacccgcgagcttcccggcgtgctccgcgccctcccgcaactacttccggggcgggtgccgggggcggtgccccggcgagggagcgtggcggcgagctgtttgggggggttggcgacggcagcccgagggcggcgcaaggcctgaggcccagcacagtgatgtccgagctcagcgatgaagccagcgagccggaactcctgaaccgcagcttgtccatgtggcacgggctcgggacacaggtcagcggggaggagctggatgtccccctggatcttcacacagctgcttccattggccagtatgaagtggtgaaggagtgtgtgcagcgcaaggtgcagagctagaaatgaaagacatccagggctggacagccctcttccactgtaccagcgccgggcaccagcacatggtcaggttcctcttggacagtggagccaatgccaacgtgagggagccgatatgtggatttactcccttgatggaagcagctgctgctggccatgagataatcgtgcagtattttctgaatcacggagtcaaggtggacgcgagagaccacagtggagccacagcccggatgctggccaagcagtacggacacatgaagatcgtggccttgatggacacttactcgccctctctgcccaagagcctctatcggagcccagaaaagtacgaagatctgagctcttctgacgagtcctgccctgctcctcagagacagaggccttgccggaagaagggtgtcagcatccacgagggaccgcgagccctggccaggatcacaggcattggcctgggcggcagagccccacggcctcgctatgagcaggctcctccccgtggctatgtcaccttcaacagcagtggcgagaaccccctggaagaagagggcctctgctgccgggatgtcacctcccccatcaatgagcgggatgtggagagcagcagcagcagcagcagtcgggaggaacatgctttctgtgccaacctggggcccgtccagagcagcagcagcagcgagggcctggccagagcccaggggctcagcagcgaagcttctgtggagagcaacgaggactcggatcatgcctgtaaaagctcagctcgcaaacaagctaaaagttacatgaagaccaagaatcctgacagccagtggcctccccgcactgcaactgacagggaaggctttctcgctgagtccagcccccagactcagagggccccctactcaggaccccaggaccttgccgcactgctggagcagatcgggtgtctgaagtacctgcaggtgtttgaggagcaggacgtggacctccgcatctttctgaccctcactgagagcgacctgaaggaaattggcatcacgctgtttgggcccaagaggaagatgacgtccgccattgcccgctggcacagcagtgcccgcccacccggggatgccctggagctggcctacgccgaccggctggaggctgagatgcaagagctcgccatccagctgcacaagcgctgcgaggaggtagaggccacgcggggccaggtgtgtcaggagcaggagctgcgcgccgtggtggagagctgcctgctggagcaggaccgcgcccgcgaggacctccaggcccggctgcgggagacgtgggccctggcccgggatgctgccctcgtcctggaccagctgcgagcctgtcaagctgagctgtcatctcgagtgaggcaggaccagccccctggtgcagccactctgggcctagccgtccccccagctgactccaagggctggcaagcgtccctgcaggccatgagcctccccgagctctcgggagccctggaggaccgtgtccgtgagatggggcaagcactgtgcttagtgacccagagcctggagaagctgcaggtgctgaacgggaagaagtggcgggagacctagcctgcgggccgaatctgacgttgggtgattggtccaccctgaagctgtgtgccagggagtgaggaggacagtgagcaggcagctgccatgtgcagcccaggcccagtgggggccagaggatcaggccccgggagcagccggcagacagaggcaagacgggggctgcggccctggctcggcagctcgggccagcactgaggcgggacgagggcctcacccagaacctcgtggtgaggcccagagttcatgggctgccctggcccataccaggcagggccctggggggaaagtgtatccatatacacgcacaggtgccaactgaggtgggaccttaggaatgaggactggggcacctggaaaatgccattttttggaaaataaaatttaagaacagctaaaaaaaaaaaa

SEQ ID NO: 419175 - DNA, 2556 bp, Homo sapiens
gggagctgtcccggtgccgacccgcgagcttcccggcgtgctccgcgccctcccgcaactacttccggggcgggtgccgggggcggtgccccggcgagggagcgtggcggcgagctgtttgggggggttggcgacggcagcccgagggcggcgcaaggcctgaggcccagcacagtgatgtccgagctcagcgatgaagccagcgagccggaactcctgaaccgcagcttgtccatgtggcacgggctcgggacacaggtcagcggggaggagctggatgtccccctggatcttcacacagctgcttccattggccagtatgaagtggtgaaggagtgtgtgcagcggagagagttagatttgaataagaagaatggtggtggctggaccccgctgatgtatgcctcctacattggccacgacacaatcgtgcacctgctgcttgaggcgggggtgagtgtgaatgtgccgaccccagaagggcagactccactgatgctggcctccagctgtggcaacgagagcatcgcctactttcttctccagcaaggtgcagagctagaaatgaaagacatccagggctggacagccctcttccactgtaccagcgccgggcaccagcacatggtcaggttcctcttggacagtggagccaatgccaacgtgagggagccgatatgtggatttactcccttgatggaagcagctgctgctggccatgagataatcgtgcagtattttctgaatcacggagtcaaggtggacgcgagagaccacagtggagccacagcccggatgctggccaagcagtacggacacatgaagatcgtggccttgatggacacttactcgccctctctgcccaagagcctctatcggagcccagaaaagtacgaagatctgagctcttctgacgagtcctgccctgctcctcagagacagaggccttgccggaagaagggtgtcagcatccacgagggaccgcgagccctggccaggatcacaggcattggcctgggcggcagagccccacggcctcgctatgagcaggctcctccccgtggctatgtcaccttcaacagcagtggcgagaaccccctggaagaagagggcctctgctgccgggatgtcacctcccccatcaatgagcgggatgtggagagcagcagcagcagcagcagtcgggaggaacatgctttctgtgccaacctggggcccgtccagagcagcagcagcagcgagggcctggccagagcccaggggctcagcagcgaagcttctgtggagagcaacgaggactcggatcatgcctgtaaaagctcagctcgcaaacaagctaaaagttacatgaagaccaagaatcctgacagccagtggcctccccgcactgcaactgacagggaaggctttctcgctgagtccagcccccagactcagagggccccctactcaggaccccaggaccttgccgcactgctggagcagatcgggtgtctgaagtacctgcaggtgtttgaggagcaggacgtggacctccgcatctttctgaccctcactgagagcgacctgaaggaaattggcatcacgctgtttgggcccaagaggaagatgacgtccgccattgcccgctggcacagcagtgcccgcccacccggggatgccctggagctggcctacgccgaccggctggaggctgagatgcaagagctcgccatccagctgcacaagcgctgcgaggaggtagaggccacgcggggccaggtgtgtcaggagcaggagctgcgcgccgtggtggagagctgcctgctggagcaggaccgcgcccgcgaggacctccaggcccggctgcgggagacgtgggccctggcccgggatgctgccctcgtcctggaccagctgcgagcctgtcaagctgagctgtcatctcgagtgaggcaggaccagccccctggtgcagccactctgggcctagccgtccccccagctgactccaagggctggcaagcgtccctgcaggccatgagcctccccgagctctcgggagccctggaggaccgtgtccgtgagatggggcaagcactgtgcttagtgacccagagcctggagaagctgcaggtgctgaacgggaagaagtggcgggagacctagcctgcgggccgaatctgacgttgggtgattggtccaccctgaagctgtgtgccagggagtgaggaggacagtgagcaggcagctgccatgtgcagcccaggcccagtgggggccagaggatcaggccccgggagcagccggcagacagaggcaagacgggggctgcggccctggctcggcagctcgggccagcactgaggcgggacgagggcctcacccagaacctcgtggtgaggcccagagttcatgggctgccctggcccataccaggcagggccctggggggaaagtgtatccatatacacgcacaggtgccaactgaggtgggaccttaggaatgaggactggggcacctggaaaatgccattttttggaaaataaaatttaagaacagctaaaaaaaaaaaa

SEQ ID NO: 419176 - DNA, 1346 bp, Homo sapiens
gaggaggaggccagtttctggtgatgaacatacattgtccccacgtggccgaccatagtgtgaggactcacctgcctgcaacatcctgccctgcctgagccaccagagtaggaggggacagcctgggcgccacacacaaggcactgtcttggttctgagcctggggaagtggtggggctccgagtggaggaaaacgtctctgcttcgtcgtcagccactacctcccccaacctgtcccctgtgcctgccaggaccttgccgcactgctggagcagatcgggtgtctgaagtacctgcaggtgtttgaggagcaggacgtggacctccgcatctttctgaccctcactgagagcgacctgaaggaaattggcatcacgctgtttgggcccaagaggaagatgacgtccgccattgcccgctggcacagcagtgcccgcccacccggggatgccctggagctggcctacgccgaccggctggaggctgagatgcaagagctcgccatccagctgcacaagcgctgcgaggaggtagaggccacgcggggccaggtgtgtcaggagcaggagctgcgcgccgtggtggagagctgcctgctggagcaggaccgcgcccgcgaggacctccaggcccggctgcgggagacgtgggccctggcccgggatgctgccctcgtcctggaccagctgcgagcctgtcaagctgagctgtcatctcgagtgaggcaggaccagccccctggtgcagccactctgggcctagccgtccccccagctgactccaagggctggcaagcgtccctgcaggccatgagcctccccgagctctcgggagccctggaggaccgtgtccgtgagatggggcaagcactgtgcttagtgacccagagcctggagaagctgcaggtgctgaacgggaagaagtggcgggagacctagcctgcgggccgaatctgacgttgggtgattggtccaccctgaagctgtgtgccagggagtgaggaggacagtgagcaggcagctgccatgtgcagcccaggcccagtgggggccagaggatcaggccccgggagcagccggcagacagaggcaagacgggggctgcggccctggctcggcagctcgggccagcactgaggcgggacgagggcctcacccagaacctcgtggtgaggcccagagttcatgggctgccctggcccataccaggcagggccctggggggaaagtgtatccatatacacgcacaggtgccaactgaggtgggaccttaggaatgaggactggggcacctggaaaatgccattttttggaaaataaaatttaagaacagctaaaaaaaaaaaa

SEQ ID NO: 419177 - DNA, 1154 bp, Homo sapiens
ggccgctttcccctctccggagtgacctaacacaggataacgaaacctgcactgctccgagcgcttcctccccggcccgtcgcgtctgcgaggcgaggccgggaggcgagggctctgcgcacgcgcggcgcaggcgcactgggcgccggtgctgttgccttcaggtgaccacggattcgccatcgtgagttccaggattttcaaaatggctgcagctcctcaagcaccggggcggggatctctccgtaagacgagacctctggttgtgaagacgtcgttgaacaacccatacatcatccgctggagcgctctggagagcgaggatatgcacttcatcctacagacgcttgaggacaggcttaaagctattggacttcagaagattgaagataagaagaaaaagaacaaaacaccttttctgaaaaaagaaagcagagagaaatgcagcattgctgttgatattagtgagaatctgaaggagaagaaaacagatgctaagcagcaagtgtcagggtggacgcctgcacacgtcaggaagcagcttgccattggcgttaacgaagttaccagagccctggaaaggagggaactgctgttagttctggtgtgtaaatcagtcaagcctgccatgatcacctcacacttgattcagttaagcctaagcagaagtgtccctgcctgtcaggtcccccggctcagtgagagaatcgcccccgtcattggcttaaaatgtgttctagccttggcgttcaaaaagaacaccactgactttgtggacgaagtaagagccatcatccccagagtccccagtttaagtgtaccatggcttcaagacagaattgaagattctggggaaaatttagagactgaacctctggaaagccaagacagagagcttttggacacttcatttgaagatctgtcaaaacctaagagaaagcttgctgacggtcggcaggcttctgtaacattacaaccccttaaaataaagaaactgattccaaaccctaataagataaggaaaccacccaaaagtaaaaaagctactccaaagtaatcttgcataaacttgtcatgtcatacagtttgtgaaaggacaccttgtaaagaagccttgaaactaataaaatgagttatacttacatagaaaaaaa

SEQ ID NO: 419178 - DNA, 356 bp, Homo sapiens
ggccgctttcccctctccggagtgacctaacacaggataacgaaacctgcactgctccgagcgcttcctccccggcccgtcgcgtctgcgaggcgaggccgggaggcgagggctctgcgcacgcgcggcgcaggcgcactgggcgccggtgctgttgccttcaggtgaccacggattcgccatcgtgagttccagggtttttaccttaaataactaattactggccatatttgggaagtgttgaaaaaaagcagacaatctgaggatgatgttgacttggggatccaaaggcacaggtgacaacatcaaaactacctgcaagtctcacttcatggaacacaacagaaactctgcat

SEQ ID NO: 419179 - DNA, 1634 bp, Homo sapiens
ggccgctttcccctctccggagtgacctaacacaggataacgaaacctgcactgctccgagcgcttcctccccggcccgtcgcgtctgcgaggcgaggccgggaggcgagggctctgcgcacgcgcggcgcaggcgcactgggcgccggtgctgttgccttcaggtgaccacggattcgccatcgtgagttccagccaggtgggcgcgcggggcccacgtagggcaggaggccagccccggggggatcgggcccgggactctgcggaatctggaggccgaagcccgcgcgcacgcagggtctctgctgcttccccaacgcctgttgcgtggccgcaggacccgccgccctcccggttgggccgcccagtcccgggccgggcgcgtgcacccagagcttccgcgtttctagtccggctcctctgctggattgcagcgccggctgggcaccaggagtacaaagcgaaaacccccgccggcccttctgttctccacggtctccaaggagacacggacaacagaacaacacttccgtgtgctaaatagtaaagcaccaagacagggtcagatgtgttactgggctggagtgtggtggcacaatcacgctcactgcatccttgacctcctgggctcaagtgatcttcccacctcagcctcccaagtagctgggactacaggattttcaaaatggctgcagctcctcaagcaccggggcggggatctctccgtaagacgagacctctggttgtgaagacgtcgttgaacaacccatacatcatccgctggagcgctctggagagcgaggatatgcacttcatcctacagacgcttgaggacaggcttaaagctattggacttcagaagattgaagataagaagaaaaagaacaaaacaccttttctgaaaaaagaaagcagagagaaatgcagcattgctgttgatattagtgagaatctgaaggagaagaaaacagatgctaagcagcaagtgtcagggtggacgcctgcacacgtcaggaagcagcttgccattggcgttaacgaagttaccagagccctggaaaggagggaactgctgttagttctggtgtgtaaatcagtcaagcctgccatgatcacctcacacttgattcagttaagcctaagcagaagtgtccctgcctgtcaggtcccccggctcagtgagagaatcgcccccgtcattggcttaaaatgtgttctagccttggcgttcaaaaagaacaccactgactttgtggacgaagtaagagccatcatccccagagtccccagtttaagtgtaccatggcttcaagacagaattgaagattctggggaaaatttagagactgaacctctggaaagccaagacagagagcttttggacacttcatttgaagatctgtcaaaacctaagagaaagcttgctgacggtcggcaggcttctgtaacattacaaccccttaaaataaagaaactgattccaaaccctaataagataaggaaaccacccaaaagtaaaaaagctactccaaagtaatcttgcataaacttgtcatgtcatacagtttgtgaaaggacaccttgtaaagaagccttgaaactaataaaatgagttatacttacatagaaaaaaa

SEQ ID NO: 419180 - DNA, 834 bp, Homo sapiens
ggccgctttcccctctccggagtgacctaacacaggataacgaaacctgcactgctccgagcgcttcctccccggcccgtcgcgtctgcgaggcgaggccgggaggcgagggctctgcgcacgcgcggcgcaggcgcactgggcgccggtgctgttgccttcaggtgaccacggattcgccatcgtgagttccagacagggtcagatgtgttactgggctggagtgtggtggcacaatcacgctcactgcatccttgacctcctgggctcaagtgatcttcccacctcagcctcccaagtagctgggactacaggattttcaaaatggctgcagctcctcaagcaccggggcggggatctctccgtaagacgagacctctggttgtgaagacgtcgttgaacaacccatacatcatccgctggagcgctctggagagcgaggatatgcacttcatcctacagacgcttgaggacaggcttaaagctattggacttcagaagattgaagataagaagaaaaagaacaaaacaccttttctgaaaaaagaaagcagagagaaatgcagcattgctgttgatattagtgagaatctgaaggagaagaaaacagatgctaagcagcaagtgtcagggtggacgcctgcacacgtcaggaagcagcttgccattggcgttaacgaagttaccagagccctggaaaggagggaactgctgttagttctggttctcactctgttgcccaggctggagtgcagtggtgtgatcccggctcactgcaaccccgcctcctgggttcaagcgattctcctgcctcagcctcctgaatagctggga

SEQ ID NO: 419181 - DNA, 1038 bp, Homo sapiens
cccttcttctgctctctataattatttatctcagcagcctggtgacagctaccagtaagagtacggcagccgtatttctggctggaagattcagaatatccattctatttcaccagggcagggccccaggaccaattttctgcccaggctgaatggccggaacagacacattgctgggtttctacagtgccatttcctaaatctcattttggcagacaccctggctttgatttcaggtcattttagacctgtgtggttctgctggcagccacccatcctgctaaaataactacagcttaagcacagagaggactaacaaaattaaaaatggaaataaaataaaaccaccccgcttcagtggctcacggtcaaattagcaagcaagagaagtcacaagaaaaaatacttgatgcttgtgaaagatgaagcaccgggaacagatgtgctctcctattttcactccgctgtggacacgagtcttacaaataatgcatttcctatagggcagtgatcagagagatgatgaagaatttgggacaaaaattaagtggtgtatgccaccacgaacacgcttcaggaaactgcaaaggagctgctttattttgacccaataatggggattcctgcaggaaggctttgccagacaccagatagaccatgcttccgggtctcagaaacagaggcagggtgcagccacctagtctacattttaaaagctaaaaccagtagcctcccatttctctactgtggcaaatgtgagcaccaacactataaattaaaaatgtcactgaaccagttataataatctgctaaataatttgaagaacattgagaccttcaggaaagagctcagcagcctgagtcatctctgcaatagaggacaaggtatacttaagagtctcatcgcttggctgggtgcagcagctcatgctggtaatcccagcactttgggaggccgaggcaggaggattgcttgagcccaggagttcaagaccagcctgggtaacatactgagacctgtctctccaaaaaaaaaaa

SEQ ID NO: 419182 - DNA, 2586 bp, Homo sapiens
gagatgggccagatgccaggatccctgaaaggagaccatatactgtaccatttgatactcatttggggcattatatttatatcccatcaagacaagattccaggaaggtccacacaagtccgcctatgtactctctggatcgaatatttgctggatttcgaacacgaagtcagatgctgttgggtcacatagaagaacaagataaggtcctccactgccaattttctgataacagtgatgatgaagaatcagaaggccaagagaaatctggaactagatgtagaagtcgttcatggattcagaagccagactctgtttgttcccttgttgaattgagtgatactcaggatgaaacacaaaagtcagatttggagaatgaagatttaaagattgattgtctccaggagagtcaagaattgaatttgcaaaaattaaagaattcagaacgcatacttactgaagctaaacaaaaaatgagagacttacaattaacatcaagatgaaggaagatctgattaaagaattaataaaaacaggtaatgatgccaagtctgtaagcaagcagtattctttgaaagtaacaaagctagagcatgatgcagaacaggcaaaagtcgaactgattgaaacacaaaagcagctacaggagctggaaaacaaagatctttctgatgttgcaatgaaggtaaaattacagaaagagtttcgtaaaaagatggatgctgcaaagctgagagttcaggtcttgcagaagaagcaacaagatagtaagaaactggcatcactgtcaatccaaaatgagaaacgtgctaatgagctagagcagagtgtagatcacatgaaatatcaaaagatacagctacaaagaaaactacgagaagaaaatgaaaaaaggaagcaactggatgcagtaattaagcgggaccagcaaaaaatcaaagaaatacaattaaaaacaggacaggaagaaggtctaaaaccgaaagctgaggaccttgatgcatgtaacttgaaaaggagaaaaggttcgtttggaagtatagaccatctccagaaattggatgagcaaaagaaatggttagatgaagaagtagagaaagttctgaaccaacgccaagaattagaggagctggaagcagacttaaagaaacgggaggccatagtttctaagaaggaggctctgttacaggagaagagtcacctggaaaataagaaattgagatctagtcaggaagaacatgttcttttccaacttgaagaagggatagaagctttggaagctgcaattgaatacaggaatgaaagtatccagaatcgccagaagtcacttagagcatcattccataacctctctcgtggtgaagcaaatgtcttggaaaagctagcttgcctgagtcctgttgagattagaactattcttttcagatatttcaataaggtggtgaatttgcgagaagctgaacggaaacaacagttatataatgaagaaatgaaaatgaaagttctggaacgggataatatggttcgtgaattagaatctgcactggaccatctaaaattgcagtgtgaccggagactgaccctccagcaaaaggaacacgaacaaaagatgcagttgctattacatcatttcaaagaacaagatggagaaggcattatggaaactttcaaaacatatgaagataaaatccagcagttggaaaaagatctttatttctataagaaaaccagccgggatcataagaagaaacttaaggaactggtaggggaagcaattcggcggcaactagcaccatcagagtatcaagaggctggagatggagtcctgaagccagaaggaggaggcatgctttcagaagaattaaaatgggcatccagacctgaaagtatgaaattaagtggaagagaaagagaaatggacagttcagcaagcagcttaagaacacagccaaatcctcaaaagctctgggaagatatcccagaattacctccaattcatagttctttagcaccccccagtgggcatatgttaggtaatgagaataaaacagaaacagatgataatcagtttacaaaatctcacagtcgactgtcatcccaaattcaggttgtgggaaatgtgggacgacttcatggtgtcacacctgtaaaactgtgtcgaaaagaattacgtcaaatttccgccttggaactatcattgcgacgttccagtcttggagttggcattggatcaatggctgctgattccatcgaagtatctaggaaaccaagggacttaaaaacttagacattgaataatagaacttttagtagatatgtaaaaagattcctttttctaacctgttaaaaactaaagctcaagttcactacctctttcctcagaataaaggaagaaggggaggaaggaatccctaattcttttatatgctatagatgtgtacatcttctatatatatttggggagttttagtttatattcccatagtaatcaaacatgttttccaatacttgataacatttaaatatttataaatacgcttaaatgtttttccaggcatatttgaagattaaaactagtaatagact

SEQ ID NO: 419183 - DNA, 2802 bp, Homo sapiens
gagatgggccagatgccaggatccctgaaaggagaccatatactgtaccatttgatactcatttggggcattatatttatatcccatcaagacaagattccaggaaggtccacacaagtccgcctatgtactctctggatcgaatatttgctggatttcgaacacgaagtcagatgctgttgggtcacatagaagaacaagataaggtcctccactgccaattttctgataacagtgatgatgaagaatcagaaggccaagagaaatctggaactagatgtagaagtcgttcatggattcagaagccagactctgtttgttcccttgttgaattgagtgatactcaggatgaaacacaaaagtcagatttggagaatgaagatttaaagattgattgtctccaggagagtcaagaattgaatttgcaaaaattaaagaattcagaacgcatacttactgaagctaaacaaaaaatgagagacttacaattaacatcaagatgaaggaagatctgattaaagaattaataaaaacaggtaatgatgccaagtctgtaagcaagcagtattctttgaaagtaacaaagctagagcatgatgcagaacaggcaaaagtcgaactgattgaaacacaaaagcagctacaggagctggaaaacaaagatctttctgatgttgcaatgaaggtaaaattacagaaagagtttcgtaaaaagatggatgctgcaaagctgagagttcaggtcttgcagaagaagcaacaagatagtaagaaactggcatcactgtcaatccaaaatgagaaacgtgctaatgagctagagcagagtgtagatcacatgaaatatcaaaagatacagctacaaagaaaactacgagaagaaaatgaaaaaaggaagcaactggatgcagtaattaagcgggaccagcaaaaaatcaaagaaatacaattaaaaacaggacaggaagaaggtctaaaaccgaaagctgaggaccttgatgcatgtaacttgaaaaggagaaaaggttcgtttggaagtatagaccatctccagaaattggatgagcaaaagaaatggttagatgaagaagtagagaaagttctgaaccaacgccaagaattagaggagctggaagcagacttaaagaaacgggaggccatagtttctaagaaggaggctctgttacaggagaagagtcacctggaaaataagaaattgagatctagtcaggccttaaacacagatagtttgaaaatatcaactcgcctgaacttactggaacaagagttgtctgaaaagaatgtgcagctccagaccagtacagctgaggagaaaacaaagatttcagaacaagttgaagtcctccagaaagaaaaggatcagctccagaaacgcagacacgatgtggatgaaaaacttaaaaatggtagagtgttatcacctgaagaagaacatgttcttttccaacttgaagaagggatagaagctttggaagctgcaattgaatacaggaatgaaagtatccagaatcgccagaagtcacttagagcatcattccataacctctctcgtggtgaagcaaatgtcttggaaaagctagcttgcctgagtcctgttgagattagaactattcttttcagatatttcaataaggtggtgaatttgcgagaagctgaacggaaacaacagttatataatgaagaaatgaaaatgaaagttctggaacgggataatatggttcgtgaattagaatctgcactggaccatctaaaattgcagtgtgaccggagactgaccctccagcaaaaggaacacgaacaaaagatgcagttgctattacatcatttcaaagaacaagatggagaaggcattatggaaactttcaaaacatatgaagataaaatccagcagttggaaaaagatctttatttctataagaaaaccagccgggatcataagaagaaacttaaggaactggtaggggaagcaattcggcggcaactagcaccatcagagtatcaagaggctggagatggagtcctgaagccagaaggaggaggcatgctttcagaagaattaaaatgggcatccagacctgaaagtatgaaattaagtggaagagaaagagaaatggacagttcagcaagcagcttaagaacacagccaaatcctcaaaagctctgggaagatatcccagaattacctccaattcatagttctttagcaccccccagtgggcatatgttaggtaatgagaataaaacagaaacagatgataatcagtttacaaaatctcacagtcgactgtcatcccaaattcaggttgtgggaaatgtgggacgacttcatggtgtcacacctgtaaaactgtgtcgaaaagaattacgtcaaatttccgccttggaactatcattgcgacgttccagtcttggagttggcattggatcaatggctgctgattccatcgaagtatctaggaaaccaagggacttaaaaacttagacattgaataatagaacttttagtagatatgtaaaaagattcctttttctaacctgttaaaaactaaagctcaagttcactacctctttcctcagaataaaggaagaaggggaggaaggaatccctaattcttttatatgctatagatgtgtacatcttctatatatatttggggagttttagtttatattcccatagtaatcaaacatgttttccaatacttgataacatttaaatatttataaatacgcttaaatgtttttccaggcatatttgaagattaaaactagtaatagact

SEQ ID NO: 419184 - DNA, 1021 bp, Homo sapiens
tctagcaggatcccgctgatccgcttaaggaacacgaacaaaagatgcagttgctattacatcatttcaaagaacaagatggagaaggcattatggaaactttcaaaacatatgaagataaaatccagcagttggaaaaagatctttatttctataagaaaaccagccgggatcataagaagaaacttaaggaactggtaggggaagcaattcggcggcaactagcaccatcagagtatcaagaggctggagatggagtcctgaagccagaaggaggaggcatgctttcagaagaattaaaatgggcatccagacctgaaagtatgaaattaagtggaagagaaagagaaatggacagttcagcaagcagcttaagaacacagccaaatcctcaaaagctctgggaagatatcccagaattacctccaattcatagttctttagcaccccccagtgggcatatgttaggtaatgagaataaaacagaaacagatgataatcagtttacaaaatctcacagtcgactgtcatcccaaattcaggttgtgggaaatgtgggacgacttcatggtgtcacacctgtaaaactgtgtcgaaaagaattacgtcaaatttccgccttggaactatcattgcgacgttccagtcttggagttggcattggatcaatggctgctgattccatcgaagtatctaggaaaccaagggacttaaaaacttagacattgaataatagaacttttagtagatatgtaaaaagattcctttttctaacctgttaaaaactaaagctcaagttcactacctctttcctcagaataaaggaagaaggggaggaaggaatccctaattcttttatatgctatagatgtgtacatcttctatatatatttggggagttttagtttatattcccatagtaatcaaacatgttttccaatacttgataacatttaaatatttataaatacgcttaaatgtttttccaggcatatttgaagattaaaactagtaatagact

SEQ ID NO: 419185 - DNA, 3525 bp, Homo sapiens
aaggaaatcagttcaacttttgtgagcggggaaaagcagggctttattgttgtgttacctgggagtctggagtttgaaaagtgctaattaaccttcctctttttccacattacaaacctttttaagcagcgcagcactccctttagatttggctatcctgggtgattttcagacaagaaccattttctctggggaccattcttctgctgggtgccaaggaatataaggcaaatgcccagaagaccttcaggtgactgggcagtcttatcatgggatatttcttctggccctgccccttcccattctgtaatgtgaattagccacaccagaggctgtgaccatggctagtagacagtggcaacatagtcatccccaagatgctaatcttctgctggaactgtcatacgttatcatggtcaatgtaaacctggtttgtgtggggtgattataaatagagtttccctcctctctgtgacagaatcacaggagaaggacccatctcgtggccttcttgttcttagcgcttcacttttacttcatccctcgattcccagctttttctatcatcattttaccaactcctcagatgcaagactttggttatgtcatactcaccaacgttagtccctctcttccaggtgaaaaggtgggtagcggttgggagggagtctccactgaagagcaggaaggtggtagcagggccggcagctctgccacagagctaggggtgcctgtaaggtgccgcctagagcagcctgggagctttgccttcttttgtctctcactagcccttctactctttgtcattgcctgttcttgagtggatctttgagatgaggggacaggattctcctaagggtagagtttcaggaaatgagtgaaaggcaattgacaaatgcaaagaagtagtcactttttaaattgccggcaaagctataattaatccctaggcacaattgtagtttttattttaatgtttgtatgcacaaggccctttaggaaatgagaagttgccatgccagattaatttttttttttttttttggtgggattgccttttgggggttgcagccagaaattgtgggtaatgtgtgtatttttttatttattaaattttaaacaggattgtgcaagcttatgagacaattagataaactcatggaggaggcaggtcctcctgttattagatgattttgtgctctttgggctgacaataatacactcttgggaagtgatggtagagactgatgggaatagtctttctgcctggttgcaagtcccaaatttttaaggcttaatggaagtaagtggatgtttcctcatgttaactactgaatcagatgttaggagcttgtccctttggggttgacttatgcccagcagtacagggacacagcttcattagagtgttagtgtaaactaactccaaagttaggagttaatgtgaaaggatcatccttgaaacaagtctgctgtttgccatgcttgtagtacagaaacttcacatggagttttgggtgggatttgtgttttcacaagtaaaaaatccctcacgattataaaactcagagcatcatctaattttttttttaatgactacaagttccagcacaaaactggcatttctttgccatttcttgccagtaagaagttgacacggaggtatttgaaagcaatgttatgtgagtcattcttaagtgttccaagtaagtttagaaacagaaaaggaacttgggattcaaattgatttttcaaatcatttttaaagagacatcatcctgactaaatcttagcctgaaccttcctcccctgtgtgtattccccggtagtcaccgcagcgagatgctggtgagactgccgtggtggcatttagcatcgttaaaactggaaaactctcaagctctttgccactttcctactattttttgattcttgccattttaccaagcttaggttgtgaaacttgacagaaatgtattacaggaaaaacttataattgtatttgactttctaacacattgcaaagtttcaaagtgactttcactttcaacaacatattagaagtaaccacttttgctttcacagcctgaagagttagagcctgatctgatgccccctttcactctgaagtcatgggaaattttccagccatgaaagccctctttccactgcatactgatgggctgactcagcttccttcagccgactgagatcttttcatactattggctatttcataccaattaacctcttaaataagattgtgaattgccaaaattgatagacacttattaccacctgtggactccatattccttaccacaaatgttattttcatcagtcctgagtcattttaacttacagaaattaggattgttgctgctaatatgaataccaattataacttttagaaacaagaataaagcctaaaagagaatgaaatataagaaatgttcgttcccacccctaataacatttggaagtgaatattcccattttcttccacccacagggattgggattgatttttaatttcctaggaaacaatactagactacccaaaaagatgttgccagaatccaaaaggaactatgctcgtaaaagaaatgcagttttctcctacctaaaaaaaagaaagtaaagtgtgttctgttcttatctttttaatgactaagctttaaacagtttattttgggtaagactagaactttcagccatttgttctaatatctgtgttattagatgcaatagaatttatgaaaagaagaatgacaaaggtatctgattagaaaatttgatcttacgcatgaatccatgtcatggccagccactgtcacatagtgggtgccattctcaacatattggtttgctaactttaagcattagggatttagcacactaaaatacttttaattatattaggtttggtaactaaggagtaaataaatcataatttatcatttgccaaggccaacaaacaacactattgtgctgtttgctctcaatgaagttgaataaaccaggaggcttggcatatcccctttatgttaatcccagctagagattagtaggttgactttcacagcaattgtatattgatccattttaactcatccttgccataatttccaggccagtcaccaggacagaggagatgatggggaaacagagctttagatgaaaactactatgcactactagccttagaggcactggtttcctgttaccactttggcaagtatggatggtctaagtccagtagggcttcatccatggagccattagaactgaggggggagtgttagagatgccatttcaccaggatctttttgctcaggttgtacccatgccaattgaagaacgtgttaaagatgaggaggagagatgtaccattctctcccttaataatgatgttggtttgcaaaacctaaagaaataataacaacagactatttcatactttcaagcaagtctttatactacctgttatttctctaaaattcaaataaagaatttttaaactta

SEQ ID NO: 419186 - DNA, 3511 bp, Homo sapiens
aaggaaatcagttcaacttttgtgagcggggaaaagcagggctttattgttgtgttacctgggagtctggagtttgaaaagtgctaattaaccttcctctttttccacattacaaacctttttaagcagcgcagcactccctttagatttggctatcctgggtgattttcagacaagaaccattttctctggggaccattcttctgctgggtgccaaggaatataaggcaaatgcccagaagaccttcaggtgactgggcagtcttatcatgggatatttcttctggccctgccccttcccattctgtaatgtgaattagccacaccagaggctgtgaccatggctagtagacagtggcaacatagtcatccccaagatgctaatcttctgctggaactgtcatacgttatcatggtcaatgtaaacctggtttgtgtggggtgattataaatagagtttccctcctctctgtgacagaatcacaggagaaggacccatctcgtggccttcttgttcttagcgcttcacttttacttcatccctcgattcccagctttttctatcatcattttaccaactcctcagatgcaagactttggttatgtcatactcaccaacgttagtccctctcttccaggtgaaaaggtgggtagcggttgggagggagtctccactgaagagcaggaaggtggtagcagggccggcagctctgccacagagctaggggtgcctgtaaggtgccgcctagagcagcctgggagctttgccttcttttgtctctcactagcccttctactctttgtcattgcctgttcttgagtggatctttgagatgaggggacaggattctcctaagggtagagtttcaggaaatgagtgaaaggcaattgacaaatgcaaagaagtagtcactttttaaattgccggcaaagctataattaatccctaggcacaattgtagtttttattttaatgtttgtatgcacaaggccctttaggaaatgagaagttgccatgccagattaatttttttttttttttttggtgggattgccttttgggggttgcagccagaaattgtgggtaatgtgtgtatttttttatttattaaattttaaacaggattgtgcaagcttatgagacaattagataaactcatggaggaggcaggtcctcctgttattagatgattttgtgctctttgggctgacaataatacactcttgggaagtgatggtagagactgatgggaatagtctttctgcctggttgcaagtcccaaatttttaaggcttaatggaagtaagtggatgtttcctcatgttaactactgaatcagatgttaggagcttgtccctttggggttgacttatgcccagcagtacagggacacagcttcattagagtgttagtgtaaactaactccaaagttaggagttaatgtgaaaggatcatccttgaaacaagtctgctgtttgccatgcttgtagtacagaaacttcacatggagttttgggtgggatttgtgttttcacaagtaaaaaatccctcacgattataaaactcagagcatcatctaattttttttttaatgactacaagttccagcacaaaactggcatttctttgccatttcttgccagtaagaagttgacacggaggtatttgaaagcaatgttatgtgagtcattcttaagtgttccaagtaagtttagaaacagaaaaggaacttgggattcaaattgatttttcaaatcatttttaaagagacatcatcctgactaaatcttagcctgaaccttcctcccctgtgtgtattccccggtagtcaccgcagcgagatgctggtgagactgccgtggtggcatttagcatcgttaaaactggaaaactctcaagctctttgccactttcctactattttttgattcttgccattttaccaagcttaggttgtgaaacttgacagaaatgtattacaggaaaaacttataattgtatttgactttctaacacattgcaaagtttcaaagtgactttcactttcaacaacatattagaagtaaccacttttgctttcacagcctgaagagttagagcctgatctgatgccccctttcactctgaagtcatgggaaattttccagccatgaaagccctctttccactgcatactgatgggctgactcagcttccttcagccgactgagatcttttcatactattggctatttcataccaattaacctcttaaataagattgtgaattgccaaaattgatagacacttattaccacctgtggactccatattccttaccacaaatgttattttcatcagtcctgagtcattttaacttacagaaattaggattgttgctgctaatatgaataccaattataacttttagaaacaagaataaagcctaaaagagaatgaaatataagaaatgttcgttcccacccctaataacatttggaagtgaatattcccattttcttccacccacagggattgggattgatttttaatttcctaggaaacaatactagactacccaaaaagatgttgccagaatccaaaaggaactatgctcgtaaaagaaatgcagttttctcctacctaaaaaaaagaaagtaaagtgtgttctgttcttatctttttaatgactaagctttaaacagtttattttgggtaagactagaactttcagccatttgttctaatatctgtgttattagatgcaatagaatttatgaaaagaagaatgacaaaggtatctgattagaaaatttgatcttacgcatgaatccatgtcatggccagccactgtcacatagtgggtgccattctcaacatattggtttgctaactttaagcattagggatttagcacactaaaatacttttaattatattaggtttggtaactaaggagtaaataaatcataatttatcatttgccaaggccaacaaacaacactattgtgctgtttgctctcaatgaagttgaataaaccaggaggcttggcatatcccctttatgttaatcccagctagagattagtaggttgactttcacagcaattgtatattgatccattttaactcatccttgccataatttccaggccagtcaccaggacagaggagatgatggggaaacagagctttagatgaaaactactatgcactactagccttagaggcactggtttcctgttaccactttggcaagtatggatggtctaagtccagtagggcttcatccatggagccattagaactgaggggggagtgttagagatgccatttcaccaggatctttttgctcaggttgtacccatgccaattgaagaacgtgttaaagatgaggaggagagatgtaccattctctcccttaataatgatgatgatggtgctgatggaggtaatgatgatgatagtgatgatgaagatggtgatgatggcagtgattatgatggtgattgtgatggtggtactttaaag

SEQ ID NO: 419187 - DNA, 644 bp, Homo sapiens
gagcctgggaaggaagagggaacgggtcctggcggtgctttgcaaagggcccgtgtttctgttgcgggaagctcccgggggtcgcacgtgcgtccgagcccaagcccctcccctccactccccttcctgcgtgccccggagccgccaagcggctacgttcttctcggcccgccgagatggcgctcgaccccgcagaccagcatctcagacatgtcgaaaaagatgttttgatccctaaaataatgagagaaaaggccaaagagaggtgttctgaacaagttcaagattttaccaaatgttgcaagaactctggagttcttatggtagtaaaatgccggaaagaaaattctgcattgaaagaatgtctaactgcttactataatgatccagccttttatgaagaatgcaaaatggaatacctgaaggaaagggaagaattcagaaaaactggaattcctacaaagaaaaggctacagaagcttccaacaagcatgtaggcagatactcaaatgacattcaggaactctaatattcatggaagtcattttatagtccttaaataatggactcaagcatatatgtttgctttaccttaattatggaaatattaactttatctgaaataaatattttatttcaaaaaa

SEQ ID NO: 419188 - DNA, 791 bp, Homo sapiens
ctttggaccacgatgaaattgccaaatgatgcatttctcagaatgtatcctcattgttaagcagcccatgattgtactgtttctctactagaaatcctatctctacatcctgtctctatgaagtctccttgcccttcatctcagaagtcctctctccctcttctcaaatcacatttatttatacaaagtgaatatcactcatcttattctgccttttactggtgtacatgtcttttgttgagcacggtaccatgtgccaagcacaatgtacataatagatgttcaaggctgcagtgagctataatcatgccactgcactccagcctgggtgacaggctttctttttttttttctaaaaagaagaaaattgtgtgtgtgggtatttatatagatataattacaagtaattttttccttccaaatttatttcagattttaccaaatgttgcaagaactctggagttcttatggtagtaaaatgccggaaagaaaattctgcattgaaagaatgtctaactgcttactataatgatccagccttttatgaagaatgcaaaatggaatacctgaaggaaagggaagaattcagaaaaactggaattcctacaaagaaaaggctacagaagcttccaacaagcatgtaggcagatactcaaatgacattcaggaactctaatattcatggaagtcattttatagtccttaaataatggactcaagcatatatgtttgctttaccttaattatggaaatattaactttatctgaaataaatattttatttcaaaaaa

SEQ ID NO: 419189 - DNA, 1593 bp, Homo sapiens
acccccacgaccgaacctggcttcgctaacgccctcccagctccctcgggcctgacttccggtttcctcgcgcgtccctggcgccgagcccgcggacagcggcagccccttttccggctgagagctcatccacacttccaatcactttccggagtgcttcccctccctccggcccgtgctggtcccgacggcgggcctgggtctcgcgcgcgtattgctgggtaacgggccttctctcgcgtcggcccggcccctcctgcctcggctcgtccctccttccagaacgtcccgggctcctgccgagtcagaagaaatgggactccctccgcgacgtgcccggagcagctcccttcgctgtggaagcggcggtgtcttcgaagaaaccggaagcccgtggtgacccctggcgacccggtttgttttcggtccgtttccaaacactaaggaatcgaaactcggcggccttgggggcggccctacgtagcctggcttctggttgtcatggatgcactggtagaagatgatatctgtattctgaatcatgaaaaagcccataagagagatacagtgactccagtttcaatatattcaggagatgaatctgttgcttcccattttgctcttgtcactgcatatgaagacatcaaaaaacgacttaaggattcagagaaagagaactctttgttaaagaagagaataagatttttggaagaaaagctaatagctcgatttgaagaagaaacaagttccgtgggacgagaacaagtaaataaggcctatcatgcatatcgagaggtttgcattgatagagataatttgaagagcaaactggacaaaatgaataaagacaactctgaatctttgaaagtattgaatgagcagctacaatctaaagaagtagaactcctccagctgaggacagaggtggaaactcagcaggtgatgaggaatttaaatccaccttcatcaaactgggaggtggaaaagttgagctgtgacctgaagatccatggtttggaacaagagctggaactgatgaggaaagaatgtagcgatctcaaaatagaactacagaaagccaaacaaacggatccatatcaggaagacaatctgaagagcagagatctccaaaaactaagcatttcaagtgataatatgcagcatgcatactgggaactgaagagagaaatgtctaatttacatctggtgactcaagtacaagctgaactactaagaaaactgaaaacctcaactgcaatcaagaaaggcaagtcactgtttaccggaaaccactgattccagccaaactgcctgaagagcaactagctgtcatatcttatcaaaatctcatcaaatgagagattgataagccaaagtatatatagtacattcgcagcctacccattctctgctttggcttcagtctcatactggtcaacttcacacataaaggtgttgctgatgtgttttttcttcagtactgtattcttttccccttgtggcttttctcagccaagtgttgcttatgtgtataagactgaggtgttaagtttgctctagttgaccttttaccacagctacttcatatatttg

SEQ ID NO: 419190 - DNA, 716 bp, Homo sapiens
gagcctgggaaggaagagggaacgggtcctggcggtgctttgcaaagggcccgtgtttctgttgcgggaagctcccgggggtcgcacgtgcgtccgagcccaagcccctcccctccactccccttcctgcgtgccccggagccgccaagcggctacgttcttctcggcccgccgagatggcgctcgaccccgcagaccagcatctcagacatgtcgaaaaagatgttttgatccctaaaataatgagagaaaaggccaaagagaggtgttctgaacaagttcaagattttaccaaatgttgcaagaactctggagttcttatggtagtaaaatgccggaaagaaaattctgcattgaaagaatgtctaactgcttactataatgatccagccttttatgaagaatgcaaaatggaatacctgaaggaaagggaagaattcagaaaaactggaattcctacaaagaaaaggctacagaagcttccaacaagcatgtaggcagatactcaaatgacattcaggaactctaatattcatggaagtcattttatagtccttaaataatggactcaagcatatatgtttgctttaccttaattatggaaatattaactttatctgaaataaatattttatttcaaaaaaaaaaccacaacaaaaggcagaaaaaaacactttgggggcccgcctgggcccccggaaaagcttccaaacacc

SEQ ID NO: 419191 - DNA, 1413 bp, Homo sapiens
gcggtcggtcgggaggtgtgggatgataattgcttgattaatgttttgaacaataccaagaaattgtttaattaaaataaatatttttgtttgaaattgaagtggatgtgaaatattgtccttgcctatagatctcaaaatctagtactaattgttggttgttaatatgattcatacaatagacatttgttaaaccagcttttgagtggagaaaattattttccatttaaacagtacagtgatgatagctatcaaacaggtatactaaaaagtcagtgactgtgacagtttaaagtgttagacaaatgatgtataaggttctttagtaaggaaagattagccaaaaattttttacccagctagaagcttttaaatctacacttgatatctctgttctaggtaaaattcaaacaaccaaaaaacagtggcccatctgtagcttatgaatctatttaaaattgaatattttatgttgacttctttcatactagctgaaacttgctctaaagagcttcctttggaatctttagatttctttttataaggttcaattcagtacatccataaatcgacagaatgaagaaaacataacaaaaagccacctattccttcctcttgctcccttattagctaaagtaaaatttacatctgtaagacttactgagttgctgccaaaatggaactgaattcttaaaagcaggaacgtgcctatgtgaaacattagaaaaccaaaataaatgggaaaattcagacttgaagagctgaatcatgtgacaacaaagtactgatcttaattcagaaaggctacttggagaaggtgtatcttaaggggtaaaaaacctgtgggttaccacatattaacagggaataatatcaacagaggcacccataagcaagcaagacacaactgagacagatgtaccaggtgaaaaaaatcttcagtatggatacacatgggtattctgaaggctacaatgaatggtttagtctttgacataaggaggatgaacatattatttatactgtgtaatctaatctggcttctatggggaaagcaacatgtacataagtgaattttctacatgaagtgggctacttctgattttaatcaaagctataaaatagattgtatatttcactagcttcttaaagtaactcttccattttcatttatctctaaaaacagttaacttcctgtgctctaggaaatgcaccaataccaaaggtcaatgtggaaatatgggcatgtttgcccctatgctgtgtggtctctagatttctatatttgctttgcttttgtctgctctagtaatctccctccttttgatctgtggcctgggaaaatgtggtttctttgtatttcaaataaaagtaaaatagttttttgagtggttcactcaagaaaaaaaaatg

SEQ ID NO: 419192 - DNA, 510 bp, Homo sapiens
gaaaagataacaatttcagtgtccatcctttttgtagtgatgaggaatttaaatccaccttcatcaaactgggaggtggaaaagttgagctgtgacctgaagatccatggtttggaacaagagctggaactgatgaggaaagaatgtagcgatctcaaaatagaactacagaaagccaaacaaacggatccatatcaggaagacaatctgaagagcagagatctccaaaaactaagcatttcaagacagagtatctgtagcacagcctggagtgcagtggcgcaatcatgggatagcatgaattttgaggactgttccctcttcgcataagaatagaagtagccatcagagttcatatactttttcaaccctttttcctcaaatacgtatcatttttacttaagtaacttcaattctgtgttttaagctatctaataattgttgtttctactatgttaagatagcctctctacattgttaccctccatccaataaaaaatactgatctga

SEQ ID NO: 419193 - DNA, 974 bp, Homo sapiens
ctaggctaggtacgaggctgggtgtgaatcggccgaggaaggattcagagaaagagaactctttgttaaagaagagaataagatttttggaagaaaagctaatagctcgatttgaagaagaaacaagttccgtgggacgagaacaagtaaataaggcctatcatgcatatcgagaggtttgcattgatagagataatttgaagagcaaactggacaaaatgaataaagacaactctgaatctttgaaagtattgaatgagcagctacaatctaaagaagtagaactcctccagctgaggacagaggtggaaactcagcaggtgatgaggaatttaaatccaccttcatcaaactgggaggtggaaaagttgagctgtgacctgaagatccatggtttggaacaagagctggaactgatgaggaaagaatgtagcgatctcaaaatagaactacagaaagccaaacaaacggatccatatcaggaagacaatctgaagagcagagatctccaaaaactaagcatttcaagtgataatatgcagcatgcatactgggaactgaagagagaaatgtctaatttacatctggtgactcaagtacaagctgaactactaagaaaactgaaaacctcaactgcaatcaagaaaggcaagtcactgtttaccggaaaccactgattccagccaaactgcctgaagagcaactagctgtcatatcttatcaaaatctcatcaaatgagagattgataagccaaagtatatatagtacattcgcagcctacccattctctgctttggcttcagtctcatactggtcaacttcacacataaaggtgttgctgatgtgttttttcttcagtactgtattcttttccccttgtggcttttctcagccaagtgttgcttatgtgtataagactgaggtgttaagtttgctctagttgaccttttaccacagctacttcatatatttg

SEQ ID NO: 419194 - DNA, 398 bp, Homo sapiens
gatgtgtgaattttttttaatttgtaaagaataaaatttattttaccaaatgttgcaagaactctggagttcttatggtagtaaaatgccggaaagaaaattctgcattgaaagaatgtctaactgcttactataatgatccagccttttatgaagaatgcaaaatggaatacctgaaggaaagggaagaattcagaaaaactggaattcctacaaagaaaaggctacagaagcttccaacaagcatgtaggcagatactcaaatgacattcaggaactctaatattcatggaagtcattttatagtccttaaataatggactcaagcatatatgtttgctttaccttaattatggaaatattaactttatctgaaataaatattttatttcaaaaaa

SEQ ID NO: 419195 - DNA, 1106 bp, Homo sapiens
acccccacgaccgaacctggcttcgctaacgccctcccagctccctcgggcctgacttccggtttcctcgcgcgtccctggcgccgagcccgcggacagcggcagccccttttccggctgagagctcatccacacttccaatcactttccggagtgcttcccctccctccggcccgtgctggtcccgacggcgggcctgggtctcgcgcgcgtattgctgggtaacgggccttctctcgcgtcggcccggcccctcctgcctcggctcgtccctccttccagaacgtcccgggctcctgccgagtcagaagaaatgggactccctccgcgacgtgcccggagcagctcccttcgctgtggaagcggcggtgtcttcgaagaaaccggaagcccgtggtgacccctggcgacccggtttgttttcggtccgtttccaaacactaaggaatcgaaactcggcggccttgggggcggccctacgtagcctggcttctgggaacctaactctcagagaagtaatgctgaacctaacagcaaaagtagatgttcagagcaagtcagtttttcgttaaacaatgaagttgtcatggatgcactggtagaagatgatatctgtattctgaatcatgaaaaagcccataagagagatacagtgactccagtttcaatatattcaggagatgaatctgttgcttcccattttgctcttgtcactgcatatgaagacatcaaaaaacgacttaaggattcagagaaagagaactctttgttaaagaagagaataagatttttggaagaaaaggtaatttttatcttttaccttcattgcgtttgtgacataaggaataattcaaaatacttgaaattttgaatactttttgtcctgtcttccatgattgtactaaatttccaagaataactcactgctaatctgaaaactctgggcattatacttatcctgtgtttcacataccatgtacttggtaaatatttgtaggagaggatttaacaacttggagttatattccaaatatttttctttcattttcaggtttacttacctccatagctgtatgtattttattcagaattttcaaatctgggca

SEQ ID NO: 419196 - DNA, 332 bp, Homo sapiens
ttaaaattgagtataaaatctaattgtattctttgcacttacagatatattctgtaaaacctgaacatgtctctggtaagaaagagctgagactaaataaattgtaaaaattacaacttttaaacttcttttttttaaacaaatgacaggatccatatcaggaagacaatctgaagagcagagatctccaaaaactaagcatttcaaggtatgaccactcttcagcattaagacaatacgttgtcttcttccataagtcactttgtgtaggtccttagatttcttttatgacttaaccttaaaaacaaaaaatggatattgtttggatactg

SEQ ID NO: 419197 - DNA, 3368 bp, Homo sapiens
acccccacgaccgaacctggcttcgctaacgccctcccagctccctcgggcctgacttccggtttcctcgcgcgtccctggcgccgagcccgcggacagcggcagccccttttccggctgagagctcatccacacttccaatcactttccggagtgcttcccctccctccggcccgtgctggtcccgacggcgggcctgggtctcgcgcgcgtattgctgggtaacgggccttctctcgcgtcggcccggcccctcctgcctcggctcgtccctccttccagaacgtcccgggctcctgccgagtcagaagaaatgggactccctccgcgacgtgcccggagcagctcccttcgctgtggaagcggcggtgtcttcgaagaaaccggaagcccgtggtgacccctggcgacccggtttgttttcggtccgtttccaaacactaaggaatcgaaactcggcggccttgggggcggccctacgtagcctggcttctggttgtcatggatgcactggtagaagatgatatctgtattctgaatcatgaaaaagcccataagagagatacagtgactccagtttcaatatattcaggagatgaatctgttgcttcccattttgctcttgtcactgcatatgaagacatcaaaaaacgacttaaggattcagagaaagagaactctttgttaaagaagagaataagatttttggaagaaaagctaatagctcgatttgaagaagaaacaagttccgtgggacgagaacaagtaaataaggcctatcatgcatatcgagaggtttgcattgatagagataatttgaagagcaaactggacaaaatgaataaagacaactctgaatctttgaaagtattgaatgagcagctacaatctaaagaagtagaactcctccagctgaggacagaggtggaaactcagcaggtgatgaggaatttaaatccaccttcatcaaactgggaggtggaaaagttgagctgtgacctgaagatccatggtttggaacaagagctggaactgatgaggaaagaatgtagcgatctcaaaatagaactacagaaagccaaacaaacggatccatatcaggaagacaatctgaagagcagagatctccaaaaactaagcatttcaagtgataatatgcagcatgcatactgggaactgaagagagaaatgtctaatttacatctggtgactcaagtacaagctgaactactaagaaaactgaaaacctcaactgcaatcaagaaagcctgtgcccctgtaggatgcagtgaagaccttggaagagacagcacaaaactgcacttgatgaattttactgcaacatacacaagacatccccctctcttaccaaatggcaaagctctttgtcataccacatcttcccctttaccaggagatgtaaaggttttatcagagaaagcaatcctccaatcatggacagacaatgagagatccattcctaatgatggtacatgctttcaggaacacagttcttatggcagaaattctctggaagacaattcctgggtatttccaagtcctcctaaatcaagtgagacagcatttggggaaactaaaactaaaactttgcctttacccaaccttccaccactgcattacttggatcaacataatcagaactgcctttataagaattaatttggaagagattcacgatttcaccatgaggacacttatctctttcagtggtcctcccaagaaattatttaacaaactgaaaggagattttgattaaaattttgcagaggtcttcagtatctatatttgaacacactgtacaatagtacaaaaaccaacatagttggttttctagtatgaaagagcaccctctagctccatattctaagaatctgaaatatgctactatactaattaataagtaaacttaaggtgtttaaaaaactctgccttctatattaattgtaaaattttgcctctcagaagaatggaattggagattgtagacgtggttttacaaaatgtgaaatgtctaaatatctgttcataaaaataaaaggaaaacatgtttcttcaaattgcataatggaacaaatggcaatgtgagtaggttacatttctgttgttataatgcgtaaagatattgaaaatataatgaaataaaagcatcttaggttataccatctttatatgctattgcgtttcaatatttaagatttaaagtgattttttggtcacagtgttttgttgataaaatttttttagaattgaagtttgaattctaagacttgaaacaacctgatcactgaagccaactttgtcccagcacattccttaagtcctaattgggaaaaaaaaaaaaaaaaatgaaatagttgaaaaactctggggtgtaaacaaatgattgtaaccctacacactattcaataagtagtagaaggagcatcacacagatttcagtctaatctgcccttctgtgggccataatataaacataaatgtgtgtaatgataaaaagtcattttcttcaaagagactacagctagctgcacattgtgtagagcagcttctaaattgttagactttgtgttgaaatgtaatattctatttattgagaaagtgatttaaaattattatttttaatcatagaaatcagggtttgggctgtattgatattgtcgatcatgaaatgtccacacttattctaagtggccaattatttggaaataaagaaggaaataaagatggcttcacatggaaatttaagttctttcagggtggagatttacttggttcatacaccttttgcctgaattaaagtatttcatgtaggaggacttttatcctttttgatagacagtttcatatatcttgaactcaatatctcagatctcttctactgtattactgaatagcatacatacatagacaatgttcgccattcactagatatttttttctattatcttacacttattcaagcttgtctgtgattaatggaattggtgtcagatgctggaatttattctgaccaatgaacacagctgactcaggggagtacaatctcctgccaagtaatagaaccaaacccaatatgcataaaagaaatacaatactccaggctttagctgaaggaagcaactacctgtgtaataacaaagcagcaaaaactatttctcatgtggctgcataggctgtatattatatctgatctctaatgtagcttactggtttgccttttttaaaaccaaaattggaaattttcctttgtaaagaaaaaaagtcttatgagataattgcttgattaatgttttgaacaataccaagaaattgtttaattaaaataaatatttttgtttgaaattgaa

SEQ ID NO: 419198 - DNA, 3886 bp, Homo sapiens
acccccacgaccgaacctggcttcgctaacgccctcccagctccctcgggcctgacttccggtttcctcgcgcgtccctggcgccgagcccgcggacagcggcagccccttttccggctgagagctcatccacacttccaatcactttccggagtgcttcccctccctccggcccgtgctggtcccgacggcgggcctgggtctcgcgcgcgtattgctgggtaacgggccttctctcgcgtcggcccggcccctcctgcctcggctcgtccctccttccagaacgtcccgggctcctgccgagtcagaagaaatgggactccctccgcgacgtgcccggagcagctcccttcgctgtggaagcggcggtgtcttcgaagaaaccggaagcccgtggtgacccctggcgacccggtttgttttcggtccgtttccaaacactaaggaatcgaaactcggcggccttgggggcggccctacgtagcctggcttctggttgtcatggatgcactggtagaagatgatatctgtattctgaatcatgaaaaagcccataagagagatacagtgactccagtttcaatatattcaggagatgaatctgttgcttcccattttgctcttgtcactgcatatgaagacatcaaaaaacgacttaaggattcagagaaagagaactctttgttaaagaagagaataagatttttggaagaaaagctaatagctcgatttgaagaagaaacaagttccgtgggacgagaacaagtaaataaggcctatcatgcatatcgagaggtttgcattgatagagataatttgaagagcaaactggacaaaatgaataaagacaactctgaatctttgaaagtattgaatgagcagctacaatctaaagaagtagaactcctccagctgaggacagaggtggaaactcagcaggtgatgaggaatttaaatccaccttcatcaaactgggaggtggaaaagttgagctgtgacctgaagatccatggtttggaacaagagctggaactgatgaggaaagaatgtagcgatctcaaaatagaactacagaaagccaaacaaacggatccatatcaggaagacaatctgaagagcagagatctccaaaaactaagcatttcaagtgataatatgcagcatgcatactgggaactgaagagagaaatgtctaatttacatctggtgactcaagtacaagctgaactactaagaaaactgaaaacctcaactgcaatcaagaaagcctgtgcccctgtaggatgcagtgaagaccttggaagagacagcacaaaactgcacttgatgaattttactgcaacatacacaagacatccccctctcttaccaaatggcaaagctctttgtcataccacatcttcccctttaccaggagatgtaaaggttttatcagagaaagcaatcctccaatcatggacagacaatgagagatccattcctaatgatggtacatgctttcaggaacacagttcttatggcagaaattctctggaagacaattcctgggtatttccaagtcctcctaaatcaagtgagacagcatttggggaaactaaaactaaaactttgcctttacccaaccttccaccactgcattacttggatcaacataatcagaactgcctttataagaattaatttggaagagattcacgatttcaccatgaggacacttatctctttcagtggtcctcccaagaaattatttaacaaactgaaaggagattttgattaaaattttgcagaggtcttcagtatctatatttgaacacactgtacaatagtacaaaaaccaacatagttggttttctagtatgaaagagcaccctctagctccatattctaagaatctgaaatatgctactatactaattaataagtaaacttaaggtgtttaaaaaactctgccttctatattaattgtaaaattttgcctctcagaagaatggaattggagattgtagacgtggttttacaaaatgtgaaatgtctaaatatctgttcataaaaataaaaggaaaacatgtttcttcaaattgcataatggaacaaatggcaatgtgagtaggttacatttctgttgttataatgcgtaaagatattgaaaatataatgaaataaaagcatcttaggttataccatctttatatgctattgcgtttcaatatttaagatttaaagtgattttttggtcacagtgttttgttgataaaatttttttagaattgaagtttgaattctaagacttgaaacaacctgatcactgaagccaactttgtcccagcacattccttaagtcctaattgggaaaaaaaaaaaaaaaaatgaaatagttgaaaaactctggggtgtaaacaaatgattgtaaccctacacactattcaataagtagtagaaggagcatcacacagatttcagtctaatctgcccttctgtgggccataatataaacataaatgtgtgtaatgataaaaagtcattttcttcaaagagactacagctagctgcacattgtgtagagcagcttctaaattgttagactttgtgttgaaatgtaatattctatttattgagaaagtgatttaaaattattatttttaatcatagaaatcagggtttgggctgtattgatattgtcgatcatgaaatgtccacacttattctaagtggccaattatttggaaataaagaaggaaataaagatggcttcacatggaaatttaagttctttcagggtggagatttacttggttcatacaccttttgcctgaattaaagtatttcatgtaggaggacttttatcctttttgatagacagtttcatatatcttgaactcaatatctcagatctcttctactgtattactgaatagcatacatacatagacaatgttcgccattcactagatatttttttctattatcttacacttattcaagcttgtctgtgattaatggaattggtgtcagatgctggaatttattctgaccaatgaacacagctgactcaggggagtacaatctcctgccaagtaatagaaccaaacccaatatgcataaaagaaatacaatactccaggctttagctgaaggaagcaactacctgtgtaataacaaagcagcaaaaactatttctcatgtggctgcataggctgtatattatatctgatctctaatgtagcttactggtttgccttttttaaaaccaaaattggaaattttcctttgtaaagaaaaaaagtcttatgagataattgcttgattaatgttttgaacaataccaagaaattgtttaattaaaataaatatttttgtttgaaattgaaaaaaaaaaaaaaaaaaaaaaaaaaaaaaaaaaaaaaaaaaaaaaaaaaaaaaaaaaaaaaaaaaaaaaaaaaaaaaaaaaaaaaaaaaaaaaaaaaaaaaaaaaaaaaaaaaaaaaaaaaaaaaaaatttggggggggccccggtccccaattcccccttagggggggcgttttaaaattcaggggcccgtttttaaaaaactttgaaatggaaaaaccttgggtttcccaaatttaaaccctttggaaaaaattccctttttcccaattgggcaaaaagccaaaaggccccaaccttttcccttttcaaaaaatttgccaccttaaagggcaaatggcaaattttaagctttaaatttttttaaaaattcgtgtaaaatttttgtaaaaaccgcttttttttaaacccaagggcccaaattgggaaaatccttttataaataaaaaaattaccccgaaaagggttaaatttttttcccattgggaaacaagtttcccttttaaaaaaatgggcctcc

SEQ ID NO: 419199 - DNA, 3253 bp, Homo sapiens
acccccacgaccgaacctggcttcgctaacgccctcccagctccctcgggcctgacttccggtttcctcgcgcgtccctggcgccgagcccgcggacagcggcagccccttttccggctgagagctcatccacacttccaatcactttccggagtgcttcccctccctccggcccgtgctggtcccgacggcgggcctgggtctcgcgcgcgtattgctgggtaacgggccttctctcgcgtcggcccggcccctcctgcctcggctcgtccctccttccagaacgtcccgggctcctgccgagtcagaagaaatgggactccctccgcgacgtgcccggagcagctcccttcgctgtggaagcggcggtgtcttcgaagaaaccggaagcccgtggtgacccctggcgacccggtttgttttcggtccgtttccaaacactaaggaatcgaaactcggcggccttgggggcggccctacgtagcctggcttctggttgtcatggatgcactggtagaagatgatatctgtattctgaatcatgaaaaagcccataagagagatacagtgactccagtttcaatatattcaggagatgaatctgttgcttcccattttgctcttgtcactgcatatgaagacatcaaaaaacgacttaaggattcagagaaagagaactctttgttaaagaagagaataagatttttggaagaaaagctaatagctcgatttgaagaagaaacaagttccgtgggacgagaacaagtaaataaggcctatcatgcatatcgagaggtttgcattgatagagataatttgaagagcaaactggacaaaatgaataaagacaactctgaatctttgaaagtattgaatgagcagctacaatctaaagaagtagaactcctccagctgaggacagaggtggaaactcagcaggtgatgaggaatttaaatccaccttcatcaaactgggaggtggaaaagttgagctgtgacctgaagatccatggtttggaacaagagctggaactgatgaggaaagaatgtagcgatctcaaaatagaactacagaaagccaaacaaacggatccatatcaggaagacaatctgaagagcagagatctccaaaaactaagcatttcaagtgataatatgcagcatgcatactgggaactgaagagagaaatgtctaatttacatctggtgactcaagtacaagctgaactactaagaaaactgaaaacctcaactgcaatcaagaaagcctgtgcccctgtaggatgcagtgaagaccttggaagagacagcacaaaactgcacttgatgaattttactgcaacatacacaagacatccccctctcttaccaaatggcaaagctctttgtcataccacatcttcccctttaccaggagatgtaaaggttttatcagagaaagcaatcctccaatcatggacagacaatgagagatccattcctaatgatggtacatgctttcaggaacacagttcttatggcagaaattctctggaagacaattcctgggtatttccaagtcctcctaaatcaagtgagacagcatttggggaaactaaaactaaaactttgcctttacccaaccttccaccactgcattacttggatcaacataatcagaactgcctttataagaattaatttggaagagattcacgatttcaccatgaggacacttatctctttcagtggtcctcccaagaaattatttaacaaactgaaaggagattttgattaaaattttgcagaggtcttcagtatctatatttgaacacactgtacaatagtacaaaaaccaacatagttggttttctagtatgaaagagcaccctctagctccatattctaagaatctgaaatatgctactatactaattaataagtaaacttaaggtgtttaaaaaactctgccttctatattaattgtaaaattttgcctctcagaagaatggaattggagattgtagacgtggttttacaaaatgtgaaatgtctaaatatctgttcataaaaataaaaggaaaacatgtttcttcaaattgcataatggaacaaatggcaatgtgagtaggttacatttctgttgttataatgcgtaaagatattgaaaatataatgaaataaaagcatcttaggttataccatctttatatgctattgcgtttcaatatttaagatttaaagtgattttttggtcacagtgttttgttgataaaatttttttagaattgaagtttgaattctaagacttgaaacaacctgatcactgaagccaactttgtcccagcacattccttaagtcctaattgggaaaaaaaaaaaaaaaaatgaaatagttgaaaaactctggggtgtaaacaaatgattgtaaccctacacactattcaataagtagtagaaggagcatcacacagatttcagtctaatctgcccttctgtgggccataatataaacataaatgtgtgtaatgataaaaagtcattttcttcaaagagactacagctagctgcacattgtgtagagcagcttctaaattgttagactttgtgttgaaatgtaatattctatttattgagaaagtgatttaaaattattatttttaatcatagaaatcagggtttgggctgtattgatattgtcgatcatgaaatgtccacacttattctaagtggccaattatttggaaataaagaaggaaataaagatggcttcacatggaaatttaagttctttcagggtggagatttacttggttcatacaccttttgcctgaattaaagtatttcatgtaggaggacttttatcctttttgatagacagtttcatatatcttgaactcaatatctcagatctcttctactgtattactgaatagcatacatacatagacaatgttcgccattcactagatatttttttctattatcttacacttattcaagcttgtctgtgattaatggaattggtgtcagatgctggaatttattctgaccaatgaacacagctgactcaggggagtacaatctcctgccaagtaatagaaccaaacccaatatgcttaggagtcatactccaggctagcgaaggagcataccggtctaccaagcgaaatatcccgggggccaggcggaaaacaaaccaagcgagggggggcgttaaccaggagtgcctgcacagctccaaaccgcggggcccccgcgttcgtgcggggcc

SEQ ID NO: 419200 - DNA, 3504 bp, Homo sapiens
acccccacgaccgaacctggcttcgctaacgccctcccagctccctcgggcctgacttccggtttcctcgcgcgtccctggcgccgagcccgcggacagcggcagccccttttccggctgagagctcatccacacttccaatcactttccggagtgcttcccctccctccggcccgtgctggtcccgacggcgggcctgggtctcgcgcgcgtattgctgggtaacgggccttctctcgcgtcggcccggcccctcctgcctcggctcgtccctccttccagaacgtcccgggctcctgccgagtcagaagaaatgggactccctccgcgacgtgcccggagcagctcccttcgctgtggaagcggcggtgtcttcgaagaaaccggaagcccgtggtgacccctggcgacccggtttgttttcggtccgtttccaaacactaaggaatcgaaactcggcggccttgggggcggccctacgtagcctggcttctgggaggtcttaaaaggttttagccacagtttctccttccatcatgtttttcaggaacctaactctcagagaagtaatgctgaacctaacagcaaaagtagatgttcagagcaagtcagtttttcgttaaacaatgaagttgtcatggatgcactggtagaagatgatatctgtattctgaatcatgaaaaagcccataagagagatacagtgactccagtttcaatatattcaggagatgaatctgttgcttcccattttgctcttgtcactgcatatgaagacatcaaaaaacgacttaaggattcagagaaagagaactctttgttaaagaagagaataagatttttggaagaaaagctaatagctcgatttgaagaagaaacaagttccgtgggacgagaacaagtaaataaggcctatcatgcatatcgagaggtttgcattgatagagataatttgaagagcaaactggacaaaatgaataaagacaactctgaatctttgaaagtattgaatgagcagctacaatctaaagaagtagaactcctccagctgaggacagaggtggaaactcagcaggtgatgaggaatttaaatccaccttcatcaaactgggaggtggaaaagttgagctgtgacctgaagatccatggtttggaacaagagctggaactgatgaggaaagaatgtagcgatctcaaaatagaactacagaaagccaaacaaacggatccatatcaggaagacaatctgaagagcagagatctccaaaaactaagcatttcaagtgataatatgcagcatgcatactgggaactgaagagagaaatgtctaatttacatctggtgactcaagtacaagctgaactactaagaaaactgaaaacctcaactgcaatcaagaaagcctgtgcccctgtaggatgcagtgaagaccttggaagagacagcacaaaactgcacttgatgaattttactgcaacatacacaagacatccccctctcttaccaaatggcaaagctctttgtcataccacatcttcccctttaccaggagatgtaaaggttttatcagagaaagcaatcctccaatcatggacagacaatgagagatccattcctaatgatggtacatgctttcaggaacacagttcttatggcagaaattctctggaagacaattcctgggtatttccaagtcctcctaaatcaagtgagacagcatttggggaaactaaaactaaaactttgcctttacccaaccttccaccactgcattacttggatcaacataatcagaactgcctttataagaattaatttggaagagattcacgatttcaccatgaggacacttatctctttcagtggtcctcccaagaaattatttaacaaactgaaaggagattttgattaaaattttgcagaggtcttcagtatctatatttgaacacactgtacaatagtacaaaaaccaacatagttggttttctagtatgaaagagcaccctctagctccatattctaagaatctgaaatatgctactatactaattaataagtaaacttaaggtgtttaaaaaactctgccttctatattaattgtaaaattttgcctctcagaagaatggaattggagattgtagacgtggttttacaaaatgtgaaatgtctaaatatctgttcataaaaataaaaggaaaacatgtttcttcaaattgcataatggaacaaatggcaatgtgagtaggttacatttctgttgttataatgcgtaaagatattgaaaatataatgaaataaaagcatcttaggttataccatctttatatgctattgcgtttcaatatttaagatttaaagtgattttttggtcacagtgttttgttgataaaatttttttagaattgaagtttgaattctaagacttgaaacaacctgatcactgaagccaactttgtcccagcacattccttaagtcctaattgggaaaaaaaaaaaaaaaaatgaaatagttgaaaaactctggggtgtaaacaaatgattgtaaccctacacactattcaataagtagtagaaggagcatcacacagatttcagtctaatctgcccttctgtgggccataatataaacataaatgtgtgtaatgataaaaagtcattttcttcaaagagactacagctagctgcacattgtgtagagcagcttctaaattgttagactttgtgttgaaatgtaatattctatttattgagaaagtgatttaaaattattatttttaatcatagaaatcagggtttgggctgtattgatattgtcgatcatgaaatgtccacacttattctaagtggccaattatttggaaataaagaaggaaataaagatggcttcacatggaaatttaagttctttcagggtggagatttacttggttcatacaccttttgcctgaattaaagtatttcatgtaggaggacttttatcctttttgatagacagtttcatatatcttgaactcaatatctcagatctcttctactgtattactgaatagcatacatacatagacaatgttcgccattcactagatatttttttctattatcttacacttattcaagcttgtctgtgattaatggaattggtgtcagatgctggaatttattctgaccaatgaacacagctgactcaggggagtacaatctcctgccaagtaatagaaccaaacccaatatgcataaaagaaatacaatactccaggctttagctgaaggaagcaactacctgtgtaataacaaagcagcaaaaactatttctcatgtggctgcataggctgtatattatatctgatctctaatgtagcttactggtttgccttttttaaaaccaaaattggaaattttcctttgtaaagaaaaaaagtcttatgagataattgcttgattaatgttttgaacaataccaagaaattgtttaattaaaataaatatttttgtttgaaattgaa

SEQ ID NO: 419201 - DNA, 3398 bp, Homo sapiens
caatcctattaattcctatcctgtaatataaaggatttaacaaattaacacacacatctatttcttaaaaagtcaagtatgccttggctgggcacggtggctcacacctgtaattccagccctttgggaggccgaggtgggtggattgcctgaagtcaggagtccaagaccagactggccaacatggtgaaaccctgtctctactaaaaatacaaaaattagcagggcgtggtggtgcacctatattcccagctcctcggaagctgaggcaggacaatcacttaaacctgggaggcggaggttgcagtgagctgagatcgccccattgcactccagcctgggtgatgagagcgaaactcagtctcgaaaaaaaaaaaaagtcaagtatgccctaaggtgctgctttttctgattatagaaattagatacttttaatttaaaaaacatctaagcagtgtgtatcacatctatactctgttgtgattatgatgatttaatgttataaaacagacaccatgaattataaaatactgattatgtaaaagcatagaaggcttcaaaaaatattctacacatttttgctttctatgtaaagattaatttgtggaaatgaaatactcacctaatgaatccaggctttatccccttattacgattgaagtaagatatggagccatcagaacactgacttattttttatctatagaatactctcttaagctttctcttctaatttcataccgttagctaatagctcgatttgaagaagaaacaagttccgtgggacgagaacaagtaaataaggcctatcatgcatatcgagaggtttgcattgatagagataatttgaagagcaaactggacaaaatgaataaagacaactctgaatctttgaaagtattgaatgagcagctacaatctaaagaagtagaactcctccagctgaggacagaggtggaaactcagcaggtgatgaggaatttaaatccaccttcatcaaactgggaggtggaaaagttgagctgtgacctgaagatccatggtttggaacaagagctggaactgatgaggaaagaatgtagcgatctcaaaatagaactacagaaagccaaacaaacggatccatatcaggaagacaatctgaagagcagagatctccaaaaactaagcatttcaagtgataatatgcagcatgcatactgggaactgaagagagaaatgtctaatttacatctggtgactcaagtacaagctgaactactaagaaaactgaaaacctcaactgcaatcaagaaagcctgtgcccctgtaggatgcagtgaagaccttggaagagacagcacaaaactgcacttgatgaattttactgcaacatacacaagacatccccctctcttaccaaatggcaaagctctttgtcataccacatcttcccctttaccaggagatgtaaaggttttatcagagaaagcaatcctccaatcatggacagacaatgagagatccattcctaatgatggtacatgctttcaggaacacagttcttatggcagaaattctctggaagacaattcctgggtatttccaagtcctcctaaatcaagtgagacagcatttggggaaactaaaactaaaactttgcctttacccaaccttccaccactgcattacttggatcaacataatcagaactgcctttataagaattaatttggaagagattcacgatttcaccatgaggacacttatctctttcagtggtcctcccaagaaattatttaacaaactgaaaggagattttgattaaaattttgcagaggtcttcagtatctatatttgaacacactgtacaatagtacaaaaaccaacatagttggttttctagtatgaaagagcaccctctagctccatattctaagaatctgaaatatgctactatactaattaataagtaaacttaaggtgtttaaaaaactctgccttctatattaattgtaaaattttgcctctcagaagaatggaattggagattgtagacgtggttttacaaaatgtgaaatgtctaaatatctgttcataaaaataaaaggaaaacatgtttcttcaaattgcataatggaacaaatggcaatgtgagtaggttacatttctgttgttataatgcgtaaagatattgaaaatataatgaaataaaagcatcttaggttataccatctttatatgctattgcgtttcaatatttaagatttaaagtgattttttggtcacagtgttttgttgataaaatttttttagaattgaagtttgaattctaagacttgaaacaacctgatcactgaagccaactttgtcccagcacattccttaagtcctaattgggaaaaaaaaaaaaaaaaatgaaatagttgaaaaactctggggtgtaaacaaatgattgtaaccctacacactattcaataagtagtagaaggagcatcacacagatttcagtctaatctgcccttctgtgggccataatataaacataaatgtgtgtaatgataaaaagtcattttcttcaaagagactacagctagctgcacattgtgtagagcagcttctaaattgttagactttgtgttgaaatgtaatattctatttattgagaaagtgatttaaaattattatttttaatcatagaaatcagggtttgggctgtattgatattgtcgatcatgaaatgtccacacttattctaagtggccaattatttggaaataaagaaggaaataaagatggcttcacatggaaatttaagttctttcagggtggagatttacttggttcatacaccttttgcctgaattaaagtatttcatgtaggaggacttttatcctttttgatagacagtttcatatatcttgaactcaatatctcagatctcttctactgtattactgaatagcatacatacatagacaatgttcgccattcactagatatttttttctattatcttacacttattcaagcttgtctgtgattaatggaattggtgtcagatgctggaatttattctgaccaatgaacacagctgactcaggggagtacaatctcctgccaagtaatagaaccaaacccaatatgcataaaagaaatacaatactccaggctttagctgaaggaagcaactacctgtgtaataacaaagcagcaaaaactatttctcatgtggctgcataggctgtatattatatctgatctctaatgtagcttactggtttgccttttttaaaaccaaaattggaaattttcctttgtaaagaaaaaaagtcttatgagataattgcttgattaatgttttgaacaataccaagaaattgtttaattaaaataaatatttttgtttgaaattgaa

SEQ ID NO: 419202 - DNA, 2465 bp, Homo sapiens
gaaaagataacaatttcagtgtccatcctttttgtagtgatgaggaatttaaatccaccttcatcaaactgggaggtggaaaagttgagctgtgacctgaagatccatggtttggaacaagagctggaactgatgaggaaagaatgtagcgatctcaaaatagaactacagaaagccaaacaaacggatccatatcaggaagacaatctgaagagcagagatctccaaaaactaagcatttcaagtgataatatgcagcatgcatactgggaactgaagagagaaatgtctaatttacatctggtgactcaagtacaagctgaactactaagaaaactgaaaacctcaactgcaatcaagaaagcctgtgcccctgtaggatgcagtgaagaccttggaagagacagcacaaaactgcacttgatgaattttactgcaacatacacaagacatccccctctcttaccaaatggcaaagctctttgtcataccacatcttcccctttaccaggagatgtaaaggttttatcagagaaagcaatcctccaatcatggacagacaatgagagatccattcctaatgatggtacatgctttcaggaacacagttcttatggcagaaattctctggaagacaattcctgggtatttccaagtcctcctaaatcaagtgagacagcatttggggaaactaaaactaaaactttgcctttacccaaccttccaccactgcattacttggatcaacataatcagaactgcctttataagaattaatttggaagagattcacgatttcaccatgaggacacttatctctttcagtggtcctcccaagaaattatttaacaaactgaaaggagattttgattaaaattttgcagaggtcttcagtatctatatttgaacacactgtacaatagtacaaaaaccaacatagttggttttctagtatgaaagagcaccctctagctccatattctaagaatctgaaatatgctactatactaattaataagtaaacttaaggtgtttaaaaaactctgccttctatattaattgtaaaattttgcctctcagaagaatggaattggagattgtagacgtggttttacaaaatgtgaaatgtctaaatatctgttcataaaaataaaaggaaaacatgtttcttcaaattgcataatggaacaaatggcaatgtgagtaggttacatttctgttgttataatgcgtaaagatattgaaaatataatgaaataaaagcatcttaggttataccatctttatatgctattgcgtttcaatatttaagatttaaagtgattttttggtcacagtgttttgttgataaaatttttttagaattgaagtttgaattctaagacttgaaacaacctgatcactgaagccaactttgtcccagcacattccttaagtcctaattgggaaaaaaaaaaaaaaaaatgaaatagttgaaaaactctggggtgtaaacaaatgattgtaaccctacacactattcaataagtagtagaaggagcatcacacagatttcagtctaatctgcccttctgtgggccataatataaacataaatgtgtgtaatgataaaaagtcattttcttcaaagagactacagctagctgcacattgtgtagagcagcttctaaattgttagactttgtgttgaaatgtaatattctatttattgagaaagtgatttaaaattattatttttaatcatagaaatcagggtttgggctgtattgatattgtcgatcatgaaatgtccacacttattctaagtggccaattatttggaaataaagaaggaaataaagatggcttcacatggaaatttaagttctttcagggtggagatttacttggttcatacaccttttgcctgaattaaagtatttcatgtaggaggacttttatcctttttgatagacagtttcatatatcttgaactcaatatctcagatctcttctactgtattactgaatagcatacatacatagacaatgttcgccattcactagatatttttttctattatcttacacttattcaagcttgtctgtgattaatggaattggtgtcagatgctggaatttattctgaccaatgaacacagctgactcaggggagtacaatctcctgccaagtaatagaaccaaacccaatatgcataaaagaaatacaatactccaggctttagctgaaggaagcaactacctgtgtaataacaaagcagcaaaaactatttctcatgtggctgcataggctgtatattatatctgatctctaatgtagcttactggtttgccttttttaaaaccaaaattggaaattttcctttgtaaagaaaaaaagtcttatgagataattgcttgattaatgttttgaacaataccaagaaattgtttaattaaaataaatatttttgtttgaaattgaa

SEQ ID NO: 419203 - DNA, 1413 bp, Homo sapiens
acccccacgaccgaacctggcttcgctaacgccctcccagctccctcgggcctgacttccggtttcctcgcgcgtccctggcgccgagcccgcggacagcggcagccccttttccggctgagagctcatccacacttccaatcactttccggagtgcttcccctccctccggcccgtgctggtcccgacggcgggcctgggtctcgcgcgcgtattgctgggtaacgggccttctctcgcgtcggcccggcccctcctgcctcggctcgtccctccttccagaacgtcccgggctcctgccgagtcagaagaaatgggactccctccgcgacgtgcccggagcagctcccttcgctgtggaagcggcggtgtcttcgaagaaaccggaagcccgtggtgacccctggcgacccggtttgttttcggtccgtttccaaacactaaggaatcgaaactcggcggccttgggggcggccctacgtagcctggcttctggttgtcatggatgcactggtagaagatgatatctgtattctgaatcatgaaaaagcccataagagagatacagtgactccagtttcaatatattcaggagatgaatctgttgcttcccattttgctcttgtcactgcatatgaagacatcaaaaaacgacttaaggattcagagaaagagaactctttgttaaagaagagaataagatttttggaagaaaagctaatagctcgatttgaagaagaaacaagttccgtgggacgagaacaagtaaataaggcctatcatgcatatcgagaggtttgcattgatagagataatttgaagagcaaactggacaaaatgaataaagacaactctgaatctttgaaagtattgaatgagcagctacaatctaaagaagtagaactcctccagctgaggacagaggtggaaactcagcaggtgatgaggaatttaaatccaccttcatcaaactgggaggtggaaaagttgagctgtgacctgaagatccatggtttggaacaagagctggaactgatgaggaaagaatgtagcgatctcaaaatagaactacagaaagccaaacaaacggatccatatcaggaagacaatctgaagagcagagatctccaaaaactaagcatttcaagacagagtatctgtagcacagcctggagtgcagtggcgcaatcatgggatagcatgaattttgaggactgttccctcttcgcataagaatagaagtagccatcagagttcatatactttttcaaccctttttcctcaaatacgtatcatttttacttaagtaacttcaattctgtgttttaagctatctaataattgttgtttctactatgttaagatagcctctctacattgttaccctccatccaataaaaaatactgatctga

SEQ ID NO: 419204 - DNA, 1385 bp, Homo sapiens
acccccacgaccgaacctggcttcgctaacgccctcccagctccctcgggcctgacttccggtttcctcgcgcgtccctggcgccgagcccgcggacagcggcagccccttttccggctgagagctcatccacacttccaatcactttccggagtgcttcccctccctccggcccgtgctggtcccgacggcgggcctgggtctcgcgcgcgtattgctgggtaacgggccttctctcgcgtcggcccggcccctcctgcctcggctcgtccctccttccagaacgtcccgggctcctgccgagtcagaagaaatgggactccctccgcgacgtgcccggagcagctcccttcgctgtggaagcggcggtgtcttcgaagaaaccggaagcccgtggtgacccctggcgacccggtttgttttcggtccgtttccaaacactaaggaatcgaaactcggcggccttgggggcggccctacgtagcctggcttctggttgtcatggatgcactggtagaagatgatatctgtattctgaatcatgaaaaagcccataagagagatacagtgactccagtttcaatatattcaggagatgaatctgttgcttcccattttgctcttgtcactgcatatgaagacatcaaaaaacgacttaaggattcagagaaagagaactctttgttaaagaagagaataagatttttggaagaaaagctaatagctcgatttgaagaagaaacaagttccgtgggacgagaacaagtaaataaggcctatcatgcatatcgagaggtttgcattgatagagataatttgaagagcaaactggacaaaatgaataaagacaactctgaatctttgaaagtattgaatgagcagctacaatctaaagaagtagaactcctccagctgaggacagaggtggaaactcagcaggtgataatatgcagcatgcatactgggaactgaagagagaaatgtctaatttacatctggtgactcaagtacaagctgaactactaagaaaactgaaaacctcaactgcaatcaagaaaggcaagtcactgtttaccggaaaccactgattccagccaaactgcctgaagagcaactagctgtcatatcttatcaaaatctcatcaaatgagagattgataagccaaagtatatatagtacattcgcagcctacccattctctgctttggcttcagtctcatactggtcaacttcacacataaaggtgttgctgatgtgttttttcttcagtactgtattcttttccccttgtggcttttctcagccaagtgttgcttatgtgtataagactgaggtgttaagtttgctctagttgaccttttaccacagctacttcatatatttg

SEQ ID NO: 419205 - DNA, 966 bp, Homo sapiens
ctgattctcattcctttatgtaggcagtgtttattcccttttgaagcttttaggattttggggtttcagacatttcatcagagtgcatttagaccagcatctcagacatgtcgaaaaagatgttttgatccctaaaataatgagagaaaaggccaaagagaggtgttctgaacaagttcaaggacaagtaaatttttgtgaaacattgcagatgttagatggatttgggagaattttccaaactaagtggacgaacttatatagctacataaatagtatttaattttaaatgtgtcactgccttgctgctccattggagacttcctgagggcaacagacaaactatttgatagctgaatacatatttggtaactcatatggctcattggatatgaattttggaaatctatgcttccagattactttgcttaattcttgcgtcctcatactttttctgtgaagggatatatacctaagacactaggaaaagcacatccgagattttaccaaatgttgcaagaactctggagttcttatggtagtaaaatgccggaaagaaaattctgcattgaaagaatgtctaactgcttaataactgaatgaaaatatctctgagacttcctccagccttgtgatttgttggattaatataatttaactcctagaaagttgagataaatcgtatggatgataaaaagctataatgatccagccttttatgaagaatgcaaaatggaatacctgaaggaaagggaagaattcagaaaaactggaattcctacaaagaaaaggctacagaagcttccaacaagcatgtaggcagatactcaaatgacattcaggaactctaatattcatggaagtcattttatagtccttaaataatggactcaagcatatatgtttgctttaccttaattatggaaatattaactttatctgaaataaatattttatttcaaaaaa

SEQ ID NO: 419206 - DNA, 688 bp, Homo sapiens
gttctgtaaaatctttgttaactgtcttcctaagaccttttatattttacatatagcattaaatttgaactatatggatttcaaataaaagaagagaataattgctattttcgaagaactcattttaattggttagagtaaatatgaaggcagtgatttttgtaaaatggcctttaacatattaatgtctggttatgtagaaagtgctgtaacaggatcatctgttctactataacttcatgtatgcctattaatgatacataactgtggagcaataatgtaagtgagctctgtcaaaaaaattacataaatgaattgcagtcaggagaaccttactcagtggttatgtatacaaaatttacccccccttgatatgaaaaaattttttataattgctttattttcttacggaataggcttctaaagttgcgaattgtattattgttaagtagcaaaatttgggggtagtatttcctttttgtcatgtgaaataaatttttctcttttacaatacaggacaagtaaatttttgtgaaacattgcagatgttagatggatttgggagaattttccaaactaagtggacgaacttatatagctacataaatagtagtgagtaccagaagtttattaatttgcttatattacataaaaataaaatgctttagtcatgagttaaaaagctaat

SEQ ID NO: 419207 - DNA, 554 bp, Homo sapiens
gagcctgggaaggaagagggaacgggtcctggcggtgctttgcaaagggcccgtgtttctgttgcgggaagctcccgggggtcgcacgtgcgtccgagcccaagcccctcccctccactccccttcctgcgtgccccggagccgccaagcggctacgttcttctcggcccgccgagatggcgctcgaccccgcagattttaccaaatgttgcaagaactctggagttcttatggtagtaaaatgccggaaagaaaattctgcattgaaagaatgtctaactgcttactataatgatccagccttttatgaagaatgcaaaatggaatacctgaaggaaagggaagaattcagaaaaactggaattcctacaaagaaaaggctacagaagcttccaacaagcatgtaggcagatactcaaatgacattcaggaactctaatattcatggaagtcattttatagtccttaaataatggactcaagcatatatgtttgctttaccttaattatggaaatattaactttatctgaaataaatattttatttcaaaaaa

SEQ ID NO: 419208 - DNA, 1549 bp, Homo sapiens
acccccacgaccgaacctggcttcgctaacgccctcccagctccctcgggcctgacttccggtttcctcgcgcgtccctggcgccgagcccgcggacagcggcagccccttttccggctgagagctcatccacacttccaatcactttccggagtgcttcccctccctccggcccgtgctggtcccgacggcgggcctgggtctcgcgcgcgtattgctgggtaacgggccttctctcgcgtcggcccggcccctcctgcctcggctcgtccctccttccagaacgtcccgggctcctgccgagtcagaagaaatgggactccctccgcgacgtgcccggagcagctcccttcgctgtggaagcggcggtgtcttcgaagaaaccggaagcccgtggtgacccctggcgacccggtttgttttcggtccgtttccaaacactaaggaatcgaaactcggcggccttgggggcggccctacgtagcctggcttctgggaggtcttaaaaggttttagccacagtttctccttccatcatgtttttcaggaacctaactctcagagaagtaatgctgaacctaacagcaaaagtagatgttcagagcaagtcagtttttcgttaaacaatgaagttgtcatggatgcactggtagaagatgatatctgtattctgaatcatgaaaaagcccataagagagatacagtgactccagtttcaatatattcaggagatgaatctgttgcttcccattttgctcttgtcactgcatatgaagacatcaaaaaacgacttaaggattcagagaaagagaactctttgttaaagaagagaataagatttttggaagaaaagctaatagctcgatttgaagaagaaacaagttccgtgggacgagaacaagtaaataaggcctatcatgcatatcgagaggtttgcattgatagagataatttgaagagcaaactggacaaaatgaataaagacaactctgaatctttgaaagtattgaatgagcagctacaatctaaagaagtagaactcctccagctgaggacagaggtggaaactcagcaggtgatgaggaatttaaatccaccttcatcaaactgggaggtggaaaagttgagctgtgacctgaagatccatggtttggaacaagagctggaactgatgaggaaagaatgtagcgatctcaaaatagaactacagaaagccaaacaaacggatccatatcaggaagacaatctgaagagcagagatctccaaaaactaagcatttcaagacagagtatctgtagcacagcctggagtgcagtggcgcaatcatgggatagcatgaattttgaggactgttccctcttcgcataagaatagaagtagccatcagagttcatatactttttcaaccctttttcctcaaatacgtatcatttttacttaagtaacttcaattctgtgttttaagctatctaataattgttgtttctactatgttaagatagcctctctacattgttaccctccatccaataaaaaatactgatctga

SEQ ID NO: 419209 - DNA, 863 bp, Homo sapiens
acccccacgaccgaacctggcttcgctaacgccctcccagctccctcgggcctgacttccggtttcctcgcgcgtccctggcgccgagcccgcggacagcggcagccccttttccggctgagagctcatccacacttccaatcactttccggagtgcttcccctccctccggcccgtgctggtcccgacggcgggcctgggtctcgcgcgcgtattgctgggtaacgggccttctctcgcgtcggcccggcccctcctgcctcggctcgtccctccttccagaacgtcccgggctcctgccgagtcagaagaaatgggactccctccgcgacgtgcccggagcagctcccttcgctgtggaagcggcggtgtcttcgaagaaaccggaagcccgtggtgacccctggcgacccggtttgttttcggtccgtttccaaacactaaggaatcgaaactcggcggccttgggggcggccctacgtagcctggcttctggttgtcatggatgcactggtagaagatgatatctgtattctgaatcatgaaaaagcccataagagagatacagtgactccagtttcaatatattcaggagatgaatctgttgcttcccattttgctcttgtcactgcatatgaagacatcaaaaaacgacttaaggattcagagaaagagaactctttgttaaagaagagaataagatttttggaagaaaagctaatagctcgatttgaagaagaaacaagttccgtgggacgagaacaagtaaataaggcctatcatgcatatcgagaggtttgcattgatagagataatttgaagagcaaactggacaaaatggtaagttgatttgaagcgaatga

SEQ ID NO: 419210 - DNA, 794 bp, Homo sapiens
gagcctgggaaggaagagggaacgggtcctggcggtgctttgcaaagggcccgtgtttctgttgcgggaagctcccgggggtcgcacgtgcgtccgagcccaagcccctcccctccactccccttcctgcgtgccccggagccgccaagcggctacgttcttctcggcccgccgagatggcgctcgaccccgcagattttaccaaatgttgcaagaactctggagttcttatggtagtaaaatgccggaaagaaaattctgcattgaaagaatgtctaactgcttactataatgatccagccttttatgaagaatgcaaaatggaatacctgaaggaaagggaagaattcagaaaaactggaattcctacaaagaaaaggctacagaagcttccaacaagcatgtaggcagatactcaaatgacattcaggaactctaatattcatggaagtcattttatagtccttaaataatggactcaagcatatatgtttgctttaccttaattatggaaatattaactttatctgaaataaatattttatttcaaaaaacagacaagaacacacacagcgacaaaaacaaatttgtggcgcgcgcgtcttggcgccctaaaaaaaagagttcaacacacattggggggggggcgcgcggcccagggagtgacgcacaacgcggcaaaggcgtggtcccaagacaccgggcacggcagggggggtcttccaaaaaaaagcgcgcggaacggggttggcaaccaagggtcgggccttgggtcacaggccaggagatccgcg

SEQ ID NO: 419211 - DNA, 638 bp, Homo sapiens
ttggcccctcgaggatactctagagcggccgctcgcgatctagaactagtgttgcgggaagctcccgggggtcgcacgtgcgtccgagcccaagcccctcccctccactccccttcctgcgtgccccggagccgccaagcggctacgttcttctcggcccgccgagatggcgctcgaccccgcagaccagcatctcagacatgtcgaaaaagatgttttgatccctaaaataatgagagaaaaggccaaagagaggtgttctgaacaagttcaagattttaccaaatgttgcaagaactctggagttcttatggtagtaaaatgccggaaagaaaattctgcattgaaagaatgtctaactgcttactataatgatccagccttttatgaagaatgcaaaatggaatacctgaaggaaagggaagaattcagaaaaactggaattcctacaaagaaaaggctacagaagcttccaacaagcatgtaggcagatactcaaatgacattcaggaactctaatattcatggaagtcattttatagtccttaaataatggactcaagcatatatgtttgctttacctaatatatcgccatatacttatctaatattattgcggcgcgcccggggtggcggca

SEQ ID NO: 419212 - DNA, 4680 bp, Homo sapiens
acccccacgaccgaacctggcttcgctaacgccctcccagctccctcgggcctgacttccggtttcctcgcgcgtccctggcgccgagcccgcggacagcggcagccccttttccggctgagagctcatccacacttccaatcactttccggagtgcttcccctccctccggcccgtgctggtcccgacggcgggcctgggtctcgcgcgcgtattgctgggtaacgggccttctctcgcgtcggcccggcccctcctgcctcggctcgtccctccttccagaacgtcccgggctcctgccgagtcagaagaaatgggactccctccgcgacgtgcccggagcagctcccttcgctgtggaagcggcggtgtcttcgaagaaaccggaagcccgtggtgacccctggcgacccggtttgttttcggtccgtttccaaacactaaggaatcgaaactcggcggccttgggggcggccctacgtagcctggcttctggttgtcatggatgcactggtagaagatgatatctgtattctgaatcatgaaaaagcccataagagagatacagtgactccagtttcaatatattcaggagatgaatctgttgcttcccattttgctcttgtcactgcatatgaagacatcaaaaaacgacttaaggattcagagaaagagaactctttgttaaagaagagaataagatttttggaagaaaagctaatagctcgatttgaagaagaaacaagttccgtgggacgagaacaagtaaataaggcctatcatgcatatcgagaggtttgcattgatagagataatttgaagagcaaactggacaaaatgaataaagacaactctgaatctttgaaagtattgaatgagcagctacaatctaaagaagtagaactcctccagctgaggacagaggtggaaactcagcaggtgatgaggaatttaaatccaccttcatcaaactgggaggtggaaaagttgagctgtgacctgaagatccatggtttggaacaagagctggaactgatgaggaaagaatgtagcgatctcaaaatagaactacagaaagccaaacaaacggatccatatcaggaagacaatctgaagagcagagatctccaaaaactaagcatttcaagtgataatatgcagcatgcatactgggaactgaagagagaaatgtctaatttacatctggtgactcaagtacaagctgaactactaagaaaactgaaaacctcaactgcaatcaagaaagcctgtgcccctgtaggatgcagtgaagaccttggaagagacagcacaaaactgcacttgatgaattttactgcaacatacacaagacatccccctctcttaccaaatggcaaagctctttgtcataccacatcttcccctttaccaggagatgtaaaggttttatcagagaaagcaatcctccaatcatggacagacaatgagagatccattcctaatgatggtacatgctttcaggaacacagttcttatggcagaaattctctggaagacaattcctgggtatttccaagtcctcctaaatcaagtgagacagcatttggggaaactaaaactaaaactttgcctttacccaaccttccaccactgcattacttggatcaacataatcagaactgcctttataagaattaatttggaagagattcacgatttcaccatgaggacacttatctctttcagtggtcctcccaagaaattatttaacaaactgaaaggagattttgattaaaattttgcagaggtcttcagtatctatatttgaacacactgtacaatagtacaaaaaccaacatagttggttttctagtatgaaagagcaccctctagctccatattctaagaatctgaaatatgctactatactaattaataagtaaacttaaggtgtttaaaaaactctgccttctatattaattgtaaaattttgcctctcagaagaatggaattggagattgtagacgtggttttacaaaatgtgaaatgtctaaatatctgttcataaaaataaaaggaaaacatgtttcttcaaattgcataatggaacaaatggcaatgtgagtaggttacatttctgttgttataatgcgtaaagatattgaaaatataatgaaataaaagcatcttaggttataccatctttatatgctattgcgtttcaatatttaagatttaaagtgattttttggtcacagtgttttgttgataaaatttttttagaattgaagtttgaattctaagacttgaaacaacctgatcactgaagccaactttgtcccagcacattccttaagtcctaattgggaaaaaaaaaaaaaaaaatgaaatagttgaaaaactctggggtgtaaacaaatgattgtaaccctacacactattcaataagtagtagaaggagcatcacacagatttcagtctaatctgcccttctgtgggccataatataaacataaatgtgtgtaatgataaaaagtcattttcttcaaagagactacagctagctgcacattgtgtagagcagcttctaaattgttagactttgtgttgaaatgtaatattctatttattgagaaagtgatttaaaattattatttttaatcatagaaatcagggtttgggctgtattgatattgtcgatcatgaaatgtccacacttattctaagtggccaattatttggaaataaagaaggaaataaagatggcttcacatggaaatttaagttctttcagggtggagatttacttggttcatacaccttttgcctgaattaaagtatttcatgtaggaggacttttatcctttttgatagacagtttcatatatcttgaactcaatatctcagatctcttctactgtattactgaatagcatacatacatagacaatgttcgccattcactagatatttttttctattatcttacacttattcaagcttgtctgtgattaatggaattggtgtcagatgctggaatttattctgaccaatgaacacagctgactcaggggagtacaatctcctgccaagtaatagaaccaaacccaatatgcataaaagaaatacaatactccaggctttagctgaaggaagcaactacctgtgtaataacaaagcagcaaaaactatttctcatgtggctgcataggctgtatattatatctgatctctaatgtagcttactggtttgccttttttaaaaccaaaattggaaattttcctttgtaaagaaaaaaagtcttatgagataattgcttgattaatgttttgaacaataccaagaaattgtttaattaaaataaatatttttgtttgaaattgaagtggatgtgaaatattgtccttgcctatagatctcaaaatctagtactaattgttggttgttaatatgattcatacaatagacatttgttaaaccagcttttgagtggagaaaattattttccatttaaacagtacagtgatgatagctatcaaacaggtatactaaaaagtcagtgactgtgacagtttaaagtgttagacaaatgatgtataaggttctttagtaaggaaagattagccaaaaattttttacccagctagaagcttttaaatctacacttgatatctctgttctaggtaaaattcaaacaaccaaaaaacagtggcccatctgtagcttatgaatctatttaaaattgaatattttatgttgacttctttcatactagctgaaacttgctctaaagagcttcctttggaatctttagatttctttttataaggttcaattcagtacatccataaatcgacagaatgaagaaaacataacaaaaagccacctattccttcctcttgctcccttattagctaaagtaaaatttacatctgtaagacttactgagttgctgccaaaatggaactgaattcttaaaagcaggaacgtgcctatgtgaaacattagaaaaccaaaataaatgggaaaattcagacttgaagagctgaatcatgtgacaacaaagtactgatcttaattcagaaaggctacttggagaaggtgtatcttaaggggtaaaaaacctgtgggttaccacatattaacagggaataatatcaacagaggcacccataagcaagcaagacacaactgagacagatgtaccaggtgaaaaaaatcttcagtatggatacacatgggtattctgaaggctacaatgaatggtttagtctttgacataaggaggatgaacatattatttatactgtgtaatctaatctggcttctatggggaaagcaacatgtacataagtgaattttctacatgaagtgggctacttctgattttaatcaaagctataaaatagattgtatatttcactagcttcttaaagtaactcttccattttcatttatctctaaaaacagttaacttcctgtgctctaggaaatgcaccaataccaaaggtcaatgtggaaatatgggcatgtttgcccctatgctgtgtggtctctagatttctatatttgctttgcttttgtctgctctagtaatctccctccttttgatctgtggcctgggaaaatgtggtttctttgtatttcaaataaaagtaaaatagttttttgagtggttcactcaagaaaaaaaaatg

SEQ ID NO: 419213 - DNA, 3453 bp, Homo sapiens
acccccacgaccgaacctggcttcgctaacgccctcccagctccctcgggcctgacttccggtttcctcgcgcgtccctggcgccgagcccgcggacagcggcagccccttttccggctgagagctcatccacacttccaatcactttccggagtgcttcccctccctccggcccgtgctggtcccgacggcgggcctgggtctcgcgcgcgtattgctgggtaacgggccttctctcgcgtcggcccggcccctcctgcctcggctcgtccctccttccagaacgtcccgggctcctgccgagtcagaagaaatgggactccctccgcgacgtgcccggagcagctcccttcgctgtggaagcggcggtgtcttcgaagaaaccggaagcccgtggtgacccctggcgacccggtttgttttcggtccgtttccaaacactaaggaatcgaaactcggcggccttgggggcggccctacgtagcctggcttctgggaacctaactctcagagaagtaatgctgaacctaacagcaaaagtagatgttcagagcaagtcagtttttcgttaaacaatgaagttgtcatggatgcactggtagaagatgatatctgtattctgaatcatgaaaaagcccataagagagatacagtgactccagtttcaatatattcaggagatgaatctgttgcttcccattttgctcttgtcactgcatatgaagacatcaaaaaacgacttaaggattcagagaaagagaactctttgttaaagaagagaataagatttttggaagaaaagctaatagctcgatttgaagaagaaacaagttccgtgggacgagaacaagtaaataaggcctatcatgcatatcgagaggtttgcattgatagagataatttgaagagcaaactggacaaaatgaataaagacaactctgaatctttgaaagtattgaatgagcagctacaatctaaagaagtagaactcctccagctgaggacagaggtggaaactcagcaggtgatgaggaatttaaatccaccttcatcaaactgggaggtggaaaagttgagctgtgacctgaagatccatggtttggaacaagagctggaactgatgaggaaagaatgtagcgatctcaaaatagaactacagaaagccaaacaaacggatccatatcaggaagacaatctgaagagcagagatctccaaaaactaagcatttcaagtgataatatgcagcatgcatactgggaactgaagagagaaatgtctaatttacatctggtgactcaagtacaagctgaactactaagaaaactgaaaacctcaactgcaatcaagaaagcctgtgcccctgtaggatgcagtgaagaccttggaagagacagcacaaaactgcacttgatgaattttactgcaacatacacaagacatccccctctcttaccaaatggcaaagctctttgtcataccacatcttcccctttaccaggagatgtaaaggttttatcagagaaagcaatcctccaatcatggacagacaatgagagatccattcctaatgatggtacatgctttcaggaacacagttcttatggcagaaattctctggaagacaattcctgggtatttccaagtcctcctaaatcaagtgagacagcatttggggaaactaaaactaaaactttgcctttacccaaccttccaccactgcattacttggatcaacataatcagaactgcctttataagaattaatttggaagagattcacgatttcaccatgaggacacttatctctttcagtggtcctcccaagaaattatttaacaaactgaaaggagattttgattaaaattttgcagaggtcttcagtatctatatttgaacacactgtacaatagtacaaaaaccaacatagttggttttctagtatgaaagagcaccctctagctccatattctaagaatctgaaatatgctactatactaattaataagtaaacttaaggtgtttaaaaaactctgccttctatattaattgtaaaattttgcctctcagaagaatggaattggagattgtagacgtggttttacaaaatgtgaaatgtctaaatatctgttcataaaaataaaaggaaaacatgtttcttcaaattgcataatggaacaaatggcaatgtgagtaggttacatttctgttgttataatgcgtaaagatattgaaaatataatgaaataaaagcatcttaggttataccatctttatatgctattgcgtttcaatatttaagatttaaagtgattttttggtcacagtgttttgttgataaaatttttttagaattgaagtttgaattctaagacttgaaacaacctgatcactgaagccaactttgtcccagcacattccttaagtcctaattgggaaaaaaaaaaaaaaaaatgaaatagttgaaaaactctggggtgtaaacaaatgattgtaaccctacacactattcaataagtagtagaaggagcatcacacagatttcagtctaatctgcccttctgtgggccataatataaacataaatgtgtgtaatgataaaaagtcattttcttcaaagagactacagctagctgcacattgtgtagagcagcttctaaattgttagactttgtgttgaaatgtaatattctatttattgagaaagtgatttaaaattattatttttaatcatagaaatcagggtttgggctgtattgatattgtcgatcatgaaatgtccacacttattctaagtggccaattatttggaaataaagaaggaaataaagatggcttcacatggaaatttaagttctttcagggtggagatttacttggttcatacaccttttgcctgaattaaagtatttcatgtaggaggacttttatcctttttgatagacagtttcatatatcttgaactcaatatctcagatctcttctactgtattactgaatagcatacatacatagacaatgttcgccattcactagatatttttttctattatcttacacttattcaagcttgtctgtgattaatggaattggtgtcagatgctggaatttattctgaccaatgaacacagctgactcaggggagtacaatctcctgccaagtaatagaaccaaacccaatatgcataaaagaaatacaatactccaggctttagctgaaggaagcaactacctgtgtaataacaaagcagcaaaaactatttctcatgtggctgcataggctgtatattatatctgatctctaatgtagcttactggtttgccttttttaaaaccaaaattggaaattttcctttgtaaagaaaaaaagtcttatgagataattgcttgattaatgttttgaacaataccaagaaattgtttaattaaaataaatatttttgtttgaaattgaa

SEQ ID NO: 419214 - DNA, 3147 bp, Homo sapiens
ttggcccctcgaggatactctagagcggccgctcgcgatctagaactagtgttgcgggaagctcccgggggtcgcacgtgcgtccgagcccaagcccctcccctccactccccttcctgcgtgccccggagccgccaagcggctacgttcttctcggcccgccgagatggcgctcgaccccgcagaccagcatctcagacatgtcgaaaaagatgttttgatccctaaaataatgagagaaaaggccaaagagaggtgttctgaacaagttcaagttgtcatggatgcactggtagaagatgatatctgtattctgaatcatgaaaaagcccataagagagatacagtgactccagtttcaatatattcaggagatgaatctgttgcttcccattttgctcttgtcactgcatatgaagacatcaaaaaacgacttaaggattcagagaaagagaactctttgttaaagaagagaataagatttttggaagaaaagctaatagctcgatttgaagaagaaacaagttccgtgggacgagaacaagtaaataaggcctatcatgcatatcgagaggtttgcattgatagagataatttgaagagcaaactggacaaaatgaataaagacaactctgaatctttgaaagtattgaatgagcagctacaatctaaagaagtagaactcctccagctgaggacagaggtggaaactcagcaggtgatgaggaatttaaatccaccttcatcaaactgggaggtggaaaagttgagctgtgacctgaagatccatggtttggaacaagagctggaactgatgaggaaagaatgtagcgatctcaaaatagaactacagaaagccaaacaaacggatccatatcaggaagacaatctgaagagcagagatctccaaaaactaagcatttcaagtgataatatgcagcatgcatactgggaactgaagagagaaatgtctaatttacatctggtgactcaagtacaagctgaactactaagaaaactgaaaacctcaactgcaatcaagaaagcctgtgcccctgtaggatgcagtgaagaccttggaagagacagcacaaaactgcacttgatgaattttactgcaacatacacaagacatccccctctcttaccaaatggcaaagctctttgtcataccacatcttcccctttaccaggagatgtaaaggttttatcagagaaagcaatcctccaatcatggacagacaatgagagatccattcctaatgatggtacatgctttcaggaacacagttcttatggcagaaattctctggaagacaattcctgggtatttccaagtcctcctaaatcaagtgagacagcatttggggaaactaaaactaaaactttgcctttacccaaccttccaccactgcattacttggatcaacataatcagaactgcctttataagaattaatttggaagagattcacgatttcaccatgaggacacttatctctttcagtggtcctcccaagaaattatttaacaaactgaaaggagattttgattaaaattttgcagaggtcttcagtatctatatttgaacacactgtacaatagtacaaaaaccaacatagttggttttctagtatgaaagagcaccctctagctccatattctaagaatctgaaatatgctactatactaattaataagtaaacttaaggtgtttaaaaaactctgccttctatattaattgtaaaattttgcctctcagaagaatggaattggagattgtagacgtggttttacaaaatgtgaaatgtctaaatatctgttcataaaaataaaaggaaaacatgtttcttcaaattgcataatggaacaaatggcaatgtgagtaggttacatttctgttgttataatgcgtaaagatattgaaaatataatgaaataaaagcatcttaggttataccatctttatatgctattgcgtttcaatatttaagatttaaagtgattttttggtcacagtgttttgttgataaaatttttttagaattgaagtttgaattctaagacttgaaacaacctgatcactgaagccaactttgtcccagcacattccttaagtcctaattgggaaaaaaaaaaaaaaaaatgaaatagttgaaaaactctggggtgtaaacaaatgattgtaaccctacacactattcaataagtagtagaaggagcatcacacagatttcagtctaatctgcccttctgtgggccataatataaacataaatgtgtgtaatgataaaaagtcattttcttcaaagagactacagctagctgcacattgtgtagagcagcttctaaattgttagactttgtgttgaaatgtaatattctatttattgagaaagtgatttaaaattattatttttaatcatagaaatcagggtttgggctgtattgatattgtcgatcatgaaatgtccacacttattctaagtggccaattatttggaaataaagaaggaaataaagatggcttcacatggaaatttaagttctttcagggtggagatttacttggttcatacaccttttgcctgaattaaagtatttcatgtaggaggacttttatcctttttgatagacagtttcatatatcttgaactcaatatctcagatctcttctactgtattactgaatagcatacatacatagacaatgttcgccattcactagatatttttttctattatcttacacttattcaagcttgtctgtgattaatggaattggtgtcagatgctggaatttattctgaccaatgaacacagctgactcaggggagtacaatctcctgccaagtaatagaaccaaacccaatatgcataaaagaaatacaatactccaggctttagctgaaggaagcaactacctgtgtaataacaaagcagcaaaaactatttctcatgtggctgcataggctgtatattatatctgatctctaatgtagcttactggtttgccttttttaaaaccaaaattggaaattttcctttgtaaagaaaaaaagtcttatgagataattgcttgattaatgttttgaacaataccaagaaattgtttaattaaaataaatatttttgtttgaaattgaa

SEQ ID NO: 419215 - DNA, 2293 bp, Homo sapiens
tcgacggcagagtactcgagttccttgactgaggacatgatgtatataactagtgtaaagactttactttcattgataatatgcagcatgcatactgggaactgaagagagaaatgtctaatttacatctggtgactcaagtacaagctgaactactaagaaaactgaaaacctcaactgcaatcaagaaagcctgtgcccctgtaggatgcagtgaagaccttggaagagacagcacaaaactgcacttgatgaattttactgcaacatacacaagacatccccctctcttaccaaatggcaaagctctttgtcataccacatcttcccctttaccaggagatgtaaaggttttatcagagaaagcaatcctccaatcatggacagacaatgagagatccattcctaatgatggtacatgctttcaggaacacagttcttatggcagaaattctctggaagacaattcctgggtatttccaagtcctcctaaatcaagtgagacagcatttggggaaactaaaactaaaactttgcctttacccaaccttccaccactgcattacttggatcaacataatcagaactgcctttataagaattaatttggaagagattcacgatttcaccatgaggacacttatctctttcagtggtcctcccaagaaattatttaacaaactgaaaggagattttgattaaaattttgcagaggtcttcagtatctatatttgaacacactgtacaatagtacaaaaaccaacatagttggttttctagtatgaaagagcaccctctagctccatattctaagaatctgaaatatgctactatactaattaataagtaaacttaaggtgtttaaaaaactctgccttctatattaattgtaaaattttgcctctcagaagaatggaattggagattgtagacgtggttttacaaaatgtgaaatgtctaaatatctgttcataaaaataaaaggaaaacatgtttcttcaaattgcataatggaacaaatggcaatgtgagtaggttacatttctgttgttataatgcgtaaagatattgaaaatataatgaaataaaagcatcttaggttataccatctttatatgctattgcgtttcaatatttaagatttaaagtgattttttggtcacagtgttttgttgataaaatttttttagaattgaagtttgaattctaagacttgaaacaacctgatcactgaagccaactttgtcccagcacattccttaagtcctaattgggaaaaaaaaaaaaaaaaatgaaatagttgaaaaactctggggtgtaaacaaatgattgtaaccctacacactattcaataagtagtagaaggagcatcacacagatttcagtctaatctgcccttctgtgggccataatataaacataaatgtgtgtaatgataaaaagtcattttcttcaaagagactacagctagctgcacattgtgtagagcagcttctaaattgttagactttgtgttgaaatgtaatattctatttattgagaaagtgatttaaaattattatttttaatcatagaaatcagggtttgggctgtattgatattgtcgatcatgaaatgtccacacttattctaagtggccaattatttggaaataaagaaggaaataaagatggcttcacatggaaatttaagttctttcagggtggagatttacttggttcatacaccttttgcctgaattaaagtatttcatgtaggaggacttttatcctttttgatagacagtttcatatatcttgaactcaatatctcagatctcttctactgtattactgaatagcatacatacatagacaatgttcgccattcactagatatttttttctattatcttacacttattcaagcttgtctgtgattaatggaattggtgtcagatgctggaatttattctgaccaatgaacacagctgactcaggggagtacaatctcctgccaagtaatagaaccaaacccaatatgcataaaagaaatacaatactccaggctttagctgaaggaagcaactacctgtgtaataacaaagcagcaaaaactatttctcatgtggctgcataggctgtatattatatctgatctctaatgtagcttactggtttgccttttttaaaaccaaaattggaaattttcctttgtaaagaaaaaaagtcttatgagataattgcttgattaatgttttgaacaataccaagaaattgtttaattaaaataaatatttttgtttgaaattgaa

SEQ ID NO: 419216 - DNA, 751 bp, Homo sapiens
gagcctgggaaggaagagggaacgggtcctggcggtgctttgcaaagggcccgtgtttctgttgcgggaagctcccgggggtcgcacgtgcgtccgagcccaagcccctcccctccactccccttcctgcgtgccccggagccgccaagcggctacgttcttctcggcccgccgagatggcgctcgaccccgcagaccagcatctcagacatgtcgaaaaagatgttttgatccctaaaataatgagagaaaaggccaaagagaggtgttctgaacaagttcaagattttaccaaatgttgcaagaactctggagttcttatggtagtaaaatgccggaaagaaaattctgcattgaaagaatgtctaactgcttaataactgaatgaaaatatctctgagacttcctccagccttgtgatttgttggattaatataatttaactcctagaaagttgagataaatcgtatggatgataaaaagctataatgatccagccttttatgaagaatgcaaaatggaatacctgaaggaaagggaagaattcagaaaaactggaattcctacaaagaaaaggctacagaagcttccaacaagcatgtaggcagatactcaaatgacattcaggaactctaatattcatggaagtcattttatagtccttaaataatggactcaagcatatatgtttgctttaccttaattatggaaatattaactttatctgaaataaatattttatttcaaaaaa

SEQ ID NO: 419217 - DNA, 1021 bp, Homo sapiens
acccccacgaccgaacctggcttcgctaacgccctcccagctccctcgggcctgacttccggtttcctcgcgcgtccctggcgccgagcccgcggacagcggcagccccttttccggctgagagctcatccacacttccaatcactttccggagtgcttcccctccctccggcccgtgctggtcccgacggcgggcctgggtctcgcgcgcgtattgctgggtaacgggccttctctcgcgtcggcccggcccctcctgcctcggctcgtccctccttccagaacgtcccgggctcctgccgagtcagaagaaatgggactccctccgcgacgtgcccggagcagctcccttcgctgtggaagcggcggtgtcttcgaagaaaccggaagcccgtggtgacccctggcgacccggtttgttttcggtccgtttccaaacactaaggaatcgaaactcggcggccttgggggcggccctacgtagcctggcttctggttgtcatggatgcactggtagaagatgatatctgtattctgaatcatgaaaaagcccataagagagatacagtgactccagtttcaatatattcaggagatgaatctgttgcttcccattttgctcttgtcactgcatatgaagacatcaaaaaacgacttaaggattcagagaaagagaactctttgttaaagaagagaataagatttttggaagaaaaggtaatttttatcttttaccttcattgcgtttgtgacataaggaataattcaaaatacttgaaattttgaatactttttgtcctgtcttccatgattgtactaaatttccaagaataactcactgctaatctgaaaactctgggcattatacttatcctgtgtttcacataccatgtacttggtaaatatttgtaggagaggatttaacaacttggagttatattccaaatatttttctttcattttcaggtttacttacctccatagctgtatgtattttattcagaattttcaaatctgggca

SEQ ID NO: 419218 - DNA, 3389 bp, Homo sapiens
agcagaggaagccgaggggcggcatcttggctccgtgaggctctgaggtgccggggtgcggcggcggcagcggcggccagcagggcggaggctgaggcagcaagctcgctagagagggagaagcagtcgggcgcaggcgcctcctccgcagcccgctccatggtcggcgcccacagcccgcggcggcctgtcttgcgctccacttccttcacatcctcctccgcctcctcgttttcaggcgccgccggcggcgctgtgtggaggcccgcgagctgaaattcgcggtgcgacgggagggagtggagaaggaggtgagggggcccaggatcgcggggcgccctgaggcaaggggacgccggcgggccgaagcgcagcccgccgcccgcaggctcggctccgccactgccgccctcccggtctcctcgcctcggccgccgaggcagggagagaatgagccccgggacccgccgggggacggcccgggccaggcccgggatctagacggccgtagggggaagggagccgccctccccacggcgccttttcggaactgccgtggactcgaggacgctggtcgccggcctcctagggctgtgctgttatgttttgaccctcgcattgtgcagaattaaagtgcagtaaaatgtccactaggaccccattgccaacggtgaatgaacgagacactgaaaaccacacgtcacatggagatgggcgtcaagaagttacctctcgtaccagccgctcaggagctcggtgtagaaactctatagcctcctgtgcagatgaacaacctcacatcggaaactacagactgttgaaaacaatcggcaaggggaattttgcaaaagtaaaattggcaagacatatccttacaggcagagaggttgcaataaaaataattgacaaaactcagttgaatccaacaagtctacaaaagctcttcagagaagtaagaataatgaagattttaaatcatcccaatatagtgaagttattcgaagtcattgaaactgaaaaaacactctacctaatcatggaatatgcaagtggaggtgaagtatttgactatttggttgcacatggcaggatgaaggaaaaagaagcaagatctaaatttagacagattgtgtctgcagttcaatactgccatcagaaacggatcgtacatcgagacctcaaggctgaaaatctattgttagatgccgatatgaacattaaaatagcagatttcggttttagcaatgaatttactgttggcggtaaactcgacacgttttgtggcagtcctccatacgcagcacctgagctcttccagggcaagaaatatgacgggccagaagtggatgtgtggagtctgggggtcattttatacacactagtcagtggctcacttccctttgatgggcaaaacctaaaggaactgagagagagagtattaagagggaaatacagaattcccttctacatgtctacagactgtgaaaaccttctcaaacgtttcctggtgctaaatccaattaaacgcggcactctagagcaaatcatgaaggacaggtggatcaatgcagggcatgaagaagatgaactcaaaccatttgttgaaccagagctagacatctcagaccaaaaaagaatagatattatggtgggaatgggatattcacaagaagaaattcaagaatctcttagtaagatgaaatacgatgaaatcacagctacatatttgttattggggagaaaatcttcagaggttaggccgagcagtgatctcaacaacagtactggccagtctcctcaccacaaagtgcagagaagtgtttcttcaagccaaaagcaaagacgctacagtgaccatgctggaccagctattccttctgttgtggcgtatccgaaaaggagtcagaccagcactgcagatagtgacctcaaagaagatggaatttcctcccggaaatcaagtggcagtgctgttggaggaaagggaattgctccagccagtcccatgcttgggaatgcaagtaatcctaataaggcggatattcctgaacgcaagaaaagctccactgtccctagtagtaacacagcatctggtggaatgacacgacgaaatacttatgtttgcagtgagagaactacagctgatagacactcagtgattcagaatggcaaagaaaacagcactattcctgatcagagaactccagttgcttcaacacacagtatcagtagtgcagccaccccagatcgaatccgcttcccaagaggcactgccagtcgtagcactttccacggccagccccgggaacggcgaaccgcaacatataatggccctcctgcctctcccagcctgtcccatgaagccacaccattgtcccagactcgaagccgaggctccactaatctctttagtaaattaacttcaaaactcacaaggagtcgcaatgtatctgctgagcaaaaagatgaaaacaaagaagcaaagcctcgatccctacgcttcacctggagcatgaaaaccactagttcaatggatcccggggacatgatgcgggaaatccgcaaagtgttggacgccaataactgcgactatgagcagagggagcgcttcttgctcttctgcgtccacggagatgggcacgcggagaacctcgtgcagtgggaaatggaagtgtgcaagctgccaagactgtctctgaacggggtccggtttaagcggatatcggggacatccatagccttcaaaaatattgcttccaaaattgccaatgagctaaagctgtaacccagtgattatgatgtaaattaagtagcaattaaagtgttttcctgaacactgatggaaatgtatagaataatatttaggcaataacgtctgcatcttctaaatcatgaaattaaagtctgaggacgagagcacgcctgggagcgaaagctggccttttttctacgaatgcactacattaaagatgtgcaacctatgcgccccctgccctacttccgttaccctgagagtcggcgtgtggccccatctccatgtgcctcccgtctgggtgggtgtgagagtggacggtatgtgtgtgaagtggtgtatatggaagcatctccctacactggcagccagtcattactagtacctctgcgggagatcatccggtgctaaaacattacagttgccaaggaggaaaatactgaatgactgctaagaattaaccttaagaccagttcatagttaatacaggtttacagttcatgcctgtggttttgtgtttgttgttttgtgtttttttagtgcaaaaggtttaaatttatagttgtgaacattgcttgtgtgtgtttttctaagtagattcacaagataattaaaaattcactttttctcagtaaaa

SEQ ID NO: 419219 - DNA, 2677 bp, Homo sapiens
  misc_feature (944)..(944): n is a, c, g, or t
  misc_feature (1879)..(1879): n is a, c, g, or t
gagttggagtcttgctctgtcacccaggctggagtgcagtggcatgatctcagctcactgcaacctccaggaggtgttgtaatttagcagttgggaagtaattgggagatttgaattctagctaccaattcaactataatggattggaaaacaagatttctgtgttagtttaacagaggagagctaaaaaagaactcaggcctgaatggttgtcaggaatttacttgggtgactatcttctcatctcagaacataaaatgtaggaattaccacagttgcaaagggagatgtttatgttggagataaaaatgctcctcccttcaaaaatgagacagtattttagataggaaaggttatttatctgattacatgttttaaaattctgagcgtaaggttatatgtcaaatcctgtccatgggctgggcacagtggcccacacctgtgatcctagcactttggaaggctgagggggaggattgattgagcccaggaggtcaaggctacagtgaactatgatcacaccactgcacttcaacctgggcagcagagcgagaccctgtctcaaaaaataaaaataaattaacaaaaaaatctggtccatgtccatctcctcttagctgctaattcaattttagattagacacagtggacaaggacaagtatggtgagagtcctgtgatttctcaccagcttcctttccacataggccactgcttctcttcttccaaggtttttccccgcttttgcctcctggaggttgtatcctgggtgttaggagactgggttccggacacattccccacagaaggatagcaggaccttagaagatctttttctttcttttcctggtttcctcttgtttgcaagagggttgaataggatggtctctaaaatcctgttgtttttctgggttatattaacccaggccataatgataagaaccngctctgaattcacaacatgtatttatacaacagcaatttaatatttcttattctgtggaatggctaggaagctctgctggtcttggttggatggttttttgtttgtttttttttgagacagggtctcgctttgtcgcccaggctggagtgcagtgacgccatcagctctctgcaacctccacttcccaggctcaagtgattctcttgctcagcctcccgagtagctgggactacagacacatgctactgcacccagctaatttctgtatttttagtagagatggggtttcaccatgttgcccaggctggtctcgacctcctgagctcaagtgatccacccaccttggtttcccaaagtgctgggattacaggtgtgagccaccgtgctcggctggtttttcttaaggtctcacctgggttcacttgtgtggctgaattcagctggtggtttggcaggggctggatgcagttacaacagaggatctgtctctttaaataactacccttcatccccaaagaggccagaccagctccttcacagtgctccaagagagcaagccatgacgcccaagcattttatccagcctctgcttgcttcagtttgctaaggtcccactggccaaagcagattacatggccaggtctaatgtcaatatgaagggggcactccacaaaagcgtgaacatgtaaggcatgactcatgagggtcactaatgtaatagtcaccacaacctccatgctaagttacctatattctccagtgaggatttctcaaggtggttttgttcatagtcttctaatagaattatttggaattatcagtttaatatgcttatgatgtatttcactggaaccatacaggttttgattcgcagagttgggagccctgggtagatactgaatcagactaagtttaatcacagaaattattcctncgtaagtctgatcttatgttttcaagatagcattgtaaaattcagagtatgttaccatccccctttgagacctctgctgtttttaataaatggaagcatttgggaatactatttggtaatagtttattaaaactacttcagagatattctggactttcatattagtcttagatatggattaataaacattagcaatgaatctgttatctaagagaaaaatttaaatttatattacaacagtggaatataatgtttaataacttgtgttggggggattatgtgttttgtttgtttttttttttagctcttcagagaagtaagaataatgaagattttaaatcatcccaatataggtactttctgcttttttaaatattttggggtctaaatacgtacttgaaattatgtcataaagctaaacacgtattctagaaatggtagagtacacttctagtaaaatatatatacaagttgttgatcatttgtattagctttttgaaattgctgaagacaggttaaaagcttaggtattaaacgttgaatttaaagctttaatctggtagaaacatctgtactctgattataattttctaatttttaagtatattagaaaatataattgtattgcatgagtagatagaagggaattataggaagtcagaattaatattttcaaaggggctgggcacagtggctcatgcctgtaattccagcactttgggaaaccaaggcaggaggattgctggaggtcaggagctcaagaccagcctaagcaacagagcgagaccccgtctctcc

SEQ ID NO: 419220 - DNA, 854 bp, Homo sapiens
  misc_feature (556)..(556): n is a, c, g, or t
  misc_feature (563)..(563): n is a, c, g, or t
  misc_feature (568)..(568): n is a, c, g, or t
  misc_feature (573)..(573): n is a, c, g, or t
  misc_feature (588)..(589): n is a, c, g, or t
aaataagttgtattaagatagtagaaataggctggattacaggtgtgagcccccacgtccggccttttttgtgtcttctttaagaaattcttctctacctggggtcataaacatatttttctctgttgtcttcacatgtttaaagtaatctttaagccaccagcagtcatgtgttacgaggtagggatccagtttcatggtttttcgtatgtataatcacttgctgcctcacctctcctttctttgctgatctgcatcgtggacagagtctccgtgtctaaacgcacactttgttcttcagaagtggttattctggttcacttaacaattgccatttgaaaagcaattatttttattttattttcatatttttaaattttatttttaatgataggacaccaaatgataaccagaaccccaaaatacataggtgaaaatctgagctaaattaatagaaacacaggcatgacagagaagactttatcacttaactctcttaggccattcattaattacacagtaagtagggggaaaaggtacatatcttaatatcacnacacgcntgccnattanttttatgaatgaggnntgatgatggggctgtctgtgccagatgatgtacagcagcttacgcctgagctggatcttggtaagacttccccagccctaggtactgctaaggggcacaccgctagaccgtttaattggaggccatggcactggaaatgacgcgaaaaaaaagagttttgggggctctgggtttgcgcggtagggggctgccttaggacctcggaaggcgcttcctgcgccgcgcggtgcagacgcgttttcggaaggccaagggcttgggacct

SEQ ID NO: 419221 - DNA, 3437 bp, Homo sapiens
agcagaggaagccgaggggcggcatcttggctccgtgaggctctgaggtgccggggtgcggcggcggcagcggcggccagcagggcggaggctgaggcagcaagctcgctagagagggagaagcagtcgggcgcaggcgcctcctccgcagcccgctccatggtcggcgcccacagcccgcggcggcctgtcttgcgctccacttccttcacatcctcctccgcctcctcgttttcaggcgccgccggcggcgctgtgtggaggcccgcgagctgaaattcgcggtgcgacgggagggagtggagaaggaggtgagggggcccaggatcgcggggcgccctgaggcaaggggacgccggcgggccgaagcgcagcccgccgcccgcaggctcggctccgccactgccgccctcccggtctcctcgcctcggccgccgaggcagggagagaatgagccccgggacccgccgggggacggcccgggccaggcccgggatctagacggccgtagggggaagggagccgccctccccacggcgccttttcggaactgccgtggactcgaggacgctggtcgccggcctcctagggctgtgctgttatgttttgaccctcgcattgtgcagaattaaagtgcagtaaaatgtccactaggaccccattgccaacggtgaatgaacgagacactgaaaaccacacgtcacatggagatgggcgtcaagaagttacctctcgtaccagccgctcaggagctcggtgtagaaactctatagcctcctgtgcagatgaacaacctcacatcggaaactacagactgttgaaaacaatcggcaaggggaattttgcaaaagtaaaattggcaagacatatccttacaggcagagaggttgcaataaaaataattgacaaaactcagttgaatccaacaagtctacaaaagctcttcagagaagtaagaataatgaagattttaaatcatcccaatatagtgaagttattcgaagtcattgaaactgaaaaaacactctacctaatcatggaatatgcaagtggaggtgaagtatttgactatttggttgcacatggcaggatgaaggaaaaagaagcaagatctaaatttagacagattgtgtctgcagttcaatactgccatcagaaacggatcgtacatcgagacctcaaggctgaaaatctattgttagatgccgatatgaacattaaaatagcagatttcggttttagcaatgaatttactgttggcggtaaactcgacacgttttgtggcagtcctccatacgcagcacctgagctcttccagggcaagaaatatgacgggccagaagtggatgtgtggagtctgggggtcattttatacacactagtcagtggctcacttccctttgatgggcaaaacctaaaggaactgagagagagagtattaagagggaaatacagaattcccttctacatgtctacagactgtgaaaaccttctcaaacgtttcctggtgctaaatccaattaaacgcggcactctagagcaaatcatgaaggacaggtggatcaatgcagggcatgaagaagatgaactcaaaccatttgttgaaccagagctagacatctcagaccaaaaaagaatagatattatggtgggaatgggatattcacaagaagaaattcaagaatctcttagtaagatgaaatacgatgaaatcacagctacatatttgttattggggagaaaatcttcagagctggatgctagtgattccagttctagcagcaatctttcacttgctaaggttaggccgagcagtgatctcaacaacagtactggccagtctcctcaccacaaagtgcagagaagtgtttcttcaagccaaaagcaaagacgctacagtgaccatgctggaccagctattccttctgttgtggcgtatccgaaaaggagtcagaccagcactgcagatagtgacctcaaagaagatggaatttcctcccggaaatcaagtggcagtgctgttggaggaaagggaattgctccagccagtcccatgcttgggaatgcaagtaatcctaataaggcggatattcctgaacgcaagaaaagctccactgtccctagtagtaacacagcatctggtggaatgacacgacgaaatacttatgtttgcagtgagagaactacagctgatagacactcagtgattcagaatggcaaagaaaacagcactattcctgatcagagaactccagttgcttcaacacacagtatcagtagtgcagccaccccagatcgaatccgcttcccaagaggcactgccagtcgtagcactttccacggccagccccgggaacggcgaaccgcaacatataatggccctcctgcctctcccagcctgtcccatgaagccacaccattgtcccagactcgaagccgaggctccactaatctctttagtaaattaacttcaaaactcacaaggagtcgcaatgtatctgctgagcaaaaagatgaaaacaaagaagcaaagcctcgatccctacgcttcacctggagcatgaaaaccactagttcaatggatcccggggacatgatgcgggaaatccgcaaagtgttggacgccaataactgcgactatgagcagagggagcgcttcttgctcttctgcgtccacggagatgggcacgcggagaacctcgtgcagtgggaaatggaagtgtgcaagctgccaagactgtctctgaacggggtccggtttaagcggatatcggggacatccatagccttcaaaaatattgcttccaaaattgccaatgagctaaagctgtaacccagtgattatgatgtaaattaagtagcaattaaagtgttttcctgaacactgatggaaatgtatagaataatatttaggcaataacgtctgcatcttctaaatcatgaaattaaagtctgaggacgagagcacgcctgggagcgaaagctggccttttttctacgaatgcactacattaaagatgtgcaacctatgcgccccctgccctacttccgttaccctgagagtcggcgtgtggccccatctccatgtgcctcccgtctgggtgggtgtgagagtggacggtatgtgtgtgaagtggtgtatatggaagcatctccctacactggcagccagtcattactagtacctctgcgggagatcatccggtgctaaaacattacagttgccaaggaggaaaatactgaatgactgctaagaattaaccttaagaccagttcatagttaatacaggtttacagttcatgcctgtggttttgtgtttgttgttttgtgtttttttagtgcaaaaggtttaaatttatagttgtgaacattgcttgtgtgtgtttttctaagtagattcacaagataattaaaaattcactttttctcagtaaaa

SEQ ID NO: 419222 - DNA, 3559 bp, Homo sapiens
agcagaggaagccgaggggcggcatcttggctccgtgaggctctgaggtgccggggtgcggcggcggcagcggcggccagcagggcggaggctgaggcagcaagctcgctagagagggagaagcagtcgggcgcaggcgcctcctccgcagcccgctccatggtcggcgcccacagcccgcggcggcctgtcttgcgctccacttccttcacatcctcctccgcctcctcgttttcaggcgccgccggcggcgctgtgtggaggcccgcgagctgaaattcgcggtgcgacgggagggagtggagaaggaggtgagggggcccaggatcgcggggcgccctgaggcaaggggacgccggcgggccgaagcgcagcccgccgcccgcaggctcggctccgccactgccgccctcccggtctcctcgcctcggccgccgaggcagggagagaatgagccccgggacccgccgggggacggcccgggccaggcccgggatctagacggccgtagggggaagggagccgccctccccacggcgccttttcggaactgccgtggactcgaggacgctggtcgccggcctcctagggctgtgctgttatgttttgaccctcgcattgtgcagaattaaagtgcagtaaaatgtccactaggaccccattgccaacggtgaatgaacgagacactgaaaaccacacgtcacatggagatgggcgtcaagaagttacctctcgtaccagccgctcaggagctcggtgtagaaactctatagcctcctgtgcagatgaacaacctcacatcggaaactacagactgttgaaaacaatcggcaaggggaattttgcaaaagtaaaattggcaagacatatccttacaggcagagaggttgcaataaaaataattgacaaaactcagttgaatccaacaagtctacaaaagctcttcagagaagtaagaataatgaagattttaaatcatcccaatatagtgaagttattcgaagtcattgaaactgaaaaaacactctacctaatcatggaatatgcaagtggaggtgaagtatttgactatttggttgcacatggcaggatgaaggaaaaagaagcaagatctaaatttagacagattgtgtctgcagttcaatactgccatcagaaacggatcgtacatcgagacctcaaggctgaaaatctattgttagatgccgatatgaacattaaaatagcagatttcggttttagcaatgaatttactgttggcggtaaactcgacacgttttgtggcagtcctccatacgcagcacctgagctcttccagggcaagaaatatgacgggccagaagtggatgtgtggagtctgggggtcattttatacacactagtcagtggctcacttccctttgatgggcaaaacctaaaggaactgagagagagagtattaagagggaaatacagaattcccttctacatgtctacagactgtgaaaaccttctcaaacgtttcctggtgctaaatccaattaaacgcggcactctagagcaaatcatgaaggacaggtggatcaatgcagggcatgaagaagatgaactcaaaccatttgttgaaccagagctagacatctcagaccaaaaaagaatagatattatggtgggaatgggatattcacaagaagaaattcaagaatctcttagtaagatgaaatacgatgaaatcacagctacatatttgttattggggagaaaatcttcagagctggatgctagtgattccagttctagcagcaatctttcacttgctaaggttaggccgagcagtgatctcaacaacagtactggccagtctcctcaccacaaagtgcagagaagtgtttcttcaagccaaaagcaaagacgctacagtgaccatgctggaccagctattccttctgttgtggcgtatccgaaaaggagtcagaccagcactgcagatagtgacctcaaagaagatggaatttcctcccggaaatcaagtggcagtgctgttggaggaaagggaattgctccagccagtcccatgcttgggaatgcaagtaatcctaataaggcggatattcctgaacgcaagaaaagctccactgtccctagtagtaacacagcatctggtggaatgacacgacgaaatacttatgtttgcagtgagagaactacagctgatagacactcagtgattcagaatggcaaagaaaacagcactattcctgatcagagaactccagttgcttcaacacacagtatcagtagtgcagccaccccagatcgaatccgcttcccaagaggcactgccagtcgtagcactttccacggccagccccgggaacggcgaaccgcaacatataatggccctcctgcctctcccagcctgtcccatgaagccacaccattgtcccagactcgaagccgaggctccactaatctctttagtaaattaacttcaaaactcacaaggagtcgcaatgtatctgctgagcaaaaagatgaaaacaaagaagcaaagcctcgatccctacgcttcacctggagcatgaaaaccactagttcaatggatcccggggacatgatgcgggaaatccgcaaagtgttggacgccaataactgcgactatgagcagagggagcgcttcttgctcttctgcgtccacggagatgggcacgcggagaacctcgtgcagtgggaaatggaagtgtgcaagctgccaagactgtctctgaacggggtccggtttaagcggatatcggggacatccatagccttcaaaaatattgcttccaaaattgccaatgagctaaagctgtaacccagtgattatgatgtaaattaagtagcaattaaagtgttttcctgaacactgatggaaatgtatagaataatatttaggcaataacgtctgcatcttctaaatcatgaaattaaagtctgaggacgagagcacgcctgggagcgaaagctggccttttttctacgaatgcactacattaaagatgtgcaacctatgcgccccctgccctacttccgttaccctgagagtcggcgtgtggccccatctccatgtgcctcccgtctgggtgggtgtgagagtggacggtatgtgtgtgaagtggtgtatatggaagcatctccctacactggcagccagtcattactagtacctctgcgggagatcatccggtgctaaaacattacagttgccaaggaggaaaatactgaatgactgctaagaattaaccttaagaccagttcatagttaatacaggtttacagttcatgcctgtggttttgtgtttgttgttttgtgtttttttagtgcaaaaggtttaaatttatagttgtgaacattgcttgtgtgtgtttttctaagtagattcacaagataattaaaaattcactttttctcagtaaaaaaacaaaacaacaacaacacacacacacaaccgccaaccctccaccccaccggcgcggagcccaatctcgccgcgcgggcgccttctcgccctttcccgcgcccctacggactccaccactc

SEQ ID NO: 419223 - DNA, 3684 bp, Homo sapiens
agcagaggaagccgaggggcggcatcttggctccgtgaggctctgaggtgccggggtgcggcggcggcagcggcggccagcagggcggaggctgaggcagcaagctcgctagagagggagaagcagtcgggcgcaggcgcctcctccgcagcccgctccatggtcggcgcccacagcccgcggcggcctgtcttgcgctccacttccttcacatcctcctccgcctcctcgttttcaggcgccgccggcggcgctgtgtggaggcccgcgagctgaaattcgcggtgcgacgggagggagtggagaaggaggtgagggggcccaggatcgcggggcgccctgaggcaaggggacgccggcgggccgaagcgcagcccgccgcccgcaggctcggctccgccactgccgccctcccggtctcctcgcctcggccgccgaggcagggagagaatgagccccgggacccgccgggggacggcccgggccaggcccgggatctagacggccgtagggggaagggagccgccctccccacggcgccttttcggaactgccgtggactcgaggacgctggtcgccggcctcctagggctgtgctgttatgttttgaccctcgcattgtgcagaattaaagtgcagtaaaatgtccactaggaccccattgccaacggtgaatgaacgagacactgaaaaccacacgtcacatggagatgggcgtcaagaagttacctctcgtaccagccgctcaggagctcggtgtagaaactctatagcctcctgtgcagatgaacaacctcacatcggaaactacagactgttgaaaacaatcggcaaggggaattttgcaaaagtaaaattggcaagacatatccttacaggcagagaggttgcaataaaaataattgacaaaactcagttgaatccaacaagtctacaaaagctcttcagagaagtaagaataatgaagattttaaatcatcccaatatagtgaagttattcgaagtcattgaaactgaaaaaacactctacctaatcatggaatatgcaagtggaggtgaagtatttgactatttggttgcacatggcaggatgaaggaaaaagaagcaagatctaaatttagacagattgtgtctgcagttcaatactgccatcagaaacggatcgtacatcgagacctcaaggctgaaaatctattgttagatgccgatatgaacattaaaatagcagatttcggttttagcaatgaatttactgttggcggtaaactcgacacgttttgtggcagtcctccatacgcagcacctgagctcttccagggcaagaaatatgacgggccagaagtggatgtgtggagtctgggggtcattttatacacactagtcagtggctcacttccctttgatgggcaaaacctaaaggaactgagagagagagtattaagagggaaatacagaattcccttctacatgtctacagactgtgaaaaccttctcaaacgtttcctggtgctaaatccaattaaacgcggcactctagagcaaatcatgaaggacaggtggatcaatgcagggcatgaagaagatgaactcaaaccatttgttgaaccagagctagacatctcagaccaaaaaagaatagatattatggtgggaatgggatattcacaagaagaaattcaagaatctcttagtaagatgaaatacgatgaaatcacagctacatatttgttattggggagaaaatcttcagagctggatgctagtgattccagttctagcagcaatctttcacttgctaaggttaggccgagcagtgatctcaacaacagtactggccagtctcctcaccacaaagtgcagagaagtgtttcttcaagccaaaagcaaagacgctacagtgaccatgctggaccagctattccttctgttgtggcgtatccgaaaaggagtcagaccagcactgcagatagtgacctcaaagaagatggaatttcctcccggaaatcaagtggcagtgctgttggaggaaagggaattgctccagccagtcccatgcttgggaatgcaagtaatcctaataaggcggatattcctgaacgcaagaaaagctccactgtccctagtagtaacacagcatctggtggaatgacacgacgaaatacttatgtttgcagtgagagaactacagctgatagacactcagtgattcagaatggcaaagaaaacagcactattcctgatcagagaactccagttgcttcaacacacagtatcagtagtgcagccaccccagatcgaatccgcttcccaagaggcactgccagtcgtagcactttccacggccagccccgggaacggcgaaccgcaacatataatggccctcctgcctctcccagcctgtcccatgaagccacaccattgtcccagactcgaagccgaggctccactaatctctttagtaaattaacttcaaaactcacaaggagtcgcaatgtatctgctgagcaaaaagatgaaaacaaagaagcaaagcctcgatccctacgcttcacctggagcatgaaaaccactagttcaatggatcccggggacatgatgcgggaaatccgcaaagtgttggacgccaataactgcgactatgagcagagggagcgcttcttgctcttctgcgtccacggagatgggcacgcggagaacctcgtgcagtgggaaatggaagtgtgcaagctgccaagactgtctctgaacggggtccggtttaagcggatatcggggacatccatagccttcaaaaatattgcttccaaaattgccaatgagctaaagctgtaacccagtgattatgatgtaaattaagtagcaattaaagtgttttcctgaacactgatggaaatgtatagaataatatttaggcaataacgtctgcatcttctaaatcatgaaattaaagtctgaggacgagagcacgcctgggagcgaaagctggccttttttctacgaatgcactacattaaagatgtgcaacctatgcgccccctgccctacttccgttaccctgagagtcggcgtgtggccccatctccatgtgcctcccgtctgggtgggtgtgagagtggacggtatgtgtgtgaagtggtgtatatggaagcatctccctacactggcagccagtcattactagtacctctgcgggagatcatccggtgctaaaacattacagttgccaaggaggaaaatactgaatgactgctaagaattaaccttaagaccagttcatagttaatacaggtttacagttcatgcctgtggttttgtgtttgttgttttgtgtttttttagtgcaaaaggtttaaatttatagttgtgaacattgcttgtgtgtgtttttctaagtagattcacaagataattaaaaattcactttttctcagtaaaacaaggctaaaaaaacaaactaacttacataaactaaaccttctgggcgcgccttatatgtcccgcgggccgcgcgcacaccagggcttatcttgaaatgtccgcccgtgcggcctcaaaagccgtgtcccgataacccccacgttttttgtgttcccacacgggggcacacttcgccggggcccccatttaggggagcccgcaaataatttccgagtaacccgggttacctggttgactccgccaca

SEQ ID NO: 419224 - DNA, 3866 bp, Homo sapiens
agcagaggaagccgaggggcggcatcttggctccgtgaggctctgaggtgccggggtgcggcggcggcagcggcggccagcagggcggaggctgaggcagcaagctcgctagagagggagaagcagtcgggcgcaggcgcctcctccgcagcccgctccatggtcggcgcccacagcccgcggcggcctgtcttgcgctccacttccttcacatcctcctccgcctcctcgttttcaggcgccgccggcggcgctgtgtggaggcccgcgagctgaaattcgcggtgcgacgggagggagtggagaaggaggtgagggggcccaggatcgcggggcgccctgaggcaaggggacgccggcgggccgaagcgcagcccgccgcccgcaggctcggctccgccactgccgccctcccggtctcctcgcctcggccgccgaggcagggagagaatgagccccgggacccgccgggggacggcccgggccaggcccgggatctagacggccgtagggggaagggagccgccctccccacggcgccttttcggaactgccgtggactcgaggacgctggtcgccggcctcctagggctgtgctgttatgttttgaccctcgcattgtgcagaattaaagtgcagtaaaatgtccactaggaccccattgccaacggtgaatgaacgagacactgaaaaccacacgtcacatggagatgggcgtcaagaagttacctctcgtaccagccgctcaggagctcggtgtagaaactctatagcctcctgtgcagatgaacaacctcacatcggaaactacagactgttgaaaacaatcggcaaggggaattttgcaaaagtaaaattggcaagacatatccttacaggcagagaggttgcaataaaaataattgacaaaactcagttgaatccaacaagtctacaaaagctcttcagagaagtaagaataatgaagattttaaatcatcccaatatagtgaagttattcgaagtcattgaaactgaaaaaacactctacctaatcatggaatatgcaagtggaggtgaagtatttgactatttggttgcacatggcaggatgaaggaaaaagaagcaagatctaaatttagacagattgtgtctgcagttcaatactgccatcagaaacggatcgtacatcgagacctcaaggctgaaaatctattgttagatgccgatatgaacattaaaatagcagatttcggttttagcaatgaatttactgttggcggtaaactcgacacgttttgtggcagtcctccatacgcagcacctgagctcttccagggcaagaaatatgacgggccagaagtggatgtgtggagtctgggggtcattttatacacactagtcagtggctcacttccctttgatgggcaaaacctaaaggtataagaagctgcacccatgtacttcactaaactaaaagaagtttcctaatattacatggcttaatatttttaacattatatcagtgcggggggtttcagggggttttttgttgtgtttggttaactaaacctaaaggttgacttactcgttttctttcctctgtacctctccaaaggaactgagagagagagtattaagagggaaatacagaattcccttctacatgtctacagactgtgaaaaccttctcaaacgtttcctggtgctaaatccaattaaacgcggcactctagaggtaatcatgtaggtggaaacaagcagtaactttggagagtctttagagtgaccttagatctttgcttgatttgtatgccatactggatatatcctgcggctttttaagcaagaattgaaacattaaaaaatattttttgagtttatgctttgaacgatagtcaatgaaatgttgaaaataaatttttgtaaatattacggttatcagaatatttcattttactctgctaatgaacagtttaccttttttagcaaatcatgaaggacaggtggatcaatgcagggcatgaagaagatgaactcaaaccatttgttgaaccagagctagacatctcagaccaaaaaagaatagatattatggtgggaatgggatattcacaagaagaaattcaagaatctcttagtaagatgaaatacgatgaaatcacagctacatatttgttattggggagaaaatcttcagagctggatgctagtgattccagttctagcagcaatctttcacttgctaaggttaggccgagcagtgatctcaacaacagtactggccagtctcctcaccacaaagtgcagagaagtgtttcttcaagccaaaagcaaagacgctacagtgaccatgctggaccagctattccttctgttgtggcgtatccgaaaaggagtcagaccagcactgcagatagtgacctcaaagaagatggaatttcctcccggaaatcaagtggcagtgctgttggaggaaagggaattgctccagccagtcccatgcttgggaatgcaagtaatcctaataaggcggatattcctgaacgcaagaaaagctccactgtccctagtagtaacacagcatctggtggaatgacacgacgaaatacttatgtttgcagtgagagaactacagctgatagacactcagtgattcagaatggcaaagaaaacagcactattcctgatcagagaactccagttgcttcaacacacagtatcagtagtgcagccaccccagatcgaatccgcttcccaagaggcactgccagtcgtagcactttccacggccagccccgggaacggcgaaccgcaacatataatggccctcctgcctctcccagcctgtcccatgaagccacaccattgtcccagactcgaagccgaggctccactaatctctttagtaaattaacttcaaaactcacaaggagtcgcaatgtatctgctgagcaaaaagatgaaaacaaagaagcaaagcctcgatccctacgcttcacctggagcatgaaaaccactagttcaatggatcccggggacatgatgcgggaaatccgcaaagtgttggacgccaataactgcgactatgagcagagggagcgcttcttgctcttctgcgtccacggagatgggcacgcggagaacctcgtgcagtgggaaatggaagtgtgcaagctgccaagactgtctctgaacggggtccggtttaagcggatatcggggacatccatagccttcaaaaatattgcttccaaaattgccaatgagctaaagctgtaacccagtgattatgatgtaaattaagtagcaattaaagtgttttcctgaacactgatggaaatgtatagaataatatttaggcaataacgtctgcatcttctaaatcatgaaattaaagtctgaggacgagagcacgcctgggagcgaaagctggccttttttctacgaatgcactacattaaagatgtgcaacctatgcgccccctgccctacttccgttaccctgagagtcggcgtgtggccccatctccatgtgcctcccgtctgggtgggtgtgagagtggacggtatgtgtgtgaagtggtgtatatggaagcatctccctacactggcagccagtcattactagtacctctgcgggagatcatccggtgctaaaacattacagttgccaaggaggaaaatactgaatgactgctaagaattaaccttaagaccagttcatagttaatacaggtttacagttcatgcctgtggttttgtgtttgttgttttgtgtttttttagtgcaaaaggtttaaatttatagttgtgaacattgcttgtgtgtgtttttctaagtagattcacaagataattaaaaattcactttttctcagtaaaa

SEQ ID NO: 419225 - DNA, 3482 bp, Homo sapiens
agcagaggaagccgaggggcggcatcttggctccgtgaggctctgaggtgccggggtgcggcggcggcagcggcggccagcagggcggaggctgaggcagcaagctcgctagagagggagaagcagtcgggcgcaggcgcctcctccgcagcccgctccatggtcggcgcccacagcccgcggcggcctgtcttgcgctccacttccttcacatcctcctccgcctcctcgttttcaggcgccgccggcggcgctgtgtggaggcccgcgagctgaaattcgcggtgcgacgggagggagtggagaaggaggtgagggggcccaggatcgcggggcgccctgaggcaaggggacgccggcgggccgaagcgcagcccgccgcccgcaggctcggctccgccactgccgccctcccggtctcctcgcctcggccgccgaggcagggagagaatgagccccgggacccgccgggggacggcccgggccaggcccgggatctagacggccgtagggggaagggagccgccctccccacggcgccttttcggaactgccgtggactcgaggacgctggtcgccggcctcctagggctgtgctgttatgttttgaccctcgcattgtgcagaattaaagtgcagtaaaatgtccactaggaccccattgccaacggtgaatgaacgagacactgaaaaccacacgtcacatggagatgggcgtcaagaagttacctctcgtaccagccgctcaggagctcggtgtagaaactctatagcctcctgtgcagatgaacaacctcacatcggaaactacagactgttgaaaacaatcggcaaggggaattttgcaaaagtaaaattggcaagacatatccttacaggcagagaggttgcaataaaaataattgacaaaactcagttgaatccaacaagtctacaaaagctcttcagagaagtaagaataatgaagattttaaatcatcccaatatagtgaagttattcgaagtcattgaaactgaaaaaacactctacctaatcatggaatatgcaagtggaggtgaagtatttgactatttggttgcacatggcaggatgaaggaaaaagaagcaagatctaaatttagacagattgtgtctgcagttcaatactgccatcagaaacggatcgtacatcgagacctcaaggctgaaaatctattgttagatgccgatatgaacattaaaatagcagatttcggttttagcaatgaatttactgttggcggtaaactcgacacgttttgtggcagtcctccatacgcagcacctgagctcttccagggcaagaaatatgacgggccagaagtggatgtgtggagtctgggggtcattttatacacactagtcagtggctcacttccctttgatgggcaaaacctaaaggaactgagagagagagtattaagagggaaatacagaattcccttctacatgtctacagactgtgaaaaccttctcaaacgtttcctggtgctaaatccaattaaacgcggcactctagagcaaatcatgaaggacaggtggatcaatgcagggcatgaagaagatgaactcaaaccatttgttgaaccagagctagacatctcagaccaaaaaagaatagatattatggtgggaatgggatattcacaagaagaaattcaagaatctcttagtaagatgaaatacgatgaaatcacagctacatatttgttattggggagaaaatcttcagagctggatgctagtgattccagttctagcagcaatctttcacttgctaaggttaggccgagcagtgatctcaacaacagtactggccagtctcctcaccacaaagtgcagagaagtgtttcttcaagccaaaagcaaagacgctacagtgaccatgctggaccagctattccttctgttgtggcgtatccgaaaaggagtcagaccagcactgcagatagtgacctcaaagaagatggaatttcctcccggaaatcaagtggcagtgctgttggaggaaagggaattgctccagccagtcccatgcttgggaatgcaagtaatcctaataaggcggatattcctgaacgcaagaaaagctccactgtccctagtagtaacacagcatctggtggaatgacacgacgaaatacttatgtttgcagtgagagaactacagctgatagacactcagtgattcagaatggcaaagaaaacagcactattcctgatcagagaactccagttgcttcaacacacagtatcagtagtgcagccaccccagatcgaatccgcttcccaagaggcactgccagtcgtagcactttccacggccagccccgggaacggcgaaccgcaacatataatggccctcctgcctctcccagcctgtcccatgaagccacaccattgtcccagactcgaagccgaggctccactaatctctttagtaaattaacttcaaaactcacaaggaggcttccaactgaatatgagaggaacgggagatatgagggctcaagtcgcaatgtatctgctgagcaaaaagatgaaaacaaagaagcaaagcctcgatccctacgcttcacctggagcatgaaaaccactagttcaatggatcccggggacatgatgcgggaaatccgcaaagtgttggacgccaataactgcgactatgagcagagggagcgcttcttgctcttctgcgtccacggagatgggcacgcggagaacctcgtgcagtgggaaatggaagtgtgcaagctgccaagactgtctctgaacggggtccggtttaagcggatatcggggacatccatagccttcaaaaatattgcttccaaaattgccaatgagctaaagctgtaacccagtgattatgatgtaaattaagtagcaattaaagtgttttcctgaacactgatggaaatgtatagaataatatttaggcaataacgtctgcatcttctaaatcatgaaattaaagtctgaggacgagagcacgcctgggagcgaaagctggccttttttctacgaatgcactacattaaagatgtgcaacctatgcgccccctgccctacttccgttaccctgagagtcggcgtgtggccccatctccatgtgcctcccgtctgggtgggtgtgagagtggacggtatgtgtgtgaagtggtgtatatggaagcatctccctacactggcagccagtcattactagtacctctgcgggagatcatccggtgctaaaacattacagttgccaaggaggaaaatactgaatgactgctaagaattaaccttaagaccagttcatagttaatacaggtttacagttcatgcctgtggttttgtgtttgttgttttgtgtttttttagtgcaaaaggtttaaatttatagttgtgaacattgcttgtgtgtgtttttctaagtagattcacaagataattaaaaattcactttttctcagtaaaa

SEQ ID NO: 419226 - DNA, 4680 bp, Homo sapiens
  misc_feature (944)..(944): n is a, c, g, or t
  misc_feature (1879)..(1879): n is a, c, g, or t
gagttggagtcttgctctgtcacccaggctggagtgcagtggcatgatctcagctcactgcaacctccaggaggtgttgtaatttagcagttgggaagtaattgggagatttgaattctagctaccaattcaactataatggattggaaaacaagatttctgtgttagtttaacagaggagagctaaaaaagaactcaggcctgaatggttgtcaggaatttacttgggtgactatcttctcatctcagaacataaaatgtaggaattaccacagttgcaaagggagatgtttatgttggagataaaaatgctcctcccttcaaaaatgagacagtattttagataggaaaggttatttatctgattacatgttttaaaattctgagcgtaaggttatatgtcaaatcctgtccatgggctgggcacagtggcccacacctgtgatcctagcactttggaaggctgagggggaggattgattgagcccaggaggtcaaggctacagtgaactatgatcacaccactgcacttcaacctgggcagcagagcgagaccctgtctcaaaaaataaaaataaattaacaaaaaaatctggtccatgtccatctcctcttagctgctaattcaattttagattagacacagtggacaaggacaagtatggtgagagtcctgtgatttctcaccagcttcctttccacataggccactgcttctcttcttccaaggtttttccccgcttttgcctcctggaggttgtatcctgggtgttaggagactgggttccggacacattccccacagaaggatagcaggaccttagaagatctttttctttcttttcctggtttcctcttgtttgcaagagggttgaataggatggtctctaaaatcctgttgtttttctgggttatattaacccaggccataatgataagaaccngctctgaattcacaacatgtatttatacaacagcaatttaatatttcttattctgtggaatggctaggaagctctgctggtcttggttggatggttttttgtttgtttttttttgagacagggtctcgctttgtcgcccaggctggagtgcagtgacgccatcagctctctgcaacctccacttcccaggctcaagtgattctcttgctcagcctcccgagtagctgggactacagacacatgctactgcacccagctaatttctgtatttttagtagagatggggtttcaccatgttgcccaggctggtctcgacctcctgagctcaagtgatccacccaccttggtttcccaaagtgctgggattacaggtgtgagccaccgtgctcggctggtttttcttaaggtctcacctgggttcacttgtgtggctgaattcagctggtggtttggcaggggctggatgcagttacaacagaggatctgtctctttaaataactacccttcatccccaaagaggccagaccagctccttcacagtgctccaagagagcaagccatgacgcccaagcattttatccagcctctgcttgcttcagtttgctaaggtcccactggccaaagcagattacatggccaggtctaatgtcaatatgaagggggcactccacaaaagcgtgaacatgtaaggcatgactcatgagggtcactaatgtaatagtcaccacaacctccatgctaagttacctatattctccagtgaggatttctcaaggtggttttgttcatagtcttctaatagaattatttggaattatcagtttaatatgcttatgatgtatttcactggaaccatacaggttttgattcgcagagttgggagccctgggtagatactgaatcagactaagtttaatcacagaaattattcctncgtaagtctgatcttatgttttcaagatagcattgtaaaattcagagtatgttaccatccccctttgagacctctgctgtttttaataaatggaagcatttgggaatactatttggtaatagtttattaaaactacttcagagatattctggactttcatattagtcttagatatggattaataaacattagcaatgaatctgttatctaagagaaaaatttaaatttatattacaacagtggaatataatgtttaataacttgtgttggggggattatgtgttttgtttgtttttttttttagctcttcagagaagtaagaataatgaagattttaaatcatcccaatatagtgaagttattcgaagtcattgaaactgaaaaaacactctacctaatcatggaatatgcaagtggaggtgaagtatttgactatttggttgcacatggcaggatgaaggaaaaagaagcaagatctaaatttagacagattgtgtctgcagttcaatactgccatcagaaacggatcgtacatcgagacctcaaggctgaaaatctattgttagatgccgatatgaacattaaaatagcagatttcggttttagcaatgaatttactgttggcggtaaactcgacacgttttgtggcagtcctccatacgcagcacctgagctcttccagggcaagaaatatgacgggccagaagtggatgtgtggagtctgggggtcattttatacacactagtcagtggctcacttccctttgatgggcaaaacctaaaggaactgagagagagagtattaagagggaaatacagaattcccttctacatgtctacagactgtgaaaaccttctcaaacgtttcctggtgctaaatccaattaaacgcggcactctagagcaaatcatgaaggacaggtggatcaatgcagggcatgaagaagatgaactcaaaccatttgttgaaccagagctagacatctcagaccaaaaaagaatagatattatggtgggaatgggatattcacaagaagaaattcaagaatctcttagtaagatgaaatacgatgaaatcacagctacatatttgttattggggagaaaatcttcagagctggatgctagtgattccagttctagcagcaatctttcacttgctaaggttaggccgagcagtgatctcaacaacagtactggccagtctcctcaccacaaagtgcagagaagtgtttcttcaagccaaaagcaaagacgctacagtgaccatgctggaccagctattccttctgttgtggcgtatccgaaaaggagtcagaccagcactgcagatagtgacctcaaagaagatggaatttcctcccggaaatcaagtggcagtgctgttggaggaaagggaattgctccagccagtcccatgcttgggaatgcaagtaatcctaataaggcggatattcctgaacgcaagaaaagctccactgtccctagtagtaacacagcatctggtggaatgacacgacgaaatacttatgtttgcagtgagagaactacagctgatagacactcagtgattcagaatggcaaagaaaacagcactattcctgatcagagaactccagttgcttcaacacacagtatcagtagtgcagccaccccagatcgaatccgcttcccaagaggcactgccagtcgtagcactttccacggccagccccgggaacggcgaaccgcaacatataatggccctcctgcctctcccagcctgtcccatgaagccacaccattgtcccagactcgaagccgaggctccactaatctctttagtaaattaacttcaaaactcacaaggagtcgcaatgtatctgctgagcaaaaagatgaaaacaaagaagcaaagcctcgatccctacgcttcacctggagcatgaaaaccactagttcaatggatcccggggacatgatgcgggaaatccgcaaagtgttggacgccaataactgcgactatgagcagagggagcgcttcttgctcttctgcgtccacggagatgggcacgcggagaacctcgtgcagtgggaaatggaagtgtgcaagctgccaagactgtctctgaacggggtccggtttaagcggatatcggggacatccatagccttcaaaaatattgcttccaaaattgccaatgagctaaagctgtaacccagtgattatgatgtaaattaagtagcaattaaagtgttttcctgaacactgatggaaatgtatagaataatatttaggcaataacgtctgcatcttctaaatcatgaaattaaagtctgaggacgagagcacgcctgggagcgaaagctggccttttttctacgaatgcactacattaaagatgtgcaacctatgcgccccctgccctacttccgttaccctgagagtcggcgtgtggccccatctccatgtgcctcccgtctgggtgggtgtgagagtggacggtatgtgtgtgaagtggtgtatatggaagcatctccctacactggcagccagtcattactagtacctctgcgggagatcatccggtgctaaaacattacagttgccaaggaggaaaatactgaatgactgctaagaattaaccttaagaccagttcatagttaatacaggtttacagttcatgcctgtggttttgtgtttgttgttttgtgtttttttagtgcaaaaggtttaaatttatagttgtgaacattgcttgtgtgtgtttttctaagtagattcacaagataattaaaaattcactttttctcagtaaaa

SEQ ID NO: 419227 - DNA, 2772 bp, Homo sapiens
gttccaacagttattagagtactagattgagtgagcaggaaggtagaagaagttagttaaagaatgggaagctcaaacttggatcatgaaaggttttcagatattgggaatgtcaaagactggagtataaccatgttgcaataaaaataattgacaaaactcagttgaatccaacaagtctacaaaagtagagacggggtttcaccgtgttatccaggatggtctcgatctcctgacctcgtgatccacccatcttggcttcccaaagtgctggactcttcagagaagtaagaataatgaagattttaaatcatcccaatatagtgaagttattcgaagtcattgaaactgaaaaaacactctacctaatcatggaatatgcaagtggaggtgaagtatttgactatttggttgcacatggcaggatgaaggaaaaagaagcaagatctaaatttagacagattgtgtctgcagttcaatactgccatcagaaacggatcgtacatcgagacctcaaggctgaaaatctattgttagatgccgatatgaacattaaaatagcagatttcggttttagcaatgaatttactgttggcggtaaactcgacacgttttgtggcagtcctccatacgcagcacctgagctcttccagggcaagaaatatgacgggccagaagtggatgtgtggagtctgggggtcattttatacacactagtcagtggctcacttccctttgatgggcaaaacctaaaggaactgagagagagagtattaagagggaaatacagaattcccttctacatgtctacagactgtgaaaaccttctcaaacgtttcctggtgctaaatccaattaaacgcggcactctagagcaaatcatgaaggacaggtggatcaatgcagggcatgaagaagatgaactcaaaccatttgttgaaccagagctagacatctcagaccaaaaaagaatagatattatggtgggaatgggatattcacaagaagaaattcaagaatctcttagtaagatgaaatacgatgaaatcacagctacatatttgttattggggagaaaatcttcagagctggatgctagtgattccagttctagcagcaatctttcacttgctaaggttaggccgagcagtgatctcaacaacagtactggccagtctcctcaccacaaagtgcagagaagtgtttcttcaagccaaaagcaaagacgctacagtgaccatgctggaccagctattccttctgttgtggcgtatccgaaaaggagtcagaccagcactgcagatagtgacctcaaagaagatggaatttcctcccggaaatcaagtggcagtgctgttggaggaaagggaattgctccagccagtcccatgcttgggaatgcaagtaatcctaataaggcggatattcctgaacgcaagaaaagctccactgtccctagtagtaacacagcatctggtggaatgacacgacgaaatacttatgtttgcagtgagagaactacagctgatagacactcagtgattcagaatggcaaagaaaacagcactattcctgatcagagaactccagttgcttcaacacacagtatcagtagtgcagccaccccagatcgaatccgcttcccaagaggcactgccagtcgtagcactttccacggccagccccgggaacggcgaaccgcaacatataatggccctcctgcctctcccagcctgtcccatgaagccacaccattgtcccagactcgaagccgaggctccactaatctctttagtaaattaacttcaaaactcacaaggagtcgcaatgtatctgctgagcaaaaagatgaaaacaaagaagcaaagcctcgatccctacgcttcacctggagcatgaaaaccactagttcaatggatcccggggacatgatgcgggaaatccgcaaagtgttggacgccaataactgcgactatgagcagagggagcgcttcttgctcttctgcgtccacggagatgggcacgcggagaacctcgtgcagtgggaaatggaagtgtgcaagctgccaagactgtctctgaacggggtccggtttaagcggatatcggggacatccatagccttcaaaaatattgcttccaaaattgccaatgagctaaagctgtaacccagtgattatgatgtaaattaagtagcaattaaagtgttttcctgaacactgatggaaatgtatagaataatatttaggcaataacgtctgcatcttctaaatcatgaaattaaagtctgaggacgagagcacgcctgggagcgaaagctggccttttttctacgaatgcactacattaaagatgtgcaacctatgcgccccctgccctacttccgttaccctgagagtcggcgtgtggccccatctccatgtgcctcccgtctgggtgggtgtgagagtggacggtatgtgtgtgaagtggtgtatatggaagcatctccctacactggcagccagtcattactagtacctctgcgggagatcatccggtgctaaaacattacagttgccaaggaggaaaatactgaatgactgctaagaattaaccttaagaccagttcatagttaatacaggtttacagttcatgcctgtggttttgtgtttgttgttttgtgtttttttagtgcaaaaggtttaaatttatagttgtgaacattgcttgtgtgtgtttttctaagtagattcacaagataattaaaaattcactttttctcagtaaaa

SEQ ID NO: 419228 - DNA, 3523 bp, Homo sapiens
  misc_feature (722)..(722): n is a, c, g, or t
caaaaatgtgtcttcatagcttgaaagacatcccaggaaagaagtgaacagatgggctatgatgtaaaacaaggagacctacttagatacgttttcagagaatctgcctgagacttaaaggatgaaaagggagaagacatttaaaggaatttagtatgttctgtgccaccgtgctcggctggtttttcttaaggtctcacctgggttcacttgtgtggctgaattcagctggtggtttggcaggggctggatgcagttacaacagaggatctgtctctttaaataactacccttcatccccaaagaggccagaccagctccttcacagtgctccaagagagcaagccatgacgcccaagcattttatccagcctctgcttgcttcagtttgctaaggtcccactggccaaagcagattacatggccaggtctaatgtcaatatgaagggggcactccacaaaagcgtgaacatgtaaggcatgactcatgagggtcactaatgtaatagtcaccacaacctccatgctaagttacctatattctccagtgaggatttctcaaggtggttttgttcatagtcttctaatagaattatttggaattatcagtttaatatgcttatgatgtatttcactggaaccatacaggttttgattcgcagagttgggagccctgggtagatactgaatcagactaagtttaatcacagaaattattcctncgtaagtctgatcttatgttttcaagatagcattgtaaaattcagagtatgttaccatccccctttgagacctctgctgtttttaataaatggaagcatttgggaatactatttggtaatagtttattaaaactacttcagagatattctggactttcatattagtcttagatatggattaataaacattagcaatgaatctgttatctaagagaaaaatttaaatttatattacaacagtggaatataatgtttaataacttgtgttggggggattatgtgttttgtttgtttttttttttagctcttcagagaagtaagaataatgaagattttaaatcatcccaatatagtgaagttattcgaagtcattgaaactgaaaaaacactctacctaatcatggaatatgcaagtggaggtgaagtatttgactatttggttgcacatggcaggatgaaggaaaaagaagcaagatctaaatttagacagattgtgtctgcagttcaatactgccatcagaaacggatcgtacatcgagacctcaaggctgaaaatctattgttagatgccgatatgaacattaaaatagcagatttcggttttagcaatgaatttactgttggcggtaaactcgacacgttttgtggcagtcctccatacgcagcacctgagctcttccagggcaagaaatatgacgggccagaagtggatgtgtggagtctgggggtcattttatacacactagtcagtggctcacttccctttgatgggcaaaacctaaaggaactgagagagagagtattaagagggaaatacagaattcccttctacatgtctacagactgtgaaaaccttctcaaacgtttcctggtgctaaatccaattaaacgcggcactctagagcaaatcatgaaggacaggtggatcaatgcagggcatgaagaagatgaactcaaaccatttgttgaaccagagctagacatctcagaccaaaaaagaatagatattatggtgggaatgggatattcacaagaagaaattcaagaatctcttagtaagatgaaatacgatgaaatcacagctacatatttgttattggggagaaaatcttcagagctggatgctagtgattccagttctagcagcaatctttcacttgctaaggttaggccgagcagtgatctcaacaacagtactggccagtctcctcaccacaaagtgcagagaagtgtttcttcaagccaaaagcaaagacgctacagtgaccatgctggaccagctattccttctgttgtggcgtatccgaaaaggagtcagaccagcactgcagatagtgacctcaaagaagatggaatttcctcccggaaatcaagtggcagtgctgttggaggaaagggaattgctccagccagtcccatgcttgggaatgcaagtaatcctaataaggcggatattcctgaacgcaagaaaagctccactgtccctagtagtaacacagcatctggtggaatgacacgacgaaatacttatgtttgcagtgagagaactacagctgatagacactcagtgattcagaatggcaaagaaaacagcactattcctgatcagagaactccagttgcttcaacacacagtatcagtagtgcagccaccccagatcgaatccgcttcccaagaggcactgccagtcgtagcactttccacggccagccccgggaacggcgaaccgcaacatataatggccctcctgcctctcccagcctgtcccatgaagccacaccattgtcccagactcgaagccgaggctccactaatctctttagtaaattaacttcaaaactcacaaggagtcgcaatgtatctgctgagcaaaaagatgaaaacaaagaagcaaagcctcgatccctacgcttcacctggagcatgaaaaccactagttcaatggatcccggggacatgatgcgggaaatccgcaaagtgttggacgccaataactgcgactatgagcagagggagcgcttcttgctcttctgcgtccacggagatgggcacgcggagaacctcgtgcagtgggaaatggaagtgtgcaagctgccaagactgtctctgaacggggtccggtttaagcggatatcggggacatccatagccttcaaaaatattgcttccaaaattgccaatgagctaaagctgtaacccagtgattatgatgtaaattaagtagcaattaaagtgttttcctgaacactgatggaaatgtatagaataatatttaggcaataacgtctgcatcttctaaatcatgaaattaaagtctgaggacgagagcacgcctgggagcgaaagctggccttttttctacgaatgcactacattaaagatgtgcaacctatgcgccccctgccctacttccgttaccctgagagtcggcgtgtggccccatctccatgtgcctcccgtctgggtgggtgtgagagtggacggtatgtgtgtgaagtggtgtatatggaagcatctccctacactggcagccagtcattactagtacctctgcgggagatcatccggtgctaaaacattacagttgccaaggaggaaaatactgaatgactgctaagaattaaccttaagaccagttcatagttaatacaggtttacagttcatgcctgtggttttgtgtttgttgttttgtgtttttttagtgcaaaaggtttaaatttatagttgtgaacattgcttgtgtgtgtttttctaagtagattcacaagataattaaaaattcactttttctcagtaaaa

SEQ ID NO: 419229 - DNA, 2414 bp, Homo sapiens
ccgagggtccagacgcagcacctgagctcttccagggcaagaaatatgacgggccagaagtggatgtgtggaggaaagcttttctaaaatgcctaatcctgtcataattctaattctattttggctaaatttcatttttgtcttgatgttttccctctaggctgaaaatctattgttagatgccgatatgaacattaaaatagcagatttcggttttagcaatgaatttactgttggcggtaaactcgacacgttttgtggcagtcctccatacgcagcacctgagctcttccagggcaagaaatatgacgggccagaagtggatgtgtggagtctgggggtcattttatacacactagtcagtggctcacttccctttgatgggcaaaacctaaaggaactgagagagagagtattaagagggaaatacagaattcccttctacatgtctacagactgtgaaaaccttctcaaacgtttcctggtgctaaatccaattaaacgcggcactctagagcaaatcatgaaggacaggtggatcaatgcagggcatgaagaagatgaactcaaaccatttgttgaaccagagctagacatctcagaccaaaaaagaatagatattatggtgggaatgggatattcacaagaagaaattcaagaatctcttagtaagatgaaatacgatgaaatcacagctacatatttgttattggggagaaaatcttcagagctggatgctagtgattccagttctagcagcaatctttcacttgctaaggttaggccgagcagtgatctcaacaacagtactggccagtctcctcaccacaaagtgcagagaagtgtttcttcaagccaaaagcaaagacgctacagtgaccatgctggaccagctattccttctgttgtggcgtatccgaaaaggagtcagaccagcactgcagatagtgacctcaaagaagatggaatttcctcccggaaatcaagtggcagtgctgttggaggaaagggaattgctccagccagtcccatgcttgggaatgcaagtaatcctaataaggcggatattcctgaacgcaagaaaagctccactgtccctagtagtaacacagcatctggtggaatgacacgacgaaatacttatgtttgcagtgagagaactacagctgatagacactcagtgattcagaatggcaaagaaaacagcactattcctgatcagagaactccagttgcttcaacacacagtatcagtagtgcagccaccccagatcgaatccgcttcccaagaggcactgccagtcgtagcactttccacggccagccccgggaacggcgaaccgcaacatataatggccctcctgcctctcccagcctgtcccatgaagccacaccattgtcccagactcgaagccgaggctccactaatctctttagtaaattaacttcaaaactcacaaggagtcgcaatgtatctgctgagcaaaaagatgaaaacaaagaagcaaagcctcgatccctacgcttcacctggagcatgaaaaccactagttcaatggatcccggggacatgatgcgggaaatccgcaaagtgttggacgccaataactgcgactatgagcagagggagcgcttcttgctcttctgcgtccacggagatgggcacgcggagaacctcgtgcagtgggaaatggaagtgtgcaagctgccaagactgtctctgaacggggtccggtttaagcggatatcggggacatccatagccttcaaaaatattgcttccaaaattgccaatgagctaaagctgtaacccagtgattatgatgtaaattaagtagcaattaaagtgttttcctgaacactgatggaaatgtatagaataatatttaggcaataacgtctgcatcttctaaatcatgaaattaaagtctgaggacgagagcacgcctgggagcgaaagctggccttttttctacgaatgcactacattaaagatgtgcaacctatgcgccccctgccctacttccgttaccctgagagtcggcgtgtggccccatctccatgtgcctcccgtctgggtgggtgtgagagtggacggtatgtgtgtgaagtggtgtatatggaagcatctccctacactggcagccagtcattactagtacctctgcgggagatcatccggtgctaaaacattacagttgccaaggaggaaaatactgaatgactgctaagaattaaccttaagaccagttcatagttaatacaggtttacagttcatgcctgtggttttgtgtttgttgttttgtgtttttttagtgcaaaaggtttaaatttatagttgtgaacattgcttgtgtgtgtttttctaagtagattcacaagataattaaaaattcactttttctcagtaaaa

SEQ ID NO: 419230 - DNA, 3509 bp, Homo sapiens
agcagaggaagccgaggggcggcatcttggctccgtgaggctctgaggtgccggggtgcggcggcggcagcggcggccagcagggcggaggctgaggcagcaagctcgctagagagggagaagcagtcgggcgcaggcgcctcctccgcagcccgctccatggtcggcgcccacagcccgcggcggcctgtcttgcgctccacttccttcacatcctcctccgcctcctcgttttcaggcgccgccggcggcgctgtgtggaggcccgcgagctgaaattcgcggtgcgacgggagggagtggagaaggaggtgagggggcccaggatcgcggggcgccctgaggcaaggggacgccggcgggccgaagcgcagcccgccgcccgcaggctcggctccgccactgccgccctcccggtctcctcgcctcggccgccgaggcagggagagaatgagccccgggacccgccgggggacggcccgggccaggcccgggatctagacggccgtagggggaagggagccgccctccccacggcgccttttcggaactgccgtggactcgaggacgctggtcgccggcctcctagggctgtgctgttatgttttgaccctcgcattgtgcagaattaaagtgcagtaaaatgtccactaggaccccattgccaacggtgaatgaacgagacactgaaaaccacacgtcacatggagatgggcgtcaagaagttacctctcgtaccagccgctcaggagctcggtgtagaaactctatagcctcctgtgcagatgaacaacctcacatcggaaactacagactgttgaaaacaatcggcaaggggaattttgcaaaagtaaaattggcaagacatatccttacaggcagagaggttgcaataaaaataattgacaaaactcagttgaatccaacaagtctacaaaagctcttcagagaagtaagaataatgaagattttaaatcatcccaatatagtgaagttattcgaagtcattgaaactgaaaaaacactctacctaatcatggaatatgcaagtggaggtgaagtatttgactatttggttgcacatggcaggatgaaggaaaaagaagcaagatctaaatttagacagattgtgtctgcagttcaatactgccatcagaaacggatcgtacatcgagacctcaaggctgaaaatctattgttagatgccgatatgaacattaaaatagcagatttcggttttagcaatgaatttactgttggcggtaaactcgacacgttttgtggcagtcctccatacgcagcacctgagctcttccagggcaagaaatatgacgggccagaagtggatgtgtggagtctgggggtcattttatacacactagtcagtggctcacttccctttgatgggcaaaacctaaaggaactgagagagagagtattaagagggaaatacagaattcccttctacatgtctacagactgtgaaaaccttctcaaacgtttcctggtgctaaatccaattaaacgcggcactctagagcaaatcatgaaggacaggtggatcaatgcagggcatgaagaagatgaactcaaaccatttgttgaaccagagctagacatctcagaccaaaaaagaatagatattatggtgggaatgggatattcacaagaagaaattcaagaatctcttagtaagatgaaatacgatgaaatcacagctacatatttgttattggggagaaaatcttcagagctggatgctagtgattccagttctagcagcaatctttcacttgctaaggttaggccgagcagtgatctcaacaacagtactggccagtctcctcaccacaaagtgcagagaagtgtttcttcaagccaaaagcaaagacgctacagtgaccatgctggaccagctattccttctgttgtggcgtatccgaaaaggagtcagaccagcactgcagatagtgacctcaaagaagatggaatttcctcccggaaatcaagtggcagtgctgttggaggaaagggaattgctccagccagtcccatgcttgggaatgcaagtaatcctaataaggcggatattcctgaacgcaagaaaagctccactgtccctagtagtaacacagcatctggtggaatgacacgacgaaatacttatgtttgcagtgagagaactacagctgatagacactcagtgattcagaatggcaaagaaaacagcactattcctgatcagagaactccagttgcttcaacacacagtatcagtagtgcagccaccccagatcgaatccgcttcccaagaggcactgccagtcgtagcactttccacggccagccccgggaacggcgaaccgcaacatataatggccctcctgcctctcccagcctgtcccatgaagccacaccattgtcccagactcgaagccgaggctccactaatctctttagtaaattaacttcaaaactcacaaggagaaacatgtcattcaggtttatcaaaaggcttccaactgaatatgagaggaacgggagatatgagggctcaagtcgcaatgtatctgctgagcaaaaagatgaaaacaaagaagcaaagcctcgatccctacgcttcacctggagcatgaaaaccactagttcaatggatcccggggacatgatgcgggaaatccgcaaagtgttggacgccaataactgcgactatgagcagagggagcgcttcttgctcttctgcgtccacggagatgggcacgcggagaacctcgtgcagtgggaaatggaagtgtgcaagctgccaagactgtctctgaacggggtccggtttaagcggatatcggggacatccatagccttcaaaaatattgcttccaaaattgccaatgagctaaagctgtaacccagtgattatgatgtaaattaagtagcaattaaagtgttttcctgaacactgatggaaatgtatagaataatatttaggcaataacgtctgcatcttctaaatcatgaaattaaagtctgaggacgagagcacgcctgggagcgaaagctggccttttttctacgaatgcactacattaaagatgtgcaacctatgcgccccctgccctacttccgttaccctgagagtcggcgtgtggccccatctccatgtgcctcccgtctgggtgggtgtgagagtggacggtatgtgtgtgaagtggtgtatatggaagcatctccctacactggcagccagtcattactagtacctctgcgggagatcatccggtgctaaaacattacagttgccaaggaggaaaatactgaatgactgctaagaattaaccttaagaccagttcatagttaatacaggtttacagttcatgcctgtggttttgtgtttgttgttttgtgtttttttagtgcaaaaggtttaaatttatagttgtgaacattgcttgtgtgtgtttttctaagtagattcacaagataattaaaaattcactttttctcagtaaaa

SEQ ID NO: 419231 - DNA, 3461 bp, Homo sapiens
agcagaggaagccgaggggcggcatcttggctccgtgaggctctgaggtgccggggtgcggcggcggcagcggcggccagcagggcggaggctgaggcagcaagctcgctagagagggagaagcagtcgggcgcaggcgcctcctccgcagcccgctccatggtcggcgcccacagcccgcggcggcctgtcttgcgctccacttccttcacatcctcctccgcctcctcgttttcaggcgccgccggcggcgctgtgtggaggcccgcgagctgaaattcgcggtgcgacgggagggagtggagaaggaggtgagggggcccaggatcgcggggcgccctgaggcaaggggacgccggcgggccgaagcgcagcccgccgcccgcaggctcggctccgccactgccgccctcccggtctcctcgcctcggccgccgaggcagggagagaatgagccccgggacccgccgggggacggcccgggccaggcccgggatctagacggccgtagggggaagggagccgccctccccacggcgccttttcggaactgccgtggactcgaggacgctggtcgccggcctcctagggctgtgctgttatgttttgaccctcgcattgtgcagaattaaagtgcagtaaaatgtccactaggaccccattgccaacggtgaatgaacgagacactgaaaaccacacgtcacatggagatgggcgtcaagaagttacctctcgtaccagccgctcaggagctcggtgtagaaactctatagcctcctgtgcagatgaacaacctcacatcggaaactacagactgttgaaaacaatcggcaaggggaattttgcaaaagtaaaattggcaagacatatccttacaggcagagaggttgcaataaaaataattgacaaaactcagttgaatccaacaagtctacaaaagctcttcagagaagtaagaataatgaagattttaaatcatcccaatatagtgaagttattcgaagtcattgaaactgaaaaaacactctacctaatcatggaatatgcaagtggaggtgaagtatttgactatttggttgcacatggcaggatgaaggaaaaagaagcaagatctaaatttagacagattgtgtctgcagttcaatactgccatcagaaacggatcgtacatcgagacctcaaggctgaaaatctattgttagatgccgatatgaacattaaaatagcagatttcggttttagcaatgaatttactgttggcggtaaactcgacacgttttgtggcagtcctccatacgcagcacctgagctcttccagggcaagaaatatgacgggccagaagtggatgtgtggagtctgggggtcattttatacacactagtcagtggctcacttccctttgatgggcaaaacctaaaggaactgagagagagagtattaagagggaaatacagaattcccttctacatgtctacagactgtgaaaaccttctcaaacgtttcctggtgctaaatccaattaaacgcggcactctagagcaaatcatgaaggacaggtggatcaatgcagggcatgaagaagatgaactcaaaccatttgttgaaccagagctagacatctcagaccaaaaaagaatagatattatggtgggaatgggatattcacaagaagaaattcaagaatctcttagtaagatgaaatacgatgaaatcacagctacatatttgttattggggagaaaatcttcagaggttaggccgagcagtgatctcaacaacagtactggccagtctcctcaccacaaagtgcagagaagtgtttcttcaagccaaaagcaaagacgctacagtgaccatgctggaccagctattccttctgttgtggcgtatccgaaaaggagtcagaccagcactgcagatagtgacctcaaagaagatggaatttcctcccggaaatcaagtggcagtgctgttggaggaaagggaattgctccagccagtcccatgcttgggaatgcaagtaatcctaataaggcggatattcctgaacgcaagaaaagctccactgtccctagtagtaacacagcatctggtggaatgacacgacgaaatacttatgtttgcagtgagagaactacagctgatagacactcagtgattcagaatggcaaagaaaacagcactattcctgatcagagaactccagttgcttcaacacacagtatcagtagtgcagccaccccagatcgaatccgcttcccaagaggcactgccagtcgtagcactttccacggccagccccgggaacggcgaaccgcaacatataatggccctcctgcctctcccagcctgtcccatgaagccacaccattgtcccagactcgaagccgaggctccactaatctctttagtaaattaacttcaaaactcacaaggagaaacatgtcattcaggtttatcaaaaggcttccaactgaatatgagaggaacgggagatatgagggctcaagtcgcaatgtatctgctgagcaaaaagatgaaaacaaagaagcaaagcctcgatccctacgcttcacctggagcatgaaaaccactagttcaatggatcccggggacatgatgcgggaaatccgcaaagtgttggacgccaataactgcgactatgagcagagggagcgcttcttgctcttctgcgtccacggagatgggcacgcggagaacctcgtgcagtgggaaatggaagtgtgcaagctgccaagactgtctctgaacggggtccggtttaagcggatatcggggacatccatagccttcaaaaatattgcttccaaaattgccaatgagctaaagctgtaacccagtgattatgatgtaaattaagtagcaattaaagtgttttcctgaacactgatggaaatgtatagaataatatttaggcaataacgtctgcatcttctaaatcatgaaattaaagtctgaggacgagagcacgcctgggagcgaaagctggccttttttctacgaatgcactacattaaagatgtgcaacctatgcgccccctgccctacttccgttaccctgagagtcggcgtgtggccccatctccatgtgcctcccgtctgggtgggtgtgagagtggacggtatgtgtgtgaagtggtgtatatggaagcatctccctacactggcagccagtcattactagtacctctgcgggagatcatccggtgctaaaacattacagttgccaaggaggaaaatactgaatgactgctaagaattaaccttaagaccagttcatagttaatacaggtttacagttcatgcctgtggttttgtgtttgttgttttgtgtttttttagtgcaaaaggtttaaatttatagttgtgaacattgcttgtgtgtgtttttctaagtagattcacaagataattaaaaattcactttttctcagtaaaa

SEQ ID NO: 419232 - DNA, 2003 bp, Homo sapiens
aacctggtctttcataaattaacctgtagtcattaatagcttagaaatgacgtaaagcatcagatgaagtaaatacaacatttaaagttatttgagaaagcctggaaagaaaatcataaataccttacctttagtgtctttccagccgtcagaaaactacttttgcttgagtttagggttgtcatttttgtacgttgtgattcctcctctctctgaatgaacggtttatgagaggtctgtgttaatgaaaagtttaacttcctaataagccatttgggttcgtgttgtggtttgctctgtttttctcattttctcttagctggatgctagtgattccagttctagcagcaatctttcacttgctaaggttaggccgagcagtgatctcaacaacagtactggccagtctcctcaccacaaagtgcagagaagtgtttcttcaagccaaaagcaaagacgctacagtgaccatgctggaccagctattccttctgttgtggcgtatccgaaaaggagtcagaccagcactgcagatagtgacctcaaagaagatggaatttcctcccggaaatcaagtggcagtgctgttggaggaaagggaattgctccagccagtcccatgcttgggaatgcaagtaatcctaataaggcggatattcctgaacgcaagaaaagctccactgtccctagtagtaacacagcatctggtggaatgacacgacgaaatacttatgtttgcagtgagagaactacagctgatagacactcagtgattcagaatggcaaagaaaacagcactattcctgatcagagaactccagttgcttcaacacacagtatcagtagtgcagccaccccagatcgaatccgcttcccaagaggcactgccagtcgtagcactttccacggccagccccgggaacggcgaaccgcaacatataatggccctcctgcctctcccagcctgtcccatgaagccacaccattgtcccagactcgaagccgaggctccactaatctctttagtaaattaacttcaaaactcacaaggagtcgcaatgtatctgctgagcaaaaagatgaaaacaaagaagcaaagcctcgatccctacgcttcacctggagcatgaaaaccactagttcaatggatcccggggacatgatgcgggaaatccgcaaagtgttggacgccaataactgcgactatgagcagagggagcgcttcttgctcttctgcgtccacggagatgggcacgcggagaacctcgtgcagtgggaaatggaagtgtgcaagctgccaagactgtctctgaacggggtccggtttaagcggatatcggggacatccatagccttcaaaaatattgcttccaaaattgccaatgagctaaagctgtaacccagtgattatgatgtaaattaagtagcaattaaagtgttttcctgaacactgatggaaatgtatagaataatatttaggcaataacgtctgcatcttctaaatcatgaaattaaagtctgaggacgagagcacgcctgggagcgaaagctggccttttttctacgaatgcactacattaaagatgtgcaacctatgcgccccctgccctacttccgttaccctgagagtcggcgtgtggccccatctccatgtgcctcccgtctgggtgggtgtgagagtggacggtatgtgtgtgaagtggtgtatatggaagcatctccctacactggcagccagtcattactagtacctctgcgggagatcatccggtgctaaaacattacagttgccaaggaggaaaatactgaatgactgctaagaattaaccttaagaccagttcatagttaatacaggtttacagttcatgcctgtggttttgtgtttgttgttttgtgtttttttagtgcaaaaggtttaaatttatagttgtgaacattgcttgtgtgtgtttttctaagtagattcacaagataattaaaaattcactttttctcagtaaaa

SEQ ID NO: 419233 - DNA, 1872 bp, Homo sapiens
aaaaatgcacattctttgtgaaactaatgtgtacccactgcttcttaattttgtgctgtggattttatagtctgagattttgttacagttgtccacaaggcgtccttcctccatgtgattttagttaagcacatcttttgtcatgatgtcctcggttgtgtattgtgtgtcttcgtgccttcgcgtactacaaaatgtataagaagttcctgctcctcccaagttgctttcagcatgtggaattttatacatatatcatttgtttacttccaaaactttttagttgcctgttcttcagttacgccagcatatcctttatttctttcgtattggcacagttctctatgtaagcaatttgagagggaagcaaaggggaaaagtttgagttagctgttctctgtcctagaatttccctgcattaatcttgtccttgaaaatatatataatactggtcccttaaactccatgaggctttgtctcattatgtattgttcttttggtaccctttcccacttaacttaccttttgctcctaagtcctataaaataccccttggatctggattttttatacccgattttctccactgtgtataaaaggtatattgtgactgtaaatttttgtatatcatgttctgagagcttcttactttctgatctcatagcactattcctgatcagagaactccagttgcttcaacacacagtatcagtagtgcagccaccccagatcgaatccgcttcccaagaggcactgccagtcgtagcactttccacggccagccccgggaacggcgaaccgcaacatataatggccctcctgcctctcccagcctgtcccatgaagccacaccattgtcccagactcgaagccgaggctccactaatctctttagtaaattaacttcaaaactcacaaggagtcgcaatgtatctgctgagcaaaaagatgaaaacaaagaagcaaagcctcgatccctacgcttcacctggagcatgaaaaccactagttcaatggatcccggggacatgatgcgggaaatccgcaaagtgttggacgccaataactgcgactatgagcagagggagcgcttcttgctcttctgcgtccacggagatgggcacgcggagaacctcgtgcagtgggaaatggaagtgtgcaagctgccaagactgtctctgaacggggtccggtttaagcggatatcggggacatccatagccttcaaaaatattgcttccaaaattgccaatgagctaaagctgtaacccagtgattatgatgtaaattaagtagcaattaaagtgttttcctgaacactgatggaaatgtatagaataatatttaggcaataacgtctgcatcttctaaatcatgaaattaaagtctgaggacgagagcacgcctgggagcgaaagctggccttttttctacgaatgcactacattaaagatgtgcaacctatgcgccccctgccctacttccgttaccctgagagtcggcgtgtggccccatctccatgtgcctcccgtctgggtgggtgtgagagtggacggtatgtgtgtgaagtggtgtatatggaagcatctccctacactggcagccagtcattactagtacctctgcgggagatcatccggtgctaaaacattacagttgccaaggaggaaaatactgaatgactgctaagaattaaccttaagaccagttcatagttaatacaggtttacagttcatgcctgtggttttgtgtttgttgttttgtgtttttttagtgcaaaaggtttaaatttatagttgtgaacattgcttgtgtgtgtttttctaagtagattcacaagataattaaaaattcactttttctcagtaaaa

SEQ ID NO: 419234 - DNA, 1244 bp, Homo sapiens
ctgaggctgcttcatggtgctggcgctgcatcatggtgacttggattcttgtgaaaagagtttaggtaccttgtattcctcaatccgttccctccctgggctaccaggattatgcagcctctgcactgccagtcgtagcactttccacggccagccccgggaacggcgaaccgcaacatataatggccctcctgcctctcccagcctgtcccatgaagccacaccattgtcccagactcgaagccgaggctccactaatctctttagtaaattaacttcaaaactcacaaggagtcgcaatgtatctgctgagcaaaaagatgaaaacaaagaagcaaagcctcgatccctacgcttcacctggagcatgaaaaccactagttcaatggatcccggggacatgatgcgggaaatccgcaaagtgttggacgccaataactgcgactatgagcagagggagcgcttcttgctcttctgcgtccacggagatgggcacgcggagaacctcgtgcagtgggaaatggaagtgtgcaagctgccaagactgtctctgaacggggtccggtttaagcggatatcggggacatccatagccttcaaaaatattgcttccaaaattgccaatgagctaaagctgtaacccagtgattatgatgtaaattaagtagcaattaaagtgttttcctgaacactgatggaaatgtatagaataatatttaggcaataacgtctgcatcttctaaatcatgaaattaaagtctgaggacgagagcacgcctgggagcgaaagctggccttttttctacgaatgcactacattaaagatgtgcaacctatgcgccccctgccctacttccgttaccctgagagtcggcgtgtggccccatctccatgtgcctcccgtctgggtgggtgtgagagtggacggtatgtgtgtgaagtggtgtatatggaagcatctccctacactggcagccagtcattactagtacctctgcgggagatcatccggtgctaaaacattacagttgccaaggaggaaaatactgaatgactgctaagaattaaccttaagaccagttcatagttaatacaggtttacagttcatgcctgtggttttgtgtttgttgttttgtgtttttttagtgcaaaaggtttaaatttatagttgtgaacattgcttgtgtgtgtttttctaagtagattcacaagataattaaaaattcactttttctcagtaaaa

SEQ ID NO: 419235 - DNA, 3383 bp, Homo sapiens
agcagaggaagccgaggggcggcatcttggctccgtgaggctctgaggtgccggggtgcggcggcggcagcggcggccagcagggcggaggctgaggcagcaagctcgctagagagggagaagcagtcgggcgcaggcgcctcctccgcagcccgctccatggtcggcgcccacagcccgcggcggcctgtcttgcgctccacttccttcacatcctcctccgcctcctcgttttcaggcgccgccggcggcgctgtgtggaggcccgcgagctgaaattcgcggtgcgacgggagggagtggagaaggaggtgagggggcccaggatcgcggggcgccctgaggcaaggggacgccggcgggccgaagcgcagcccgccgcccgcaggctcggctccgccactgccgccctcccggtctcctcgcctcggccgccgaggcagggagagaatgagccccgggacccgccgggggacggcccgggccaggcccgggatctagacggccgtagggggaagggagccgccctccccacggcgccttttcggaactgccgtggactcgaggacgctggtcgccggcctcctagggctgtgctgttatgttttgaccctcgcattgtgcagaattaaagtgcagtaaaatgtccactaggaccccattgccaacggtgaatgaacgagacactgaaaaccacacgtcacatggagatgggcgtcaagaagttacctctcgtaccagccgctcaggagctcggtgtagaaactctatagcctcctgtgcagatgaacaacctcacatcggaaactacagactgttgaaaacaatcggcaaggggaattttgcaaaagtaaaattggcaagacatatccttacaggcagagaggttgcaataaaaataattgacaaaactcagttgaatccaacaagtctacaaaagctcttcagagaagtaagaataatgaagattttaaatcatcccaatatagtgaagttattcgaagtcattgaaactgaaaaaacactctacctaatcatggaatatgcaagtggaggtgaagtatttgactatttggttgcacatggcaggatgaaggaaaaagaagcaagatctaaatttagacagattgtgtctgcagttcaatactgccatcagaaacggatcgtacatcgagacctcaaggctgaaaatctattgttagatgccgatatgaacattaaaatagcagatttcggttttagcaatgaatttactgttggcggtaaactcgacacgttttgtggcagtcctccatacgcagcacctgagctcttccagggcaagaaatatgacgggccagaagtggatgtgtggagtctgggggtcattttatacacactagtcagtggctcacttccctttgatgggcaaaacctaaaggaactgagagagagagtattaagagggaaatacagaattcccttctacatgtctacagactgtgaaaaccttctcaaacgtttcctggtgctaaatccaattaaacgcggcactctagagcaaatcatgaaggacaggtggatcaatgcagggcatgaagaagatgaactcaaaccatttgttgaaccagagctagacatctcagaccaaaaaagaatagatattatggtgggaatgggatattcacaagaagaaattcaagaatctcttagtaagatgaaatacgatgaaatcacagctacatatttgttattggggagaaaatcttcagagctggatgctagtgattccagttctagcagcaatctttcacttgctaaggttaggccgagcagtgatctcaacaacagtactggccagtctcctcaccacaaagtgcagagaagtgtttcttcaagccaaaagcaaagacgctacagtgaccatgctggaccagctattccttctgttgtggcgtatccgaaaaggagtcagaccagcactgcagatagtgacctcaaagaagatggaatttcctcccggaaatcaagtggcagtgctgttggaggaaagggaattgctccagccagtcccatgcttgggaatgcaagtaatcctaataaggcggatattcctgaacgcaagaaaagctccactgtccctagtagtaacacagcatctggtggaatgacacgacgaaatacttatgtttgcagtgagagaactacagctgatagacactcagtgattcagaatggcaaagaaaacagcactattcctgatcagagaactccagttgcttcaacacacagtatcagtagtgcagccaccccagatcgaatccgcttcccaagaggcactgccagtcgtagcactttccacggccagccccgggaacggcgaaccgcaacatataatggccctcctgcctctcccagcctgtcccatgaagccacaccattgtcccagactcgaagccgaggctccactaatctctttagtaaattaacttcaaaactcacaaggagtcgcaatgtatctgctgagcaaaaagatgaaaacaaagaagcaaagcctcgatccctacgcttcacctggagcatgaaaaccactagttcaatggatcccggggacatgatgcgggaaatccgcaaagtgttggacgccaataactgcgactatgagcagagggagcgcttcttgctcttctgcgtccacggagatgggcacgcggagaacctcgtgcagtgggaaatggaagtgtgcaagctgccaagactgtctctgaacggggtccggtttaagcggatatcggggacatccatagccttcaaaaatattgcttccacaattaaagtgttttcctgaacactgatggaaatgtatagaataatatttaggcaataacgtctgcatcttctaaatcatgaaattaaagtctgaggacgagagcacgcctgggagcgaaagctggccttttttctacgaatgcactacattaaagatgtgcaacctatgcgccccctgccctacttccgttaccctgagagtcggcgtgtggccccatctccatgtgcctcccgtctgggtgggtgtgagagtggacggtatgtgtgtgaagtggtgtatatggaagcatctccctacactggcagccagtcattactagtacctctgcgggagatcatccggtgctaaaacattacagttgccaaggaggaaaatactgaatgactgctaagaattaaccttaagaccagttcatagttaatacaggtttacagttcatgcctgtggttttgtgtttgttgttttgtgtttttttagtgcaaaaggtttaaatttatagttgtgaacattgcttgtgtgtgtttttctaagtagattcacaagataattaaaaattcactttttctcagtaaaa

SEQ ID NO: 419236 - DNA, 1423 bp, Homo sapiens
tggcttttaattggaaacccattatactgtgtggcacaattagaaagtgagaataaccccattctgaggccgagtgtgctcaggctgaagagccagcaggagtgcccgctgtgcgtgcgtggtgtgcggtgtgtgcagcagtgtgtgcagtgtgcagcgtgcagcggtatggcatgcaatgtgtgtgatgtatgcagtgtgcagcatggagctggcccctgtgcacacccctgcagccttgtggaagaaggtagcgctggctcagtcaaatgagaggaagagttttcataagcccggctggtgtttaaaacgtgttttggctttgttcattttatggtgttggtgttggtattggtggtcatgtactggcatgtaagatttcttttctctttccctcttctctctgcttctacattctgttcattgaggcttccaactgaatatgagaggaacgggagatatgagggctcaagtcgcaatgtatctgctgagcaaaaagatgaaaacaaagaagcaaagcctcgatccctacgcttcacctggagcatgaaaaccactagttcaatggatcccggggacatgatgcgggaaatccgcaaagtgttggacgccaataactgcgactatgagcagagggagcgcttcttgctcttctgcgtccacggagatgggcacgcggagaacctcgtgcagtgggaaatggaagtgtgcaagctgccaagactgtctctgaacggggtccggtttaagcggatatcggggacatccatagccttcaaaaatattgcttccaaaattgccaatgagctaaagctgtaacccagtgattatgatgtaaattaagtagcaattaaagtgttttcctgaacactgatggaaatgtatagaataatatttaggcaataacgtctgcatcttctaaatcatgaaattaaagtctgaggacgagagcacgcctgggagcgaaagctggccttttttctacgaatgcactacattaaagatgtgcaacctatgcgccccctgccctacttccgttaccctgagagtcggcgtgtggccccatctccatgtgcctcccgtctgggtgggtgtgagagtggacggtatgtgtgtgaagtggtgtatatggaagcatctccctacactggcagccagtcattactagtacctctgcgggagatcatccggtgctaaaacattacagttgccaaggaggaaaatactgaatgactgctaagaattaaccttaagaccagttcatagttaatacaggtttacagttcatgcctgtggttttgtgtttgttgttttgtgtttttttagtgcaaaaggtttaaatttatagttgtgaacattgcttgtgtgtgtttttctaagtagattcacaagataattaaaaattcactttttctcagtaaaa

SEQ ID NO: 419237 - DNA, 1993 bp, Homo sapiens
agcttctctcatcagtattggtggatgtgaaccaaattgaatactggcaggttggtgacacggagagctatgtgcatatgcaaaagctgtagcccctcacctctggttagttggccataggatggagtgtacttaaggtacatagactattttactcccaagaatgctaggcactcactgtcttaattgaggccaccagatacacacatgagaatataaataacggcttgtggcaataatgactaaatgccaaggagtggctggtaaaccgcggtgttccctagagaccccggcctgggctctacttaggctgcctcttggacatcagaccaaggcttacattctgaatccacagggcatccacatgggtggtgtcagtcccccacagacagagaagtgtcccgttgcatttttccatctattccagtagtaagattgtgtcatttgagattttctttaactgtataattggacgtttaattaacaaaccagagaggaggaaaaacaatgaggtgggtagagcatcatgttcagcctcagggctgtacagcaaagcaattttagactgcggatgttgagtctccagttaccctgagtgccagttacagtgattcacatctgaaagaacagtactgcaggagagggacagcccagggtggatgggtggggtgggcaggagctggctgccaactccttccctgagctgggcctgcagagccctgaggagtggggcatgctgtcctttttgcctgatttccaaggattctgcttaacgaattacttcgttcattttagtaagcacaggtggctggtgaagattttccagctaggtagatctttttgtgtgtggcttatgacttttagggggtgagggaagaaaatagacgaaaatagacttagttacaaatgtgagtctgtgcaggaaaatgtggaggtcagtcgttagttgtgttgtatcaaagacgtgaatgaggaactagctgaagtgtaagaggttgattttcctgtacgattaaaaataaacctgcctctatgcatttcagtcgcaatgtatctgctgagcaaaaagatgaaaacaaagaagcaaagcctcgatccctacgcttcacctggagcatgaaaaccactagttcaatggatcccggggacatgatgcgggaaatccgcaaagtgttggacgccaataactgcgactatgagcagagggagcgcttcttgctcttctgcgtccacggagatgggcacgcggagaacctcgtgcagtgggaaatggaagtgtgcaagctgccaagactgtctctgaacggggtccggtttaagcggatatcggggacatccatagccttcaaaaatattgcttccaaaattgccaatgagctaaagctgtaacccagtgattatgatgtaaattaagtagcaattaaagtgttttcctgaacactgatggaaatgtatagaataatatttaggcaataacgtctgcatcttctaaatcatgaaattaaagtctgaggacgagagcacgcctgggagcgaaagctggccttttttctacgaatgcactacattaaagatgtgcaacctatgcgccccctgccctacttccgttaccctgagagtcggcgtgtggccccatctccatgtgcctcccgtctgggtgggtgtgagagtggacggtatgtgtgtgaagtggtgtatatggaagcatctccctacactggcagccagtcattactagtacctctgcgggagatcatccggtgctaaaacattacagttgccaaggaggaaaatactgaatgactgctaagaattaaccttaagaccagttcatagttaatacaggtttacagttcatgcctgtggttttgtgtttgttgttttgtgtttttttagtgcaaaaggtttaaatttatagttgtgaacattgcttgtgtgtgtttttctaagtagattcacaagataattaaaaattcactttttctcagtaaaa

SEQ ID NO: 419238 - DNA, 3021 bp, Homo sapiens
agcagaggaagccgaggggcggcatcttggctccgtgaggctctgaggtgccggggtgcggcggcggcagcggcggccagcagggcggaggctgaggcagcaagctcgctagagagggagaagcagtcgggcgcaggcgcctcctccgcagcccgctccatggtcggcgcccacagcccgcggcggcctgtcttgcgctccacttccttcacatcctcctccgcctcctcgttttcaggcgccgccggcggcgctgtgtggaggcccgcgagctgaaattcgcggtgcgacgggagggagtggagaaggaggtgagggggcccaggatcgcggggcgccctgaggcaaggggacgccggcgggccgaagcgcagcccgccgcccgcaggctcggctccgccactgccgccctcccggtctcctcgcctcggccgccgaggcagggagagaatgagccccgggacccgccgggggacggcccgggccaggcccgggatctagacggccgtagggggaagggagccgccctccccacggcgccttttcggaactgccgtggactcgaggacgctggtcgccggcctcctagggctgtgctgttatgttttgaccctcgcattgtgcagaattaaagtgcagtaaaatgtccactaggaccccattgccaacggtgaatgaacgagacactgaaaaccacacgtcacatggagatgggcgtcaagaagttacctctcgtaccagccgctcaggagctcggtgtagaaactctatagcctcctgtgcagatgaacaacctcacatcggaaactacagactgttgaaaacaatcggcaaggggaattttgcaaaagtaaaattggcaagacatatccttacaggcagagaggttgcaataaaaataattgacaaaactcagttgaatccaacaagtctacaaaagctcttcagagaagtaagaataatgaagattttaaatcatcccaatatagtgaagttattcgaagtcattgaaactgaaaaaacactctacctaatcatggaatatgcaagtggaggtgaagtatttgactatttggttgcacatggcaggatgaaggaaaaagaagcaagatctaaatttagacagattgtgtctgcagttcaatactgccatcagaaacggatcgtacatcgagacctcaaggctgaaaatctattgttagatgccgatatgaacattaaaatagcagatttcggttttagcaatgaatttactgttggcggtaaactcgacacgttttgtggcagtcctccatacgcagcacctgagctcttccagggcaagaaatatgacgggccagaagtggatgtgtggagtctgggggtcattttatacacactagtcagtggctcacttccctttgatgggcaaaacctaaaggaactgagagagagagtattaagagggaaatacagaattcccttctacatgtctacagactgtgaaaaccttctcaaacgtttcctggtgctaaatccaattaaacgcggcactctagagcaaatcatgaaggacaggtggatcaatgcagggcatgaagaagatgaactcaaaccatttgttgaaccagagctagacatctcagaccaaaaaagaatagatattatggtgggaatgggatattcacaagaagaaattcaagaatctcttagtaagatgaaatacgatgaaatcacagctacatatttgttattggggagaaaatcttcagagctggatgctagtgattccagttctagcagcaatctttcacttgctaaggttaggccgagcagtgatctcaacaacagtactggccagtctcctcaccacaaagtgcagagaagtgtttcttcaagccaaaagcaaagacgctacagtgaccatgctggaccagctattccttctgttgtggcgtatccgaaaaggagtcagaccagcactgcagatagtgacctcaaagaagatggaatttcctcccggaaatcaagtggcagtgctgttggaggaaagggaattgctccagccagtcccatgcttgggaatgcaagtaatcctaataaggcggatattcctgaacgcaagaaaagctccactgtccctagtagtaacacagcatctggtggaatgacacgacgaaatacttatgtttgcagtgagagaactacagctgatagacactcagtgattcagaatggcaaagaaaacagcactattcctgatcagagaactccagttgcttcaacacacagtatcagtagtgcagccaccccagatcgaatccgcttcccaagaggcactgccagtcgtagcactttccacggccagccccgggaacggcgaaccgcaacatataatggccctcctgcctctcccagcctgtcccatgaagccacaccattgtcccagactcgaagccgaggctccactaatctctttagtaaattaacttcaaaactcacaaggagtcgcaatgtatctgctgagcaaaaagatgaaaacaaagaagcaaagcctcgatccctacgcttcacctggagcatgaaaaccactagttcaatggatcccggggacatgatgcgggaaatccgcaaagtgttggacgccaataactgcgactatgagcagagggagcgcttcttgctcttctgctgcctcccgtctgggtgggtgtgagagtggacggtatgtgtgtgaagtggtgtatatggaagcatctccctacactggcagccagtcattactagtacctctgcgggagatcatccggtgctaaaacattacagttgccaaggaggaaaatactgaatgactgctaagaattaaccttaagaccagttcatagttaatacaggtttacagttcatgcctgtggttttgtgtttgttgttttgtgtttttttagtgcaaaaggtttaaatttatagttgtgaacattgcttgtgtgtgtttttctaagtagattcacaagataattaaaaattcactttttctcagtaaaa

SEQ ID NO: 419239 - DNA, 2697 bp, Homo sapiens
agcagaggaagccgaggggcggcatcttggctccgtgaggctctgaggtgccggggtgcggcggcggcagcggcggccagcagggcggaggctgaggcagcaagctcgctagagagggagaagcagtcgggcgcaggcgcctcctccgcagcccgctccatggtcggcgcccacagcccgcggcggcctgtcttgcgctccacttccttcacatcctcctccgcctcctcgttttcaggcgccgccggcggcgctgtgtggaggcccgcgagctgaaattcgcggtgcgacgggagggagtggagaaggaggtgagggggcccaggatcgcggggcgccctgaggcaaggggacgccggcgggccgaagcgcagcccgccgcccgcaggctcggctccgccactgccgccctcccggtctcctcgcctcggccgccgaggcagggagagaatgagccccgggacccgccgggggacggcccgggccaggcccgggatctagacggccgtagggggaagggagccgccctccccacggcgccttttcggaactgccgtggactcgaggacgctggtcgccggcctcctagggctgtgctgttatgttttgaccctcgcattgtgcagaattaaagtgcagtaaaatgtccactaggaccccattgccaacggtgaatgaacgagacactgaaaaccacacgtcacatggagatgggcgtcaagaagttacctctcgtaccagccgctcaggagctcggtgtagaaactctatagcctcctgtgcagatgaacaacctcacatcggaaactacagactgttgaaaacaatcggcaaggggaattttgcaaaagtaaaattggcaagacatatccttacaggcagagaggttgcaataaaaataattgacaaaactcagttgaatccaacaagtctacaaaagctcttcagagaagtaagaataatgaagattttaaatcatcccaatatagtgaagttattcgaagtcattgaaactgaaaaaacactctacctaatcatggaatatgcaagtggaggtgaagtatttgactatttggttgcacatggcaggatgaaggaaaaagaagcaagatctaaatttagacagattgtgtctgcagttcaatactgccatcagaaacggatcgtacatcgagacctcaaggctgaaaatctattgttagatgccgatatgaacattaaaatagcagatttcggttttagcaatgaatttactgttggcggtaaactcgacacgttttgtggcagtcctccatacgcagcacctgagctcttccagggcaagaaatatgacgggccagaagtggatgtgtggagtctgggggtcattttatacacactagtcagtggctcacttccctttgatgggcaaaacctaaaggaactgagagagagagtattaagagggaaatacagaattcccttctacatgtctacagactgtgaaaaccttctcaaacgtttcctggtgctaaatccaattaaacgcggcactctagagcaaatcatgaaggacaggtggatcaatgcagggcatgaagaagatgaactcaaaccatttgttgaaccagagctagacatctcagaccaaaaaagaatagatattatggtgggaatgggatattcacaagaagaaattcaagaatctcttagtaagatgaaatacgatgaaatcacagctacatatttgttattggggagaaaatcttcagagctggatgctagtgattccagttctagcagcaatctttcacttgctaaggttaggccgagcagtgatctcaacaacagtactggccagtctcctcaccacaaagtgcagagaagtgtttcttcaagccaaaagcaaagacgctacagtgaccatgctggaccagctattccttctgttgtggcgtatccgaaaaggagtcagaccagcactgcagatagtgacctcaaagaagatggaatttcctcccggaaatcaagtggcagtgctgttggaggaaagggaattgctccagccagtcccatgcttgggaatgcaagtaatcctaataaggcggatattcctgaacgcaagaaaagctccactgtccctagtagtaacacagcatctggtggaatgacacgacgaaatacttatgtttgcagtgagagaactacagctgatagacactcagtgattcagaatggcaaagaaaacagcactattcctgatcagagaactccagttgcttcaacacacagtatcagtagtgcaacctatgcgccccctgccctacttccgttaccctgagagtcggcgtgtggccccatctccatgtgcctcccgtctgggtgggtgtgagagtggacggtatgtgtgtgaagtggtgtatatggaagcatctccctacactggcagccagtcattactagtacctctgcgggagatcatccggtgctaaaacattacagttgccaaggaggaaaatactgaatgactgctaagaattaaccttaagaccagttcatagttaatacaggtttacagttcatgcctgtggttttgtgtttgttgttttgtgtttttttagtgcaaaaggtttaaatttatagttgtgaacattgcttgtgtgtgtttttctaagtagattcacaagataattaaaaattcactttttctcagtaaaa

SEQ ID NO: 419240 - DNA, 2247 bp, Homo sapiens
agcagaggaagccgaggggcggcatcttggctccgtgaggctctgaggtgccggggtgcggcggcggcagcggcggccagcagggcggaggctgaggcagcaagctcgctagagagggagaagcagtcgggcgcaggcgcctcctccgcagcccgctccatggtcggcgcccacagcccgcggcggcctgtcttgcgctccacttccttcacatcctcctccgcctcctcgttttcaggcgccgccggcggcgctgtgtggaggcccgcgagctgaaattcgcggtgcgacgggagggagtggagaaggaggtgagggggcccaggatcgcggggcgccctgaggcaaggggacgccggcgggccgaagcgcagcccgccgcccgcaggctcggctccgccactgccgccctcccggtctcctcgcctcggccgccgaggcagggagagaatgagccccgggacccgccgggggacggcccgggccaggcccgggatctagacggccgtagggggaagggagccgccctccccacggcgccttttcggaactgccgtggactcgaggacgctggtcgccggcctcctagggctgtgctgttatgttttgaccctcgcattgtgcagaattaaagtgcagtaaaatgtccactaggaccccattgccaacggtgaatgaacgagacactgaaaaccacacgtcacatggagatgggcgtcaagaagttacctctcgtaccagccgctcaggagctcggtgtagaaactctatagcctcctgtgcagatgaacaacctcacatcggaaactacagactgttgaaaacaatcggcaaggggaattttgcaaaagtaaaattggcaagacatatccttacaggcagagaggttgcaataaaaataattgacaaaactcagttgaatccaacaagtctacaaaagctcttcagagaagtaagaataatgaagattttaaatcatcccaatatagtgaagttattcgaagtcattgaaactgaaaaaacactctacctaatcatggaatatgcaagtggaggtgaagtatttgactatttggttgcacatggcaggatgaaggaaaaagaagcaagatctaaatttagacagattgtgtctgcagttcaatactgccatcagaaacggatcgtacatcgagacctcaaggctgaaaatctattgttagatgccgatatgaacattaaaatagcagatttcggttttagcaatgaatttactgttggcggtaaactcgacacgttttgtggcagtcctccatacgcagcacctgagctcttccagggcaagaaatatgacgggccagaagtggatgtgtggagtctgggggtcattttatacacactagtcagtggctcacttccctttgatgggcaaaacctaaaggaactgagagagagagtattaagagggaaatacagaattcccttctacatgtctacagactgtgaaaaccttctcaaacgtttcctggtgctaaatccaattaaacgcggcactctagagcaaatcatgaaggacaggtggatcaatgcagggcatgaagaagatgaactcaaaccatttgttgaaccagagctagacatctcagaccaaaaaagaatagatattatggtgggaatgggatattcacaagaagaaattcaagaatctcttagtaagatgaaatacgatgaaatcacagctacatatttgttattggggagaaaatcttcagaggtaagagtaatcagaaagagctgaaataccctgtatgtaattattagtttatataaactgttttcttagtttttatcttttgaatatttgtaacatttgatacatcattttttagatttacttgcaaatagcaaatctaaatcctatgactattataagctattttaacttaacccttaatgatggatattggccaggcgtggtggctcatgcctgtaatcccagcactttgggaggccaaggcggacagatcacttgagaccaggagttcgagaccagactggccaacatagggaaactctgtctctgctaaaacaaacaaacaaacaaaaaattagctgggcgtgttggcgcttgcctgtaatccctgctccttgggaggctgaggcaagagaactgcttgaccctgagaggcagaggttgcggtgagccaggatcacgccactgcactccagcctgggtgacagagcgagactctgtctcaaaaaaaaaaa

SEQ ID NO: 419241 - DNA, 450 bp, Homo sapiens
attgtgtctgcagttcaatactgccatcagaaacggatcgtacatcgagacctcaaggtgagtagaagtgcctcactcagtgtatgctctgtctgtttgtgtgcagttctctcagtggtcattacacaaatgaggtatagattagccttattagcattttttaaaatcccacaataattgaatcctcttaatcaagttatgggaaagagcattaaaaataaagaaaaataaaggttattgaaagtattttacatttcagttacggtgactggtggttgatctctggagaacagtcatcacacagccaaacaaatgtgggcctccagaaatgtatggtcacgcccacagcatcctcagtgccacccggcattcatttctgctgctttcatcagtattctctcccgttaacagcagtgcctgtttgagacctctttcaaggtcctcagcctc

SEQ ID NO: 419242 - DNA, 366 bp, Homo sapiens
aagcagtaactttggagagtctttagagtgaccttagatctttgcttgatttgtatgccatactggatatatcctgcggctttttaagcaagaattgaaacattaaaaaatattttttgagtttatgctttgaacgatagtcaatgaaatgttgaaaataaatttttgtaaatattacggttatcagaatatttcattttactctgctaatgaacagtttaccttttttagcaaatcatgaaggacaggtggatcaatgcagggcatgaagaagatgaactcaaaccatttgttgaaccagagctagacatctcagaccaaaaaagaataggtaatcactccatgcctgcatgttcatgtgttttt

SEQ ID NO: 419243 - DNA, 1527 bp, Homo sapiens
cgcaaaagtagttgatggaaatcggccgttgggatgctgtctaagcttggatacctgagtaataacggacaacagataaagctccgcatccttgcgccacgtgcttcggtccgtggtttgcgtgcagacgtttgacctgtatggtgaccctcgcgatttgcaaatgtgctgaggatctggaatactgaagtggaaggcacctcttgttttggggagcatgtatatttccctcctgtgacgcactgcttccacagagaggtgcaaacgtgcaaacgctcagcgaccgcagcgctcctgcccctcccccaccgtaactccggggtcgcggatctgcccgccccgctctcccgaagctgttcgggcagtgtccgaacggcttcggaggggcgagaagccagcatccgagccgcctctccggaataccagcagcctgacgcacgcgtgctgtcgggggagggatgctgggacagctgctcccgcacacggctcgcggtctcggcgccgcggagatgcccggccaggtccggggtccgactggacggagcgtagctcttctgcagagccgcccgctgtggccgggaccgagggtggcggcggcggatcagctggatactcttgttaccagaattccaaaggttctgatagaatcaaagatggatacaaagtgaactcacacatagctaagctgcaagagttatggaaaactccccaaaatcaaacaatccacctctctaaatcaatgatggaggcgtcctttttcaagcatccagacctcaccacaggccagaagcgttacctgtgcagcattgctaaaatctataatgcaaactatctgaagatgttaatgaagaggcagtacatgcacgtacttcagcacagctcacaaaagccaggtgtcctcactcatcacagaagccgccttagctcccgttactcacagaaacagcattacccttgcactacatggcgacatcaactggagagagaggactcggggtcttctgatatcgcagctgcatctgcacctgaaatgctcatacagcattccctttggcggccagtgagaaacaaagaagggataaaaactggatatgcatctaaaacaagatgtaagtcactgaagatttttagaagaccaaggaaactgttcatgcaaacagtttcttcagatgattctgaatcacacatgagtgaagaaaaaaaggaagaagatttactaaataattttatgcaatcaatgtcaattgaagaacagggagaacatctgatgttaacttgacagtcttgtctcgtgtattgaattcgtgccaaaggtgagggtaaggggttgtgagttgtgtcctgtatgtttaggatggtattgttatttattaaatcattaagtaattttggtttgttcagaaacttaaaacaatgtaattggtctgatgtagttccatgtaccaatgatagttatgtaagaaaatttacatgtaacatatacttgtacttctagctagatacaattaaaacttttcttgcattcaa

SEQ ID NO: 419244 - DNA, 2091 bp, Homo sapiens
cgcaaaagtagttgatggaaatcggccgttgggatgctgtctaagcttggatacctgagtaataacggacaacagataaagctccgcatccttgcgccacgtgcttcggtccgtggtttgcgtgcagacgtttgacctgtatggtgaccctcgcgatttgcaaatgtgctgaggatctggaatactgaagtggaaggcacctcttgttttggggagcatgtatatttccctcctgtgacgcactgcttccacagagaggtgcaaacgtgcaaacgctcagcgaccgcagcgctcctgcccctcccccaccgtaactccggggtcgcggatctgcccgccccgctctcccgaagctgttcgggcagtgtccgaacggcttcggaggggcgagaagccagcatccgagccgcctctccggaataccagcagcctgacgcacgcgtgctgtcgggggagggatgctgggacagctgctcccgcacacggctcgcggtctcggcgccgcggagatgcccggccaggtccggggtccgactggacggagcgtagctcttctgcagagccgcccgctgtggccgggaccgagggtggcggcggcggatcagctggatactcttgttaccagaattccaaaggttctgatagaatcaaagatggatacaaagtgaactcacacatagctaagctgcaagagttatggaaaactccccaaaatcaaacaatccacctctctaaatcaatgatggaggcgtcctttttcaagcatccagacctcaccacaggccagaagcgttacctgtgcagcattgctaaaatctataatgcaaactatctgaagatgttaatgaagaggcagtacatgcacgtacttcagcacagctcacaaaagccaggtgtcctcactcatcacagaagccgccttagctcccgttactcacagaaacagcattacccttgcactacatggcgacatcaactggagagagaggactcggggtcttctgatatcgcagctgcatctgcacctgaaatgctcatacagcattccctttggcggccagtgagaaacaaagaagggataaaaactggatatgcatctaaaacaagatgtaagtcactgaagatttttagaagaccaaggaaactgttcatgcaaacagtttcttcagatgattctgaatcacacatgagtgaagaaaaaaaggaagaagatttactaaataattttatgcaatcaatgtcaattgaagaacagggagaacatctgatgttaacttgacagtcttgtctcgtgtattgaattcgtgccaaaggtgagggtaaggggttgtgagttgtgtcctgtatgtttaggatggtattgttatttattaaatcattaagtaattttggtttgttcagaaacttaaaacaatgtaattggtctgatgtagttccatgtaccaatgatagttatgtaagaaaatttacatgtaacatatacttgtacttctagctagatacaattaaaacttttcttgcattcaaaaaaaaaaccaataaagaggacaaccaaacaaacaacaaacaacatcaaccggggaggcactactgagggggggcggcaacaagcgagagtactgaggaaaaggcacgttggggccaaacggtggtctccccgggccccacctctgtgttgacacacagaggagacaaactcggcgagaccccccattacagggaagtcgaaataattacggaaagccacggtgatccgctgatgataagacaaccgggcaaacggacataacagactgagacatgccgaaaggcgacgacaagaagacgagagcaggagacaagaacaaagagacggagaacgacgaactggtaggaggagagagagagggcgacaggcacagagagggcgcaacggaaagagacggacataagacgaaacaaaacgtcggagaggaaggagggcggaggagacaagaggaaggaggagacagagaagcgggagaagaacgacaggaggcggaaacgaaacggggcagggcgcacggaagaaataaaacgaaaaaagacaaccaaacgcgagaagaagacaaa

SEQ ID NO: 419245 - DNA, 1133 bp, Homo sapiens
  misc_feature (12)..(12): n is a, c, g, or t
atagctctttgngtgacacctaatttagaaaccccgcctcggggcttttttataaaaaaaagccagtgtacgccgaatccggatcgcaccggctcgcggtctcggcgccgcggagatgcccggccaggtccggggtccgactggacggagcgtagctcttctgcagagccgcccgctgtggccgggaccgagggtggcggcggcggatcagctggatactcttgttaccagaattccaaaggttctgatagaatcaaagatggatacaaagtgaactcacacatagctaagctgcaagagttatggaaaactccccaaaatcaaacaatccacctctctaaatcaatgatggaggcgtcctttttcaagcatccagacctcaccacaggccagaagcgttacctgtgcagcattgctaaaatctataatgcaaactatctgaagatgttaatgaagaggcagtacatgcacgtacttcagcacagctcacaaaagccaggtgtcctcactcatcacagaagccgccttagctcccgttactcacagaaacagcattacccttgcactacatggcgacatcaactggagagagaggactcggggtcttctgatatcgcagctgcatctgcacctgaaatgctcatacagcattccctttggcggccagtgagaaacaaagaagggataaaaactggatatgcatctaaaacaagatgtaagtcactgaagatttttagaagaccaaggaaactgttcatgcaaacagtttcttcagatgattctgaatcacacatgagtgaagaaaaaaaggaagaagatttactaaataattttatgcaatcaatgtcaattgaagaacagggagaacatctgatgttaacttgacagtcttgtctcgtgtattgaattcgtgccaaaggtgagggtaaggggttgtgagttgtgtcctgtatgtttaggatggtattgttatttattaaatcattaagtaattttggtttgttcagaaacttaaaacaatgtaattggtctgatgtagttccatgtaccaatgatagttatgtaagaaaatttacatgtaacatatacttgtacttctagctagatacaattaaaacttttcttgcattcaa

SEQ ID NO: 419246 - DNA, 1385 bp, Homo sapiens
cagtgcgacatgaacgaagggaaaaaagcggggaagctaatagacgagtacacgaaaagggtggtagggagaggatgacaaggggatcaacacggtaggatgcgcaggctagatggaagagtcagagcgtcggggacaaattcagcgcgagacgcccacaggaagtaggagagtctcaaggctgcagcggacagacctgacgccgacacgcgaagtctcagacatggggcgtccatgagacacgcatctcgaagacagccaggaatacaggtatagtcacacaccggccgaggtccatagatcagcccgtaagtccagcacttcgagagccgacggcggagtatcatgagggtcaggagatccaacccacctcggcctcccaaagtgctgggattacaggcgtgagccaccacacccggcctaaatatctagatcttaataattcagtttgttgaactgatctttgcctctgaaattcacatgatgtctttgcctacagatagaatcaaagatggatacaaagtgaactcacacatagctaagctgcaagagttatggaaaactccccaaaatcaaacaatccacctctctaaatcaatgatggaggcgtcctttttcaagcatccagacctcaccacaggccagaagcgttacctgtgcagcattgctaaaatctataatgcaaactatctgaagatgttaatgaagaggcagtacatgcacgtacttcagcacagctcacaaaagccaggtgtcctcactcatcacagaagccgccttagctcccgttactcacagaaacagcattacccttgcactacatggcgacatcaactggagagagaggactcggggtcttctgatatcgcagctgcatctgcacctgaaatgctcatacagcattccctttggcggccagtgagaaacaaagaagggataaaaactggatatgcatctaaaacaagatgtaagtcactgaagatttttagaagaccaaggaaactgttcatgcaaacagtttcttcagatgattctgaatcacacatgagtgaagaaaaaaaggaagaagatttactaaataattttatgcaatcaatgtcaattgaagaacagggagaacatctgatgttaacttgacagtcttgtctcgtgtattgaattcgtgccaaaggtgagggtaaggggttgtgagttgtgtcctgtatgtttaggatggtattgttatttattaaatcattaagtaattttggtttgttcagaaacttaaaacaatgtaattggtctgatgtagttccatgtaccaatgatagttatgtaagaaaatttacatgtaacatatacttgtacttctagctagatacaattaaaacttttcttgcattcaa

SEQ ID NO: 419247 - DNA, 1473 bp, Homo sapiens
cgcaaaagtagttgatggaaatcggccgttgggatgctgtctaagcttggatacctgagtaataacggacaacagataaagctccgcatccttgcgccacgtgcttcggtccgtggtttgcgtgcagacgtttgacctgtatggtgaccctcgcgatttgcaaatgtgctgaggatctggaatactgaagtggaaggcacctcttgttttggggagcatgtatatttccctcctgtgacgcactgcttccacagagaggtgcaaacgtgcaaacgctcagcgaccgcagcgctcctgcccctcccccaccgtaactccggggtcgcggatctgcccgccccgctctcccgaagctgttcgggcagtgtccgaacggcttcggaggggcgagaagccagcatccgagccgcctctccggaataccagcagcctgacgcacgcgtgctgtcgggggagggatgctgggacagctgctcccgcacacggctcgcggtctcggcgccgcggagatgcccggccaggtccggggtccgactggacggagcgtagctcttctgcagagccgcccgctgtggccgggaccgagggtggcggcggcggatcagctggatactcttgttaccagaattccaaaggttctgatagaatcaaagatggatacaaagtgaactcacacatagctaagctgcaagagttatggaaaactccccaaaatcaaacaatccacctctctaaatcaatgatggaggcgtcctttttcaagcatccagacctcaccacaggccagaagcgttacctgtgcagcattgctaaaatctataatgcaaactatctgaagatgttaatgaagaggcagtacatgcacgtacttcagcacagctcacaaaagccaggtgtcctcactcatcacagaagccgccttagctcccgttactcacagaaacagcattacccttgcactacatggcgacatcaactggagagagaggactcggggtcttctgatatcgcagctgcatctgcacctgaaatgctcatacagcattccctttggcggccagtgagaaacaaagaagggataaaaactggatatgcatctaaaacaagatgtaagtcactgaagatttttagaagaccaaggaaactgttcatgcaaacagtttcttcagatgattctgaatcacacatgagtgaagaaaagggagaacatctgatgttaacttgacagtcttgtctcgtgtattgaattcgtgccaaaggtgagggtaaggggttgtgagttgtgtcctgtatgtttaggatggtattgttatttattaaatcattaagtaattttggtttgttcagaaacttaaaacaatgtaattggtctgatgtagttccatgtaccaatgatagttatgtaagaaaatttacatgtaacatatacttgtacttctagctagatacaattaaaacttttcttgcattcaa

SEQ ID NO: 419248 - DNA, 806 bp, Homo sapiens
  misc_feature (37)..(37): n is a, c, g, or t
gctgggtgactctagagttccccggatgggcgacatntcaagcatccagacctcaccacaggccagaagcgttacctgtgcagcattgctaaaatctataatgcaaactatctgaagatgttaatgaagaggcagtacatgcacgtacttcagcacagctcacaaaagccaggtgtcctcactcatcacagaagccgccttagctcccgttactcacagaaacagcattacccttgcactacatggcgacatcaactggagagagaggactcggggtcttctgatatcgcagctgcatctgcacctgaaatgctcatacagcattccctttggcggccagtgagaaacaaagaagggataaaaactggatatgcatctaaaacaagatgtaagtcactgaagatttttagaagaccaaggaaactgttcatgcaaacagtttcttcagatgattctgaatcacacatgagtgaagaaaaaaaggaagaagatttactaaataattttatgcaatcaatgtcaattgaagaacagggagaacatctgatgttaacttgacagtcttgtctcgtgtattgaattcgtgccaaaggtgagggtaaggggttgtgagttgtgtcctgtatgtttaggatggtattgttatttattaaatcattaagtaattttggtttgttcagaaacttaaaacaatgtaattggtctgatgtagttccatgtaccaatgatagttatgtaagaaaatttacatgtaacatatacttgtacttctagctagatacaattaaaacttttcttgcattcaa

SEQ ID NO: 419249 - DNA, 1295 bp, Homo sapiens
cgcaaaagtagttgatggaaatcggccgttgggatgctgtctaagcttggatacctgagtaataacggacaacagataaagctccgcatccttgcgccacgtgcttcggtccgtggtttgcgtgcagacgtttgacctgtatggtgaccctcgcgatttgcaaatgtgctgaggatctggaatactgaagtggaaggcacctcttgttttggggagcatgtatatttccctcctgtgacgcactgcttccacagagaggtgcaaacgtgcaaacgctcagcgaccgcagcgctcctgcccctcccccaccgtaactccggggtcgcggatctgcccgccccgctctcccgaagctgttcgggcagtgtccgaacggcttcggaggggcgagaagccagcatccgagccgcctctccggaataccagcagcctgacgcacgcgtgctgtcgggggagggatgctgggacagctgctcccgcacacggctcgcggtctcggcgccgcggagatgcccggccaggtccggggtccgactggacggagcgtagctcttctgcagagccgcccgctgtggccgggaccgagggtggcggcggcggatcagctggatactcttgttaccagaattccaaaggttctgatagaatcaaagatggatacaaagtgaactcacacatagctaagctgcaagagttatggaaaactccccaaaatcaaacaatccacctctctaaatcaatgatggaggcgtcctttttcaagcatccagacctcaccacaggccagaagcgttacctgtgcagcattgctaaaatctataatgcaaactatctgaagatgttaatgaagaggcagtacatgcacgtacttcagcacagctcacaaaagccaggtgtcctcactcatcacagaagccgccttagctcccgttactcacagaaacagcattacccttgcactacatggcgacatcaactggagagagaggactcggggtcttctgatatcgcagctgcatctgcacctgaaatgctcatacagcattccctttggcggccagtgagaaacaaagaagggtctgtttcttagtgtaaaaggggggaaatgcatctcagtttaatttttttttttctcagacagggttttgttctctcacccaggctggagtgtagtggtgtgatacagtttactgtattctcaaactcctgggctcaagcaatgctcctgcctcagactcccaagtagctagggctaaaggcacaaaccaccatgccctgctagttaaaaaaaattg

SEQ ID NO: 419250 - DNA, 1175 bp, Homo sapiens
agcgttgccctggagagcccctctgtccctgctatccccatctcccctggcccagacttctgcccttcacgcccatccctgaccagcagccccactcagtctgggctctgggtgccagctggttatagacatgccacctgaacccaggccaggagctggtggatgcgtggggctattttaagcacagcctcttggcctgcacactcccctggcccccagcccccagcagctcagctactggtcacctgccaccgcctggaatgctgattggcagttggctggggtgggtgggggctgggaagacactattataaagctgggagtgttgggaagcagccgtccccgtccagagtcctctgtggtccctgctgccaccatggccactcaccgcctcgtgatggtccggcacggcgagagcacatggaaccaggagaaccgtttctgtggctggttcgatgcagagctgagtgaaaaggggaccgaggaggccaagcggggagccaaggccatcaaggatgccaagatggagtttgacatctgctacacgtcagtgctgaagcgggccatccgcaccctctgggccatcctggacggcacggaccagatgtggctgcctgtggtgcgcacttggcgcctcaatgagcggcattacgggggcctcacaggcctcaacaaggcagaaacggccgccaagcacggggaggagcaggtgaagatctggaggcgctccttcgacatcccgccgcccccgatggacgagaagcacccctactacaactccattagcaaggagcgtcggtacgcaggcctgaagcccggggaactccccacctgcgagagcctcaaggacaccattgcccgggccctgcccttctggaacgaggagattgttccccagatcaaggccggcaagcgagtgctcattgcagcccacgggaacagcctgcggggcattgtcaagcacctggaagggatgtcagaccaggcgatcatggagctgaacctgcccacggggatccccattgtgtatgagctgaacaaggagctgaagcccaccaagcccatgcagttcctgggtgatgaggaaacggtgcggaaggccatggaggctgtggctgcccagggcaaggccaagtgaggggtgggcttgggcaataaaggcacctcccccaaca

SEQ ID NO: 419251 - DNA, 1291 bp, Homo sapiens
agcgttgccctggagagcccctctgtccctgctatccccatctcccctggcccagacttctgcccttcacgcccatccctgaccagcagccccactcagtctgggctctgggtgccagctggttatagacatgccacctgaacccaggccaggagctggtggatgcgtggggctattttaagcacagcctcttggcctgcacactcccctggcccccagcccccagcagctcagctactggtcacctgccaccgcctggaatgctgattggcagttggctggggtgggtgggggctgggaagacactattataaagctgggagtgttgggaagcagccgtccccgtccagagtcctctgtggtccctgctgccaccatggccactcaccgcctcgtgatggtccggcacggcgagagcacatggaaccaggagaaccgtttctgtggctggttcgatgcagagctgagtgaaaaggggaccgaggaggccaagcggggagccaaggccatcaaggatgccaagatggagtttgacatctgctacacgtcagtgctgaagcgggccatccgcaccctctgggccatcctggacggcacggaccagatgtggctgcctgtggtgcgcacttggcgcctcaatgagcggcattacgggggcctcacaggcctcaacaaggcagaaacggccgccaagcacggggaggagcaggtgaagatctggaggcgctccttcgacatcccgccgcccccgatggacgagaagcacccctactacaactccattagcaaggagcgtcggtacgcaggcctgaagcccggggaactccccacctgcgagagcctcaaggacaccattgcccgggccctgcccttctggaacgaggagattgttccccagatcaaggccggcaagcgagtgctcattgcagcccacgggaacagcctgcggggcattgtcaagcacctggaagggatgtcagaccaggcgatcatggagctgaacctgcccacggggatccccattgtgtatgagctgaacaaggagctgaagcccaccaagcccatgcagttcctgggtgatgaggaaacggtgcggaaggccatggaggctgtggctgcccagggcaaggccaagtgaggggtgggcttgggcaataaaggcacctcccccaacaaaaaagaatatcttgatatttggttaaatagaagtctaagattaaaaaacctgagggggggcccggttcccattttgccttttgggaggcgtttttcccgcgctaagtggcctagg

SEQ ID NO: 419252 - DNA, 994 bp, Homo sapiens
agcgttgccctggagagcccctctgtccctgctatccccatctcccctggcccagacttctgcccttcacgcccatccctgaccagcagccccactcagtctgggctctgggtgccagctggttatagacatgccacctgaacccaggccaggagctggtggatgcgtggggctattttaagcacagcctcttggcctgcacactcccctggcccccagcccccagcagctcagctactggtcacctgccaccgcctggaatgctgattggcagttggctggggtgggtgggggctgggaagacactattataaagctgggagtgttgggaagcagccgtccccgtccagagtcctctgtggtccctgctgccaccatggccactcaccgcctcgtgatggtccggcacggcgagagcacatggaaccaggagaaccgtttctgtggctggttcgatgcagagctgagtgaaaaggggaccgaggaggccaagcggggagccaaggccatcaaggatgccaagatggagtttgacatctgctacacgtcagtgctgaagcgggccatccgcaccctctgggccatcctggacggcacggaccagatgtggctgcctgtggtgcgcacttggcgcctcaatgagcggcattacgggggcctcacaggcctcaacaaggcagaaacggccgccaagcacggggaggagcaggtgaagatctggaggcgctccttcgacatcccgccgcccccgatggacgagaagcacccctactacaactccattagcaagggatgtcagaccaggcgatcatggagctgaacctgcccacggggatccccattgtgtatgagctgaacaaggagctgaagcccaccaagcccatgcagttcctgggtgatgaggaaacggtgcggaaggccatggaggctgtggctgcccagggcaaggccaagtgaggggtgggcttgggcaataaaggcacctcccccaaca

SEQ ID NO: 419253 - DNA, 645 bp, Homo sapiens
tggagatggagtttcgctcttgtcgctcaggttggagtgcaatggcacaataggagtaaaactccatctcaaaaaaaagaaaaagaaaaagaaaagaaaaaaaaaaaacaaagggtgagtgtcccttcctgaccctcaacttcagtctggctggagtcacactgggctgagggaactagtggacagcaccaccacagatcacagccacttgggtgggctgaagtccccatttttttcaccactgggctatttctgtaggctgcttggtctaactcagttactccttgacctttggcaacatttctgtggcctcgttctcagggctgggaaggaattggtgccaggggaactggctctgtggaccataaaggtcacatagtgtctgctgtgtaaacaggctggggacagaggggctaaggacacctattccttccggcatagggatgtcagaccaggcgatcatggagctgaacctgcccacggggatccccattgtgtatgagctgaacaaggagctgaagcccaccaagcccatgcagttcctgggtgatgaggaaacggtgcggaaggccatggaggctgtggctgcccagggcaaggccaagtgaggggtgggcttgggcaataaaggcacctcccccaaca

SEQ ID NO: 419254 - DNA, 1279 bp, Homo sapiens
agcgttgccctggagagcccctctgtccctgctatccccatctcccctggcccagacttctgcccttcacgcccatccctgaccagcagccccactcagtctgggctctgggtgccagctggttatagacatgccacctgaacccaggccaggagctggtggatgcgtggggctattttaagcacagcctcttggcctgcacactcccctggcccccagcccccagcagctcagctactggtcacctgccaccgcctggaatgctgattggcagttggctggggtgggtgggggctgggaagacactattataaagctgggagtgttgggaagcagccgtccccgtccagagtcctctgtggtccctgctgccaccatggccactcaccgcctcgtgatggtccggcacggcgagagcacatggaaccaggagaaccgtttctgtggctggttcgatgcagagctgagtgaaaaggggaccgaggaggccaagcggggagccaaggccatcaaggatgccaagatggagtttgacatctgctacacgtcagtgctgaagcgggccatccgcaccctctgggccatcctggacggcacggaccagatgtggctgcctgtggtgcgcacttggcgcctcaatgagcggcattacgggggcctcacaggcctcaacaaggcagaaacggccgccaagcacggggaggagcaggtgaagatctggaggcgctccttcgacatcccgccgcccccgatggacgagaagcacccctactacaactccattagcaaggtgggctgcctttgctgggaaggcctctgggaagctgcagagtggggagtcgggtgggggcccactggcttgggagggaaagcagcgtgcctgtgtccccgcaggagcgtcggtacgcaggcctgaagcccggggaactccccacctgcgagagcctcaaggacaccattgcccgggccctgcccttctggaacgaggagattgttccccagatcaaggccggcaagcgagtgctcattgcagcccacgggaacagcctgcggggcattgtcaagcacctggaagggatgtcagaccaggcgatcatggagctgaacctgcccacggggatccccattgtgtatgagctgaacaaggagctgaagcccaccaagcccatgcagttcctgggtgatgaggaaacggtgcggaaggccatggaggctgtggctgcccagggcaaggccaagtgaggggtgggcttgggcaataaaggcacctcccccaaca

SEQ ID NO: 419255 - DNA, 1106 bp, Homo sapiens
agcgttgccctggagagcccctctgtccctgctatccccatctcccctggcccagacttctgcccttcacgcccatccctgaccagcagccccactcagtctgggctctgggtgccagctggttatagacatgccacctgaacccaggccaggagctggtggatgcgtggggctattttaagcacagcctcttggcctgcacactcccctggcccccagcccccagcagctcagctactggtcacctgccaccgcctggaatgctgattggcagttggctggggtgggtgggggctgggaagacactattataaagctgggagtgttgggaagcagccgtccccgtccagagtcctctgtggtccctgctgccaccatggccactcaccgcctcgtgatggtccggcacggcgagagcacatggaaccaggagaaccgtttctgtggctggttcgatgcagagctgagtgaaaaggggaccgaggaggccaagcggggagccaaggccatcaaggatgccaagatggagtttgacatctgctacacgtcagtgctgaagcgggccatccgcaccctctgggccatcctggacggcacggaccagatgtggctgcctgtggtgcgcacttggcgcctcaatgagcggcattacgggggcctcacaggcctcaacaaggcagaaacggccgccaagcacggggaggagcaggtgaagatctggaggcgctccttcgacatcccgccgcccccgatggacgagaagcacccctactacaactccattagcaaggagcgtcggtacgcaggcctgaagcccggggaactccccacctgcgagagcctcaaggacaccattgcagcccacgggaacagcctgcggggcattgtcaagcacctggaagggatgtcagaccaggcgatcatggagctgaacctgcccacggggatccccattgtgtatgagctgaacaaggagctgaagcccaccaagcccatgcagttcctgggtgatgaggaaacggtgcggaaggccatggaggctgtggctgcccagggcaaggccaagtgaggggtgggcttgggcaataaaggcacctcccccaaca

SEQ ID NO: 419256 - DNA, 813 bp, Homo sapiens
tggagatggagtttcgctcttgtcgctcaggttggagtgcaatggcacaataggagtaaaactccatctcaaaaaaaagaaaaagaaaaagaaaagaaaaaaaaaaaacaaagggtgagtgtcccttcctgaccctcaacttcagtctggctggagtcacactgggctgagggaactagtggacagcaccaccacagatcacagccacttgggtgggctgaagtccccatttttttcaccactgggctatttctgtaggctgcttggtctaactcagttactccttgacctttggcaacatttctgtggcctcgttctcagggctgggaaggaattggtgccaggggaactggctctgtggaccataaaggtcacatagtgtctgctgtgtaaacaggctggggacagaggggctaaggacacctattccttccggcatagggatgtcagaccaggcgatcatggagctgaacctgcccacggggatccccattgtgtatgagctgaacaaggagctgaagcccaccaagcccatgcagttcctgggtgatgaggaaacggtgcggaaggccatggaggctgtggctgcccagggcaaggccaagtgaggggtgggcttgggcaataaaggcacctcccccaacagcctgggagtccagcgcaccgttgcattgccaggctcacaccgccatcagctgtggggattccagaaccaggggttgcagccacccaccctcccccactccatacgtgtgtcaccaggggcaggagcctagtacccacacctagtcatcaggacactgagccagggct

SEQ ID NO: 419257 - DNA, 717 bp, Homo sapiens
attcggaacgaggcctcgtgcgcactcgtgccgcctcgtgccgtgaactggctcagatccccctcaacccctaggctggactcacaggagccccatctctggggctatgcccccaccagagaccactgcccccaacactcggactccctctttaagacctggctcagtgctggcccctcagtgcccacccactcctgtgctacccagccccagaggcagaagccaatgggtcactgtgccctaaggggtttgaccagggaaccacgggctgtcccttgaggtgcctggacagggtaagggggtgcttccagcctcctaacccaaagccagctgttccaggctccaggggaaaaaggtgtggccaggctgctcctcgaggaggctgggagctggccgactgcaaaagccagactggggcacctcccgtatccttggggcatggtgtggggtggtgagggtctcctgctatattctcctggatccgtggaaatagcctggctccctcttacccagtaatgaggggcagggaagggaactgggaggcagccgtttagtcctccctgccctgcccactgcctggatggggcgatgccacccctcatccttcacccagctctggcctctgggtcccaccacccagccccccgtgtcagaacaatctttgctctgtacaatcggcctctttacaataaaacctcctgctccacaaaaaaaaac

SEQ ID NO: 419258 - DNA, 399 bp, Homo sapiens
tttggcagagcgacgggaggagcactgtggactcggcagaggacgtccactccctggacagctgtgaatacatctgggaggctggtgtgggcttcgctcactccccccagcctaactacatccacgatatgaaccggatggagctgctgaaactgctgctgacatgcttctccgaggccatgtacctgcccccagctccggaaagtggcagcaccaacccatgggttcagttcttttgttccacggagaacagacatgccctgcccctcttcacctccctcctcaacaccgtgtgtgcctatgaccctatgaatgtgtaatacggaacccagtgagtgccagccgcagtgacccagtcctcctgatctcctcccgtcgtctgccaaagtatctgccgtc

SEQ ID NO: 419259 - DNA, 3346 bp, Homo sapiens
ggcggggccgacgagggccgggggcggggcgcgccgcttgtctcctgcgagagccgcgggggccgcggagctggagccggagctgaagccggagccgggttggagtctgggcgggggccgggccggagcgggctccagagacatggggtcgaccgactccaagctgaacttccggaaggcggtgatccagctcaccaccaagacgcagcccgtggaagccaccgatgatgccttttgggaccagttctgggcagacacagccacctcggtgcaggatgtgtttgcactggtgccggcagcagagatccgggccgtgcgggaagagtcaccctccaacttggccaccctgtgctacaaggccgttgagaagctggtgcagggagctgagagtggctgccactcggagaaggagaagcagatcgtcctgaactgcagccggctgctcacccgcgtgctgccctacatctttgaggaccccgactggaggggcttcttctggtccacagtgcccggggcagggcgaggagggcagggagaagaggatgatgagcatgccaggcccctggccgagtccctgctcctggccattgctgacctgctcttctgcccggacttcacggttcagagccaccggaggagcactgtggactcggcagaggacgtccactccctggacagctgtgaatacatctgggaggctggtgtgggcttcgctcactccccccagcctaactacatccacgatatgaaccggatggagctgctgaaactgctgctgacatgcttctccgaggccatgtacctgcccccagctccggaaagtggcagcaccaacccatgggttcagttcttttgttccacggagaacagacatgccctgcccctcttcacctccctcctcaacaccgtgtgtgcctatgaccctgtgggctacgggatcccctacaaccacctgctcttctctgactaccgggaacccctggtggaggaggctgcccaggtgctcattgtcactttggaccacgacagtgccagcagtgccagccccactgtggacggcaccaccactggcaccgccatggatgatgccgatcctccaggccctgagaacctgtttgtgaactacctgtcccgcatccatcgtgaggaggacttccagttcatcctcaagggtatagcccggctgctgtccaaccccctgctccagacctacctgcctaactccaccaagaagatccagttccaccaggagctgctagttctcttctggaagctctgcgacttcaacaagaaattcctcttcttcgtgctgaagagcagcgacgtcctagacatccttgtccccatcctcttcttcctcaacgatgcccgggccgatcagtctcgggtgggcctgatgcacattggtgtcttcatcttgctgcttctgagcggggagcggaacttcggggtgcggctgaacaaaccctactcaatccgcgtgcccatggacatcccagtcttcacagggacccacgccgacctgctcattgtggtgttccacaagatcatcaccagcgggcaccagcggttgcagcccctcttcgactgcctgctcaccatcgtggtcaacgtgtccccctacctcaagagcctgtccatggtgaccgccaacaagttgctgcacctgctggaggccttctccaccacctggttcctcttctctgccgcccagaaccaccacctggtcttcttcctcctggaggtcttcaacaacatcatccagtaccagtttgatggcaactccaacctggtctacgccatcatccgcaagcgcagcatcttccaccagctggccaacctgcccacggacccgcccaccattcacaaggccctgcagcggcgccggcggacacctgagcccttgtctcgcaccggctcccaggagggcacctccatggagggctcccgccccgctgcccctgcagagccaggcaccctcaagaccagtctggtggctactccaggcattgacaagctgaccgagaagtcccaggtgtcagaggatggcaccttgcggtccctggaacctgagccccagcagagcttggaggatggcagcccggctaagggggagcccagccaggcatggagggagcagcggcgaccgtccacctcatcagccagtgggcagtggagcccaacgccagagtgggtcctctcctggaagtcgaagctgccgctgcagaccatcatgaggctgctgcaggtgctggttccgcaggtggagaagatctgcatcgacaagggcctgacggatgagtctgagatcctgcggttcctgcagcatggcaccctggtggggctgctgcccgtgccccaccccatcctcatccgcaagtaccaggccaactcgggcactgccatgtggttccgcacctacatgtggggcgtcatctatctgaggaatgtggacccccctgtctggtacgacaccgacgtgaagctgtttgagatacagcgggtgtgaggatgaagccgacgaggggctcagtctaggggaaggcagggccttggtccctgaggcttcccccatccaccattctgagctttaaattaccacgatcagggcctggaacaggcagagtggccctgagtgtcatgccctagagacccctgtggccaggacaatgtgaactggctcagatccccctcaacccctaggctggactcacaggagccccatctctggggctatgcccccaccagagaccactgcccccaacactcggactccctctttaagacctggctcagtgctggcccctcagtgcccacccactcctgtgctacccagccccagaggcagaagccaatgggtcactgtgccctaaggggtttgaccagggaaccacgggctgtcccttgaggtgcctggacagggtaagggggtgcttccagcctcctaacccaaagccagctgttccaggctccaggggaaaaaggtgtggccaggctgctcctcgaggaggctgggagctggccgactgcaaaagccagactggggcacctcccgtatccttggggcatggtgtggggtggtgagggtctcctgctatattctcctggatccgtggaaatagcctggctccctcttacccagtaatgaggggcagggaagggaactgggaggcagccgtttagtcctccctgccctgcccactgcctggatggggcgatgccacccctcatccttcacccagctctggcctctgggtcccaccacccagccccccgtgtcagaacaatctttgctctgtacaatcggcctctttacaataaaacctcctgctccacaaaaaaaaac

SEQ ID NO: 419260 - DNA, 3540 bp, Homo sapiens
ggcggggccgacgagggccgggggcggggcgcgccgcttgtctcctgcgagagccgcgggggccgcggagctggagccggagctgaagccggagccgggttggagtctgggcgggggccgggccggagcgggctccagagacatggggtcgaccgactccaagctgaacttccggaaggcggtgatccagctcaccaccaagacgcagcccgtggaagccaccgatgatgccttttgggaccagttctgggcagacacagccacctcggtgcaggatgtgtttgcactggtgccggcagcagagatccgggccgtgcgggaagagtcaccctccaacttggccaccctgtgctacaaggccgttgagaagctggtgcagggagctgagagtggctgccactcggagaaggagaagcagatcgtcctgaactgcagccggctgctcacccgcgtgctgccctacatctttgaggaccccgactggaggggcttcttctggtccacagtgcccggggcagggcgaggagggcagggagaagaggatgatgagcatgccaggcccctggccgagtccctgctcctggccattgctgacctgctcttctgcccggacttcacggttcagagccaccggaggagcactgtggactcggcagaggacgtccactccctggacagctgtgaatacatctgggaggctggtgtgggcttcgctcactccccccagcctaactacatccacgatatgaaccggatggagctgctgaaactgctgctgacatgcttctccgaggccatgtacctgcccccagctccggaaagtggcagcaccaacccatgggttcagttcttttgttccacggagaacagacatgccctgcccctcttcacctccctcctcaacaccgtgtgtgcctatgaccctgtgggctacgggatcccctacaaccacctgctcttctctgactaccgggaacccctggtggaggaggctgcccaggtgctcattgtcactttggaccacgacagtgccagcagtgccagccccactgtggacggcaccaccactggcaccgccatggatgatgccgatcctccaggccctgagaacctgtttgtgaactacctgtcccgcatccatcgtgaggaggacttccagttcatcctcaagggtatagcccggctgctgtccaaccccctgctccagacctacctgcctaactccaccaagaagatccagttccaccaggagctgctagttctcttctggaagctctgcgacttcaacaagaaattcctcttcttcgtgctgaagagcagcgacgtcctagacatccttgtccccatcctcttcttcctcaacgatgcccgggccgatcagtgtaagaccagggtgggggtgggatgctgggggctttcctggcggcgaggtggagggctggctatctgccctgactcccaggagctcaggcctggcactctgacctcctaggagggaggcctccaaaatggtcactgcctgggcccctccttccccctcccacccgagtgacccctcccacgccacctgccgcagctcgggtgggcctgatgcacattggtgtcttcatcttgctgcttctgagcggggagcggaacttcggggtgcggctgaacaaaccctactcaatccgcgtgcccatggacatcccagtcttcacagggacccacgccgacctgctcattgtggtgttccacaagatcatcaccagcgggcaccagcggttgcagcccctcttcgactgcctgctcaccatcgtggtcaacgtgtccccctacctcaagagcctgtccatggtgaccgccaacaagttgctgcacctgctggaggccttctccaccacctggttcctcttctctgccgcccagaaccaccacctggtcttcttcctcctggaggtcttcaacaacatcatccagtaccagtttgatggcaactccaacctggtctacgccatcatccgcaagcgcagcatcttccaccagctggccaacctgcccacggacccgcccaccattcacaaggccctgcagcggcgccggcggacacctgagcccttgtctcgcaccggctcccaggagggcacctccatggagggctcccgccccgctgcccctgcagagccaggcaccctcaagaccagtctggtggctactccaggcattgacaagctgaccgagaagtcccaggtgtcagaggatggcaccttgcggtccctggaacctgagccccagcagagcttggaggatggcagcccggctaagggggagcccagccaggcatggagggagcagcggcgaccgtccacctcatcagccagtgggcagtggagcccaacgccagagtgggtcctctcctggaagtcgaagctgccgctgcagaccatcatgaggctgctgcaggtgctggttccgcaggtggagaagatctgcatcgacaagggcctgacggatgagtctgagatcctgcggttcctgcagcatggcaccctggtggggctgctgcccgtgccccaccccatcctcatccgcaagtaccaggccaactcgggcactgccatgtggttccgcacctacatgtggggcgtcatctatctgaggaatgtggacccccctgtctggtacgacaccgacgtgaagctgtttgagatacagcgggtgtgaggatgaagccgacgaggggctcagtctaggggaaggcagggccttggtccctgaggcttcccccatccaccattctgagctttaaattaccacgatcagggcctggaacaggcagagtggccctgagtgtcatgccctagagacccctgtggccaggacaatgtgaactggctcagatccccctcaacccctaggctggactcacaggagccccatctctggggctatgcccccaccagagaccactgcccccaacactcggactccctctttaagacctggctcagtgctggcccctcagtgcccacccactcctgtgctacccagccccagaggcagaagccaatgggtcactgtgccctaaggggtttgaccagggaaccacgggctgtcccttgaggtgcctggacagggtaagggggtgcttccagcctcctaacccaaagccagctgttccaggctccaggggaaaaaggtgtggccaggctgctcctcgaggaggctgggagctggccgactgcaaaagccagactggggcacctcccgtatccttggggcatggtgtggggtggtgagggtctcctgctatattctcctggatccgtggaaatagcctggctccctcttacccagtaatgaggggcagggaagggaactgggaggcagccgtttagtcctccctgccctgcccactgcctggatggggcgatgccacccctcatccttcacccagctctggcctctgggtcccaccacccagccccccgtgtcagaacaatctttgctctgtacaatcggcctctttacaataaaacctcctgctccacaaaaaaaaac

SEQ ID NO: 419261 - DNA, 3617 bp, Homo sapiens
ggcggggccgacgagggccgggggcggggcgcgccgcttgtctcctgcgagagccgcgggggccgcggagctggagccggagctgaagccggagccgggttggagtctgggcgggggccgggccggagcgggctccagagacatggggtcgaccgactccaagctgaacttccggaaggcggtgatccagctcaccaccaagacgcagcccgtggaagccaccgatgatgccttttgggaccagttctgggcagacacagccacctcggtgcaggatgtgtttgcactggtgccggcagcagagatccgggccgtgcgggaagagtcaccctccaacttggccaccctgtgctacaaggccgttgagaagctggtgcagggagctgagagtggctgccactcggagaaggagaagcagatcgtcctgaactgcagccggctgctcacccgcgtgctgccctacatctttgaggaccccgactggaggggcttcttctggtccacagtgcccggggcagggcgaggagggcagggagaagaggatgatgagcatgccaggcccctggccgagtccctgctcctggccattgctgacctgctcttctgcccggacttcacggttcagagccaccggaggagcactgtggactcggcagaggacgtccactccctggacagctgtgaatacatctgggaggctggtgtgggcttcgctcactccccccagcctaactacatccacgatatgaaccggatggagctgctgaaactgctgctgacatgcttctccgaggccatgtacctgcccccagctccggaaagtggcagcaccaacccatgggttcagttcttttgttccacggagaacagacatgccctgcccctcttcacctccctcctcaacaccgtgtgtgcctatgaccctgtgggctacgggatcccctacaaccacctgctcttctctgactaccgggaacccctggtggaggaggctgcccaggtgctcattgtcactttggaccacgacagtgccagcagtgccagccccactgtggacggcaccaccactggcaccgccatggatgatgccgatcctccaggccctgagaacctgtttgtgaactacctgtcccgcatccatcgtgaggaggacttccagttcatcctcaagggtatagcccggctgctgtccaaccccctgctccagacctacctgcctaactccaccaagaagatccagttccaccaggagctgctagttctcttctggaagctctgcgacttcaacaagaaattcctcttcttcgtgctgaagagcagcgacgtcctagacatccttgtccccatcctcttcttcctcaacgatgcccgggccgatcagtctcgggtgggcctgatgcacattggtgtcttcatcttgctgcttctgagcggggagcggaacttcggggtgcggctgaacaaaccctactcaatccgcgtgcccatggacatcccagtcttcacagggacccacgccgacctgctcattgtggtgttccacaagatcatcaccagcgggcaccagcggttgcagcccctcttcgactgcctgctcaccatcgtggtcaacgtgtccccctacctcaagagcctgtccatggtgaccgccaacaagttgctgcacctgctggaggccttctccaccacctggttcctcttctctgccgcccagaaccaccacctggtcttcttcctcctggaggtcttcaacaacatcatccagtaccagtttgatggcaactccaacctggtctacgccatcatccgcaagcgcagcatcttccaccagctggccaacctgcccacggacccgcccaccattcacaaggccctgcagcggcgccggcggacacctgagcccttgtctcgcaccggctcccaggagggcacctccatggagggctcccgccccgctgcccctgcagagccaggcaccctcaagaccagtctggtggctactccaggcattgacaagctgaccgagaagtcccaggtgtcagaggatggcaccttgcggtccctggaacctgagccccagcagagcttggaggatggcagcccggctaagggggagcccagccaggcatggagggagcagcggcgaccgtccacctcatcagccagtgggcagtggagcccaacgccagagtgggtcctctcctggaagtcgaagctgccgctgcagaccatcatgaggctgctgcaggtgctggttccgcaggtggagaagatctgcatcgacaagggcctgacggatgagtctgagatcctgcggttcctgcagcatggcaccctggtggggctgctgcccgtgccccaccccatcctcatccgcaagtaccaggccaactcgggcactgccatgtggttccgcacctacatgtggggcgtcatctatctgaggtgggccccggggagtggggtggtgtccacctgagagcctgcccagcagggctcaacagggacctcagctctgggccccaccacctatggtggacttcatgtcaagacagtcaactaaggcggccttgcctggttgacggtggcacccgctgcccagggtgggacatcgggatggaaagggttggcttggccattcctgctgcccagctcctcctggtgccttgtctgcaaggtgccccagcacctgggtaaccccccatttcctccacaggaatgtggacccccctgtctggtacgacaccgacgtgaagctgtttgagatacagcgggtgtgaggatgaagccgacgaggggctcagtctaggggaaggcagggccttggtccctgaggcttcccccatccaccattctgagctttaaattaccacgatcagggcctggaacaggcagagtggccctgagtgtcatgccctagagacccctgtggccaggacaatgtgaactggctcagatccccctcaacccctaggctggactcacaggagccccatctctggggctatgcccccaccagagaccactgcccccaacactcggactccctctttaagacctggctcagtgctggcccctcagtgcccacccactcctgtgctacccagccccagaggcagaagccaatgggtcactgtgccctaaggggtttgaccagggaaccacgggctgtcccttgaggtgcctggacagggtaagggggtgcttccagcctcctaacccaaagccagctgttccaggctccaggggaaaaaggtgtggccaggctgctcctcgaggaggctgggagctggccgactgcaaaagccagactggggcacctcccgtatccttggggcatggtgtggggtggtgagggtctcctgctatattctcctggatccgtggaaatagcctggctccctcttacccagtaatgaggggcagggaagggaactgggaggcagccgtttagtcctccctgccctgcccactgcctggatggggcgatgccacccctcatccttcacccagctctggcctctgggtcccaccacccagccccccgtgtcagaacaatctttgctctgtacaatcggcctctttacaataaaacctcctgctccacaaaaaaaaac

SEQ ID NO: 419262 - DNA, 3419 bp, Homo sapiens
ggcggggccgacgagggccgggggcggggcgcgccgcttgtctcctgcgagagccgcgggggccgcggagctggagccggagctgaagccggagccgggttggagtctgggcgggggccgggccggagcgggctccagagacatggggtcgaccgactccaagctgaacttccggaaggcggtgatccagctcaccaccaagacgcagcccgtggaagccaccgatgatgccttttgggaccagttctgggcagacacagccacctcggtgcaggatgtgtttgcactggtgccggcagcagagatccgggccgtgcgggaagagtcaccctccaacttggccaccctgtgctacaaggccgttgagaagctggtgcagggagctgagagtggctgccactcggagaaggagaagcagatcgtcctgaactgcagccggctgctcacccgcgtgctgccctacatctttgaggaccccgactggaggggcttcttctggtccacagtgcccggggcagggcgaggagggcagggagaagaggatgatgagcatgccaggcccctggccgagtccctgctcctggccattgctgacctgctcttctgcccggacttcacggttcagagccaccggaggagcactgtggactcggcagaggacgtccactccctggacagctgtgaatacatctgggaggctggtgtgggcttcgctcactccccccagcctaactacatccacgatatgaaccggatggagctgctgaaactgctgctgacatgcttctccgaggccatgtacctgcccccagctccggaaagtggcagcaccaacccatgggttcagttcttttgttccacggagaacagacatgccctgcccctcttcacctccctcctcaacaccgtgtgtgcctatgaccctgtgggctacgggatcccctacaaccacctgctcttctctgactaccgggaacccctggtggaggaggctgcccaggtgctcattgtcactttggaccacgacagtgccagcagtgccagccccactgtggacggcaccaccactggcaccgccatggatgatgccgatcctccaggccctgagaacctgtttgtgaactacctgtcccgcatccatcgtgaggaggacttccagttcatcctcaagggtatagcccggctgctgtccaaccccctgctccagacctacctgcctaactccaccaagaagatccagttccaccaggagctgctagttctcttctggaagctctgcgacttcaacaagaaattcctcttcttcgtgctgaagagcagcgacgtcctagacatccttgtccccatcctcttcttcctcaacgatgcccgggccgatcagtctcgggtgggcctgatgcacattggtgtcttcatcttgctgcttctgagcggggagcggaacttcggggtgcggctgaacaaaccctactcaatccgcgtgcccatggacatcccagtcttcacagggacccacgccgacctgctcattgtggtgttccacaagatcatcaccagcgggcaccagcggttgcagcccctcttcgactgcctgctcaccatcgtggtcaacgtgtccccctacctcaagagcctgtccatggtgaccgccaacaagttgctgcacctgctggaggccttctccaccacctggttcctcttctctgccgcccagaaccaccacctggtcttcttcctcctggaggtcttcaacaacatcatccagtaccagtttgatggaagcccacccagattggacggggggagctggagggggcctccctgaggcgaaggcatgctccctgcccacaggcaactccaacctggtctacgccatcatccgcaagcgcagcatcttccaccagctggccaacctgcccacggacccgcccaccattcacaaggccctgcagcggcgccggcggacacctgagcccttgtctcgcaccggctcccaggagggcacctccatggagggctcccgccccgctgcccctgcagagccaggcaccctcaagaccagtctggtggctactccaggcattgacaagctgaccgagaagtcccaggtgtcagaggatggcaccttgcggtccctggaacctgagccccagcagagcttggaggatggcagcccggctaagggggagcccagccaggcatggagggagcagcggcgaccgtccacctcatcagccagtgggcagtggagcccaacgccagagtgggtcctctcctggaagtcgaagctgccgctgcagaccatcatgaggctgctgcaggtgctggttccgcaggtggagaagatctgcatcgacaagggcctgacggatgagtctgagatcctgcggttcctgcagcatggcaccctggtggggctgctgcccgtgccccaccccatcctcatccgcaagtaccaggccaactcgggcactgccatgtggttccgcacctacatgtggggcgtcatctatctgaggaatgtggacccccctgtctggtacgacaccgacgtgaagctgtttgagatacagcgggtgtgaggatgaagccgacgaggggctcagtctaggggaaggcagggccttggtccctgaggcttcccccatccaccattctgagctttaaattaccacgatcagggcctggaacaggcagagtggccctgagtgtcatgccctagagacccctgtggccaggacaatgtgaactggctcagatccccctcaacccctaggctggactcacaggagccccatctctggggctatgcccccaccagagaccactgcccccaacactcggactccctctttaagacctggctcagtgctggcccctcagtgcccacccactcctgtgctacccagccccagaggcagaagccaatgggtcactgtgccctaaggggtttgaccagggaaccacgggctgtcccttgaggtgcctggacagggtaagggggtgcttccagcctcctaacccaaagccagctgttccaggctccaggggaaaaaggtgtggccaggctgctcctcgaggaggctgggagctggccgactgcaaaagccagactggggcacctcccgtatccttggggcatggtgtggggtggtgagggtctcctgctatattctcctggatccgtggaaatagcctggctccctcttacccagtaatgaggggcagggaagggaactgggaggcagccgtttagtcctccctgccctgcccactgcctggatggggcgatgccacccctcatccttcacccagctctggcctctgggtcccaccacccagccccccgtgtcagaacaatctttgctctgtacaatcggcctctttacaataaaacctcctgctccacaaaaaaaaac

SEQ ID NO: 419263 - DNA, 3163 bp, Homo sapiens
ggcggggccgacgagggccgggggcggggcgcgccgcttgtctcctgcgagagccgcgggggccgcggagctggagccggagctgaagccggagccgggttggagtctgggcgggggccgggccggagcgggctccagagacatggggtcgaccgactccaagctgaacttccggaaggcggtgatccagctcaccaccaagacgcagcccgtggaagccaccgatgatgccttttgggaccagttctgggcagacacagccacctcggtgcaggatgtgtttgcactggtgccggcagcagagatccgggccgtgcgggaagagtcaccctccaacttggccaccctgtgctacaaggccgttgagaagctggtgcagggagctgagagtggctgccactcggagaaggagaagcagatcgtcctgaactgcagccggctgctcacccgcgtgctgccctacatctttgaggaccccgactggaggggcttcttctggtccacagtgcccggggcagggcgaggagggcagggagaagaggatgatgagcatgccaggcccctggccgagtccctgctcctggccattgctgacctgctcttctgcccggacttcacggttcagagccaccggaggagcactgtggactcggcagaggacgtccactccctggacagctgtgaatacatctgggaggctggtgtgggcttcgctcactccccccagcctaactacatccacgatatgaaccggatggagctgctgaaactgctgctgacatgcttctccgaggccatgtacctgcccccagctccggaaagtggcagcaccaacccatgggttcagttcttttgttccacggagaacagacatgccctgcccctcttcacctccctcctcaacaccgtgtgtgcctatgaccctgtgggctacgggatcccctacaaccacctgctcttctctgactaccgggaacccctggtggaggaggctgcccaggtgctcattgtcactttggaccacgacagtgccagcagtgccagccccactgtggacggcaccaccactggcaccgccatggatgatgccgatcctccaggccctgagaacctgtttgtgaactacctgtcccgcatccatcgtgaggaggacttccagttcatcctcaagggtatagcccggctgctgtccaaccccctgctccagacctacctgcctaactccaccaagaagatccagttccaccaggagctgctagttctcttctggaagctctgcgacttcaacaagaaattcctcttcttcgtgctgaagagcagcgacgtcctagacatccttgtccccatcctcttcttcctcaacgatgcccgggccgatcagtctcgggtgggcctgatgcacattggtgtcttcatcttgctgcttctgagcggggagcggaacttcggggtgcggctgaacaaaccctactcaatccgcgtgcccatggacatcccagtcttcacagggacccacgccgacctgctcattgtggtgttccacaagatcatcaccagcgggcaccagcggttgcagcccctcttcgactgcctgctcaccatcgtggtcaacgtgtccccctacctcaagagcctgtccatggtgaccgccaacaagttgctgcacctgctggaggccttctccaccacctggttcctcttctctgccgcccagaaccaccacctggtcttcttcctcctggaggtcttcaacaacatcatccagtaccagtttgatggcaactccaacctggtctacgccatcatccgcaagcgcagcatcttccaccagctggccaacctgcccacggacccgcccaccattcacaaggccctgcagcggcgccggcggacacctgagcccttgtctcgcaccggctcccaggagggcacctccatggagggctcccgggagcagcggcgaccgtccacctcatcagccagtgggcagtggagcccaacgccagagtgggtcctctcctggaagtcgaagctgccgctgcagaccatcatgaggctgctgcaggtgctggttccgcaggtggagaagatctgcatcgacaagggcctgacggatgagtctgagatcctgcggttcctgcagcatggcaccctggtggggctgctgcccgtgccccaccccatcctcatccgcaagtaccaggccaactcgggcactgccatgtggttccgcacctacatgtggggcgtcatctatctgaggaatgtggacccccctgtctggtacgacaccgacgtgaagctgtttgagatacagcgggtgtgaggatgaagccgacgaggggctcagtctaggggaaggcagggccttggtccctgaggcttcccccatccaccattctgagctttaaattaccacgatcagggcctggaacaggcagagtggccctgagtgtcatgccctagagacccctgtggccaggacaatgtgaactggctcagatccccctcaacccctaggctggactcacaggagccccatctctggggctatgcccccaccagagaccactgcccccaacactcggactccctctttaagacctggctcagtgctggcccctcagtgcccacccactcctgtgctacccagccccagaggcagaagccaatgggtcactgtgccctaaggggtttgaccagggaaccacgggctgtcccttgaggtgcctggacagggtaagggggtgcttccagcctcctaacccaaagccagctgttccaggctccaggggaaaaaggtgtggccaggctgctcctcgaggaggctgggagctggccgactgcaaaagccagactggggcacctcccgtatccttggggcatggtgtggggtggtgagggtctcctgctatattctcctggatccgtggaaatagcctggctccctcttacccagtaatgaggggcagggaagggaactgggaggcagccgtttagtcctccctgccctgcccactgcctggatggggcgatgccacccctcatccttcacccagctctggcctctgggtcccaccacccagccccccgtgtcagaacaatctttgctctgtacaatcggcctctttacaataaaacctcctgctccacaaaaaaaaac

SEQ ID NO: 419264 - DNA, 3025 bp, Homo sapiens
ggcggggccgacgagggccgggggcggggcgcgccgcttgtctcctgcgagagccgcgggggccgcggagctggagccggagctgaagccggagccgggttggagtctgggcgggggccgggccggagcgggctccagagacatggggtcgaccgactccaagctgaacttccggaaggcggtgatccagctcaccaccaagacgcagcagggagaagaggatgatgagcatgccaggcccctggccgagtccctgctcctggccattgctgacctgctcttctgcccggacttcacggttcagagccaccggaggagcactgtggactcggcagaggacgtccactccctggacagctgtgaatacatctgggaggctggtgtgggcttcgctcactccccccagcctaactacatccacgatatgaaccggatggagctgctgaaactgctgctgacatgcttctccgaggccatgtacctgcccccagctccggaaagtggcagcaccaacccatgggttcagttcttttgttccacggagaacagacatgccctgcccctcttcacctccctcctcaacaccgtgtgtgcctatgaccctgtgggctacgggatcccctacaaccacctgctcttctctgactaccgggaacccctggtggaggaggctgcccaggtgctcattgtcactttggaccacgacagtgccagcagtgccagccccactgtggacggcaccaccactggcaccgccatggatgatgccgatcctccaggccctgagaacctgtttgtgaactacctgtcccgcatccatcgtgaggaggacttccagttcatcctcaagggtatagcccggctgctgtccaaccccctgctccagacctacctgcctaactccaccaagaagatccagttccaccaggagctgctagttctcttctggaagctctgcgacttcaacaagaaattcctcttcttcgtgctgaagagcagcgacgtcctagacatccttgtccccatcctcttcttcctcaacgatgcccgggccgatcagtctcgggtgggcctgatgcacattggtgtcttcatcttgctgcttctgagcggggagcggaacttcggggtgcggctgaacaaaccctactcaatccgcgtgcccatggacatcccagtcttcacagggacccacgccgacctgctcattgtggtgttccacaagatcatcaccagcgggcaccagcggttgcagcccctcttcgactgcctgctcaccatcgtggtcaacgtgtccccctacctcaagagcctgtccatggtgaccgccaacaagttgctgcacctgctggaggccttctccaccacctggttcctcttctctgccgcccagaaccaccacctggtcttcttcctcctggaggtcttcaacaacatcatccagtaccagtttgatggcaactccaacctggtctacgccatcatccgcaagcgcagcatcttccaccagctggccaacctgcccacggacccgcccaccattcacaaggccctgcagcggcgccggcggacacctgagcccttgtctcgcaccggctcccaggagggcacctccatggagggctcccgccccgctgcccctgcagagccaggcaccctcaagaccagtctggtggctactccaggcattgacaagctgaccgagaagtcccaggtgtcagaggatggcaccttgcggtccctggaacctgagccccagcagagcttggaggatggcagcccggctaagggggagcccagccaggcatggagggagcagcggcgaccgtccacctcatcagccagtgggcagtggagcccaacgccagagtgggtcctctcctggaagtcgaagctgccgctgcagaccatcatgaggctgctgcaggtgctggttccgcaggtggagaagatctgcatcgacaagggcctgacggatgagtctgagatcctgcggttcctgcagcatggcaccctggtggggctgctgcccgtgccccaccccatcctcatccgcaagtaccaggccaactcgggcactgccatgtggttccgcacctacatgtggggcgtcatctatctgaggaatgtggacccccctgtctggtacgacaccgacgtgaagctgtttgagatacagcgggtgtgaggatgaagccgacgaggggctcagtctaggggaaggcagggccttggtccctgaggcttcccccatccaccattctgagctttaaattaccacgatcagggcctggaacaggcagagtggccctgagtgtcatgccctagagacccctgtggccaggacaatgtgaactggctcagatccccctcaacccctaggctggactcacaggagccccatctctggggctatgcccccaccagagaccactgcccccaacactcggactccctctttaagacctggctcagtgctggcccctcagtgcccacccactcctgtgctacccagccccagaggcagaagccaatgggtcactgtgccctaaggggtttgaccagggaaccacgggctgtcccttgaggtgcctggacagggtaagggggtgcttccagcctcctaacccaaagccagctgttccaggctccaggggaaaaaggtgtggccaggctgctcctcgaggaggctgggagctggccgactgcaaaagccagactggggcacctcccgtatccttggggcatggtgtggggtggtgagggtctcctgctatattctcctggatccgtggaaatagcctggctccctcttacccagtaatgaggggcagggaagggaactgggaggcagccgtttagtcctccctgccctgcccactgcctggatggggcgatgccacccctcatccttcacccagctctggcctctgggtcccaccacccagccccccgtgtcagaacaatctttgctctgtacaatcggcctctttacaataaaacctcctgctccacaaaaaaaaac

SEQ ID NO: 419265 - DNA, 2663 bp, Homo sapiens
ggcggggccgacgagggccgggggcggggcgcgccgcttgtctcctgcgagagccgcgggggccgcggagctggagccggagctgaagccggagccgggttggagtctgggcgggggccgggccggagcgggctccagagacatggggtcgaccgactccaagctgaacttccggaaggcggtgatccagctcaccaccaagacgcagctccctcctcaacaccgtgtgtgcctatgaccctgtgggctacgggatcccctacaaccacctgctcttctctgactaccgggaacccctggtggaggaggctgcccaggtgctcattgtcactttggaccacgacagtgccagcagtgccagccccactgtggacggcaccaccactggcaccgccatggatgatgccgatcctccaggccctgagaacctgtttgtgaactacctgtcccgcatccatcgtgaggaggacttccagttcatcctcaagggtatagcccggctgctgtccaaccccctgctccagacctacctgcctaactccaccaagaagatccagttccaccaggagctgctagttctcttctggaagctctgcgacttcaacaagaaattcctcttcttcgtgctgaagagcagcgacgtcctagacatccttgtccccatcctcttcttcctcaacgatgcccgggccgatcagtctcgggtgggcctgatgcacattggtgtcttcatcttgctgcttctgagcggggagcggaacttcggggtgcggctgaacaaaccctactcaatccgcgtgcccatggacatcccagtcttcacagggacccacgccgacctgctcattgtggtgttccacaagatcatcaccagcgggcaccagcggttgcagcccctcttcgactgcctgctcaccatcgtggtcaacgtgtccccctacctcaagagcctgtccatggtgaccgccaacaagttgctgcacctgctggaggccttctccaccacctggttcctcttctctgccgcccagaaccaccacctggtcttcttcctcctggaggtcttcaacaacatcatccagtaccagtttgatggcaactccaacctggtctacgccatcatccgcaagcgcagcatcttccaccagctggccaacctgcccacggacccgcccaccattcacaaggccctgcagcggcgccggcggacacctgagcccttgtctcgcaccggctcccaggagggcacctccatggagggctcccgccccgctgcccctgcagagccaggcaccctcaagaccagtctggtggctactccaggcattgacaagctgaccgagaagtcccaggtgtcagaggatggcaccttgcggtccctggaacctgagccccagcagagcttggaggatggcagcccggctaagggggagcccagccaggcatggagggagcagcggcgaccgtccacctcatcagccagtgggcagtggagcccaacgccagagtgggtcctctcctggaagtcgaagctgccgctgcagaccatcatgaggctgctgcaggtgctggttccgcaggtggagaagatctgcatcgacaagggcctgacggatgagtctgagatcctgcggttcctgcagcatggcaccctggtggggctgctgcccgtgccccaccccatcctcatccgcaagtaccaggccaactcgggcactgccatgtggttccgcacctacatgtggggcgtcatctatctgaggaatgtggacccccctgtctggtacgacaccgacgtgaagctgtttgagatacagcgggtgtgaggatgaagccgacgaggggctcagtctaggggaaggcagggccttggtccctgaggcttcccccatccaccattctgagctttaaattaccacgatcagggcctggaacaggcagagtggccctgagtgtcatgccctagagacccctgtggccaggacaatgtgaactggctcagatccccctcaacccctaggctggactcacaggagccccatctctggggctatgcccccaccagagaccactgcccccaacactcggactccctctttaagacctggctcagtgctggcccctcagtgcccacccactcctgtgctacccagccccagaggcagaagccaatgggtcactgtgccctaaggggtttgaccagggaaccacgggctgtcccttgaggtgcctggacagggtaagggggtgcttccagcctcctaacccaaagccagctgttccaggctccaggggaaaaaggtgtggccaggctgctcctcgaggaggctgggagctggccgactgcaaaagccagactggggcacctcccgtatccttggggcatggtgtggggtggtgagggtctcctgctatattctcctggatccgtggaaatagcctggctccctcttacccagtaatgaggggcagggaagggaactgggaggcagccgtttagtcctccctgccctgcccactgcctggatggggcgatgccacccctcatccttcacccagctctggcctctgggtcccaccacccagccccccgtgtcagaacaatctttgctctgtacaatcggcctctttacaataaaacctcctgctccacaaaaaaaaac

SEQ ID NO: 419266 - DNA, 1814 bp, Homo sapiens
cgagtttaaacggggcgagtttaagcgggcaccagcggttgcagcccctcttcgactgcctgctcaccatcgtggtcaacgtgtccccctacctcaagagcctgtccatggtgaccgccaacaagttgctgcacctgctggaggccttctccaccacctggttcctcttctctgccgcccagaaccaccacctggtcttcttcctcctggaggtcttcaacaacatcatccagtaccagtttgatggcaactccaacctggtctacgccatcatccgcaagcgcagcatcttccaccagctggccaacctgcccacggacccgcccaccattcacaaggccctgcagcggcgccggcggacacctgagcccttgtctcgcaccggctcccaggagggcacctccatggagggctcccgccccgctgcccctgcagagccaggcaccctcaagaccagtctggtggctactccaggcattgacaagctgaccgagaagtcccaggtgtcagaggatggcaccttgcggtccctggaacctgagccccagcagagcttggaggatggcagcccggctaagggggagcccagccaggcatggagggagcagcggcgaccgtccacctcatcagccagtgggcagtggagcccaacgccagagtgggtcctctcctggaagtcgaagctgccgctgcagaccatcatgaggctgctgcaggtgctggttccgcaggtggagaagatctgcatcgacaagggcctgacggatgagtctgagatcctgcggttcctgcagcatggcaccctggtggggctgctgcccgtgccccaccccatcctcatccgcaagtaccaggccaactcgggcactgccatgtggttccgcacctacatgtggggcgtcatctatctgaggaatgtggacccccctgtctggtacgacaccgacgtgaagctgtttgagatacagcgggtgtgaggatgaagccgacgaggggctcagtctaggggaaggcagggccttggtccctgaggcttcccccatccaccattctgagctttaaattaccacgatcagggcctggaacaggcagagtggccctgagtgtcatgccctagagacccctgtggccaggacaatgtgaactggctcagatccccctcaacccctaggctggactcacaggagccccatctctggggctatgcccccaccagagaccactgcccccaacactcggactccctctttaagacctggctcagtgctggcccctcagtgcccacccactcctgtgctacccagccccagaggcagaagccaatgggtcactgtgccctaaggggtttgaccagggaaccacgggctgtcccttgaggtgcctggacagggtaagggggtgcttccagcctcctaacccaaagccagctgttccaggctccaggggaaaaaggtgtggccaggctgctcctcgaggaggctgggagctggccgactgcaaaagccagactggggcacctcccgtatccttggggcatggtgtggggtggtgagggtctcctgctatattctcctggatccgtggaaatagcctggctccctcttacccagtaatgaggggcagggaagggaactgggaggcagccgtttagtcctccctgccctgcccactgcctggatggggcgatgccacccctcatccttcacccagctctggcctctgggtcccaccacccagccccccgtgtcagaacaatctttgctctgtacaatcggcctctttacaataaaacctcctgctccacaaaaaaaaac

SEQ ID NO: 419267 - DNA, 1480 bp, Homo sapiens
ctaaaattggaacgatacagagaagattagcatggcccctgcgcaaggatgacacgcaaattcgtgaagcgttccatatttttcccccgctgcccctgcagagccaggcaccctcaagaccagtctggtggctactccaggcattgacaagctgaccgagaagtcccaggtgtcagaggatggcaccttgcggtccctggaacctgagccccagcagagcttggaggatggcagcccggctaagggggagcccagccaggcatggagggagcagcggcgaccgtccacctcatcagccagtgggcagtggagcccaacgccagagtgggtcctctcctggaagtcgaagctgccgctgcagaccatcatgaggctgctgcaggtgctggttccgcaggtggagaagatctgcatcgacaagggcctgacggatgagtctgagatcctgcggttcctgcagcatggcaccctggtggggctgctgcccgtgccccaccccatcctcatccgcaagtaccaggccaactcgggcactgccatgtggttccgcacctacatgtggggcgtcatctatctgaggaatgtggacccccctgtctggtacgacaccgacgtgaagctgtttgagatacagcgggtgtgaggatgaagccgacgaggggctcagtctaggggaaggcagggccttggtccctgaggcttcccccatccaccattctgagctttaaattaccacgatcagggcctggaacaggcagagtggccctgagtgtcatgccctagagacccctgtggccaggacaatgtgaactggctcagatccccctcaacccctaggctggactcacaggagccccatctctggggctatgcccccaccagagaccactgcccccaacactcggactccctctttaagacctggctcagtgctggcccctcagtgcccacccactcctgtgctacccagccccagaggcagaagccaatgggtcactgtgccctaaggggtttgaccagggaaccacgggctgtcccttgaggtgcctggacagggtaagggggtgcttccagcctcctaacccaaagccagctgttccaggctccaggggaaaaaggtgtggccaggctgctcctcgaggaggctgggagctggccgactgcaaaagccagactggggcacctcccgtatccttggggcatggtgtggggtggtgagggtctcctgctatattctcctggatccgtggaaatagcctggctccctcttacccagtaatgaggggcagggaagggaactgggaggcagccgtttagtcctccctgccctgcccactgcctggatggggcgatgccacccctcatccttcacccagctctggcctctgggtcccaccacccagccccccgtgtcagaacaatctttgctctgtacaatcggcctctttacaataaaacctcctgctccacaaaaaaaaac

SEQ ID NO: 419268 - DNA, 3256 bp, Homo sapiens
ggcggggccgacgagggccgggggcggggcgcgccgcttgtctcctgcgagagccgcgggggccgcggagctggagccggagctgaagccggagccgggttggagtctgggcgggggccgggccggagcgggctccagagacatggggtcgaccgactccaagctgaacttccggaaggcggtgatccagctcaccaccaagacgcagcccgtggaagccaccgatgatgccttttgggaccagttctgggcagacacagccacctcggtgcaggatgtgtttgcactggtgccggcagcagagatccgggccgtgcgggaagagtcaccctccaacttggccaccctgtgctacaaggccgttgagaagctggtgcagggagctgagagtggctgccactcggagaaggagaagcagatcgtcctgaactgcagccggctgctcacccgcgtgctgccctacatctttgaggaccccgactggaggggcttcttctggtccacagtgcccggggcagggcgaggagggcagggagaagaggatgatgagcatgccaggcccctggccgagtccctgctcctggccattgctgacctgctcttctgcccggacttcacggttcagagccaccggaggagcactgtggactcggcagaggacgtccactccctggacagctgtgaatacatctgggaggctggtgtgggcttcgctcactccccccagcctaactacatccacgatatgaaccggatggagctgctgaaactgctgctgacatgcttctccgaggccatgtacctgcccccagctccggaaagtggcagcaccaacccatgggttcagttcttttgttccacggagaacagacatgccctgcccctcttcacctccctcctcaacaccgtgtgtgcctatgaccctgtgggctacgggatcccctacaaccacctgctcttctctgactaccgggaacccctggtggaggaggctgcccaggtgctcattgtcactttggaccacgacagtgccagcagtgccagccccactgtggacggcaccaccactggcaccgccatggatgatgccgatcctccaggccctgagaacctgtttgtgaactacctgtcccgcatccatcgtgaggaggacttccagttcatcctcaagggtatagcccggctgctgtccaaccccctgctccagacctacctgcctaactccaccaagaagatccagttccaccaggagctgctagttctcttctggaagctctgcgacttcaacaagaaattcctcttcttcgtgctgaagagcagcgacgtcctagacatccttgtccccatcctcttcttcctcaacgatgcccgggccgatcagtctcgggtgggcctgatgcacattggtgtcttcatcttgctgcttctgagcggggagcggaacttcggggtgcggctgaacaaaccctactcaatccgcgtgcccatggacatcccagtcttcacagggacccacgccgacctgctcattgtggtgttccacaagatcatcaccagcgggcaccagcggttgcagcccctcttcgactgcctgctcaccatcgtggtcaacgtgtccccctacctcaagagcctgtccatggtgaccgccaacaagttgctgcacctgctggaggccttctccaccacctggttcctcttctctgccgcccagaaccaccacctggtcttcttcctcctggaggtcttcaacaacatcatccagtaccagtttgatggcaactccaacctggtctacgccatcatccgcaagcgcagcatcttccaccagctggccaacctgcccacggacccgcccaccattcacaaggccctgcagcggcgccggcggacacctgagcccttgtctcgcaccggctcccaggagggcacctccatggagggctcccgccccgctgcccctgcagagccaggcaccctcaagaccagtctggtggctactccaggcattgacaagctgaccgagaagtcccaggtgtcagaggatggcaccttgcggtccctggaacctgagccccagcagagcttggaggatggcagcccggctaagggggagcccagccaggcatggagggagcagcggcgaccgtccacctcatcagccagtgggcagtggagcccaacgccagagtgggtcctctcctggaagtcgaagctgccgctgcagaccatcatgaggctgctgcaggtgctggttccgcaggtggagaagatctgcatcgacaagggcctgacggatgagtctgagatcctgcggttcctgcagcatggcaccctggtggggctgctgcccgtgccccaccccatcctcatccgcaagtaccaggccaactcgggcactgccatgtggttccgcacctacatgtggggcgtcatctatctgaggaatgtggacccccctgtctggtacgacaccgacgtgaagctgtttgagatacagcgggtgtgaggatgaagccgacgaggggctcagtctaggggaaggcagggccttggtccctgaggcttcccccatccaccattctgagctttaaattaccacgatcagggcctggaacaggcagagtggccctgagtgtcatgccctagagacccctgtggccaggacaatgtgaactggctcagatccccctcaacccctaggctggactcacaggagccccatctctggggctatgcccccaccagagaccactgcccccaacactcggactccctctttaagacctggctcagtgctggcccctcagtgcccacccactcctgtgctacccagccccagaggcagaagccaatgggtcactgtgccctaaggggtttgaccagggaaccacgggctgtcccttgaggtgcctggacagggtaagggggtgcttccagcctcctaacccaaagccagctgttccaggctccaggggaaaaaggtgtggccaggctgctcctcgaggaggctgggagctggccgactgcaaaagccagactggggcacctcccgtatccttggggcatggtgtggggtggtgagggtctcctgctatattctcctggatccgtggaaatagcctggctccctcttacccagtaatgaggggcagggaagggaactgggaggcagccgtttagtcctcctctgtgccctcctctgtgctgtcagcacagaggaggagccagtgttgatcagggtgagggtatcaat

SEQ ID NO: 419269 - DNA, 837 bp, Homo sapiens
gactcttgaggatcccaagtctggaaaaggggaaggcagggccttggtccctgaggcttcccccatccaccattctgagctttaaattaccacgatcagggcctggaacaggcagagtggccctgagtgtcatgccctagagacccctgtggccaggacaatgtgaactggctcagatccccctcaacccctaggctggactcacaggagccccatctctggggctatgcccccaccagagaccactgcccccaacactcggactccctctttaagacctggctcagtgctggcccctcagtgcccacccactcctgtgctacccagccccagaggcagaagccaatgggtcactgtgccctaaggggtttgaccagggaaccacgggctgtcccttgaggtgcctggacagggtaagggggtgcttccagcctcctaacccaaagccagctgttccaggctccaggggaaaaaggtgtggccaggctgctcctcgaggaggctgggagctggccgactgcaaaagccagactggggcacctcccgtatccttggggcatggtgtggggtggtgagggtctcctgctatattctcctggatccgtggaaatagcctggctccctcttacccagtaatgaggggcagggaagggaactgggaggcagccgtttagtcctccctgccctgcccactgcctggatggggcgatgccacccctcatccttcacccagctctggcctctgggtcccaccacccagccccccgtgtcagaacaatctttgctctgtacaatcggcctctttacaataaaacctcctgctccacaaaaaaaaac

SEQ ID NO: 419270 - DNA, 515 bp, Homo sapiens
ctgggcggggccagcctaggcttaggtaggcgtgtgatgggaaacatgggtcttgggtggccagggtgagccccgtgctcccctggaccacgtgagtgtgctggagatacccctctccccgcaggggcctgacggatgagtctgagatcctgcggttcctgcagcatggcaccctggtggggctgctgcccgtgccccaccccatcctcatccgcaagtaccaggccaactcgggcactgccatgtggttccgcacctacatgtggggcgtcatctatctgaggtgggccccggggagtggggtggtgtccacctgagagcctgcccagcagggctcaacagggacctcagctctgggccccaccacctatggtggacttcatgtcaagacagtcaactaaggcggccttgcctggttgacggtggcacccgctgcccagggtgggacatcgggatggaaagggttggcttggccattcctgctgcccagctcctcctggtgccttgtctgcaag

SEQ ID NO: 419271 - DNA, 1913 bp, Homo sapiens
agaatatttaacagctggcctgacgtggatgctgccatgctggggcctgtactttttgccaggtgttagctgtttagtgctgggttgtggcgggaactcaaaggcactggggcgggggtgttgtgaggtgctcaggcctgacattctgggatagccatagtgggcacacacagccagtgccagccctgccccagcaccctctcttgggctccctgtaccatctccaaccccttgggcagacaccctcctgtcctccaaactcccccttccaggaagcccacccagattggacggggggagctggagggggcctccctgaggcgaaggcatgctccctgcccacaggcaactccaacctggtctacgccatcatccgcaagcgcagcatcttccaccagctggccaacctgcccacggacccgcccaccattcacaaggccctgcagcggcgccggcggacacctgagcccttgtctcgcaccggctcccaggagggcacctccatggagggctcccgccccgctgcccctgcagagccaggcaccctcaagaccagtctggtggctactccaggcattgacaagctgaccgagaagtcccaggtgtcagaggatggcaccttgcggtccctggaacctgagccccagcagagcttggaggatggcagcccggctaagggggagcccagccaggcatggagggagcagcggcgaccgtccacctcatcagccagtgggcagtggagcccaacgccagagtgggtcctctcctggaagtcgaagctgccgctgcagaccatcatgaggctgctgcaggtgctggttccgcaggtggagaagatctgcatcgacaagggcctgacggatgagtctgagatcctgcggttcctgcagcatggcaccctggtggggctgctgcccgtgccccaccccatcctcatccgcaagtaccaggccaactcgggcactgccatgtggttccgcacctacatgtggggcgtcatctatctgaggaatgtggacccccctgtctggtacgacaccgacgtgaagctgtttgagatacagcgggtgtgaggatgaagccgacgaggggctcagtctaggggaaggcagggccttggtccctgaggcttcccccatccaccattctgagctttaaattaccacgatcagggcctggaacaggcagagtggccctgagtgtcatgccctagagacccctgtggccaggacaatgtgaactggctcagatccccctcaacccctaggctggactcacaggagccccatctctggggctatgcccccaccagagaccactgcccccaacactcggactccctctttaagacctggctcagtgctggcccctcagtgcccacccactcctgtgctacccagccccagaggcagaagccaatgggtcactgtgccctaaggggtttgaccagggaaccacgggctgtcccttgaggtgcctggacagggtaagggggtgcttccagcctcctaacccaaagccagctgttccaggctccaggggaaaaaggtgtggccaggctgctcctcgaggaggctgggagctggccgactgcaaaagccagactggggcacctcccgtatccttggggcatggtgtggggtggtgagggtctcctgctatattctcctggatccgtggaaatagcctggctccctcttacccagtaatgaggggcagggaagggaactgggaggcagccgtttagtcctccctgccctgcccactgcctggatggggcgatgccacccctcatccttcacccagctctggcctctgggtcccaccacccagccccccgtgtcagaacaatctttgctctgtacaatcggcctctttacaataaaacctcctgctccacaaaaaaaaac

SEQ ID NO: 419272 - DNA, 3273 bp, Homo sapiens
ggcggggccgacgagggccgggggcggggcgcgccgcttgtctcctgcgagagccgcgggggccgcggagctggagccggagctgaagccggagccgggttggagtctgggcgggggccgggccggagcgggctccagagacatggggtcgaccgactccaagctgaacttccggaaggcggtgatccagctcaccaccaagacgcagcccgtggaagccaccgatgatgccttttgggaccagttctgggcagacacagccacctcggtgcaggatgtgtttgcactggtgccggcagcagagatccgggccgtgcgggaagagtcaccctccaacttggccaccctgtgctacaaggccgttgagaagctggtgcagggagctgagagtggctgccactcggagaaggagaagcagatcgtcctgaactgcagccggctgctcacccgcgtgctgccctacatctttgaggaccccgactggaggggcttcttctggtccacagtgcccggggcagggcgaggagggcagggagaagaggatgatgagcatgccaggcccctggccgagtccctgctcctggccattgctgacctgctcttctgcccggacttcacggttcagagccaccggaggagcactgtggactcggcagaggacgtccactccctggacagctgtgaatacatctgggaggctggtgtgggcttcgctcactccccccagcctaactacatccacgatatgaaccggatggagctgctgaaactgctgctgacatgcttctccgaggccatgtacctgcccccagctccggaaagtggcagcaccaacccatgggttcagttcttttgttccacggagaacagacatgccctgcccctcttcacctccctcctcaacaccgtgtgtgcctatgaccctgtgggctacgggatcccctacaaccacctgctcttctctgactaccgggaacccctggtggaggaggctgcccaggtgctcattgtcactttggaccacgacagtgccagcagtgccagccccactgtggacggcaccaccactggcaccgccatggatgatgccgatcctccaggccctgagaacctgtttgtgaactacctgtcccgcatccatcgtgaggaggacttccagttcatcctcaagggtatagcccggctgctgtccaaccccctgctccagacctacctgcctaactccaccaagaagatccagttccaccaggagctgctagttctcttctggaagctctgcgacttcaacaagaaattcctcttcttcgtgctgaagagcagcgacgtcctagacatccttgtccccatcctcttcttcctcaacgatgcccgggccgatcagtctcgggtgggcctgatgcacattggtgtcttcatcttgctgcttctgagcggggagcggaacttcggggtgcggctgaacaaaccctactcaatccgcgtgcccatggacatcccagtcttcacagggacccacgccgacctgctcattgtggtgttccacaagatcatcaccagcgggcaccagcggttgcagcccctcttcgactgcctgctcaccatcgtggtcaacgtgtccccctacctcaagagcctgtccatggtgaccgccaacaagttgctgcacctgctggaggccttctccaccacctggttcctcttctctgccgcccagaaccaccacctggtcttcttcctcctggaggtcttcaacaacatcatccagtaccagtttgatggcaactccaacctggtctacgccatcatccgcaagcgcagcatcttccaccagctggccaacctgcccacggacccgcccaccattcacaaggccctgcagcggcgccggcggacacctgagcccttgtctcgcaccggctcccaggagggcacctccatggagggctcccgccccgctgcccctgcagagccaggcaccctcaagaccagtctggtggctactccaggcattgacaagctgaccgagaagtcccaggtgtcagaggatggcaccttgcggtccctggaacctgagccccagcagagcttggaggatggcagcccggctaagggggagcccagccaggcatggagggagcagcggcgaccgtccacctcatcagccagtgggcagtggagcccaacgccagagtgggtcctctcctggaagtcgaagctgccgctgcagaccatcatgaggctgctgcaggtgctggttccgcaggtggagaagatctgcatcgacaagggcctgacggatgagtctgagatcctgcggttcctgcagcatggcaccctggtggggctgctgcccgtgccccaccccatcctcatccgcaagtaccaggccaactcgggcactgccatgtggttccgcacctacatgtggggcgtcatctatctgaggaatgtggacccccctgtctggtacgacaccgacgtgaagctgtttgagatacagcgggtgtgaggatgaagccgacgaggggctcagtctaggggaaggcagggccttggtccctgaggcttcccccatccaccattctgagctttaaattaccacgatcagggcctggaacaggcagagtggccctgagtgtcatgccctagagacccctgtggccaggacaatgtgaactggctcagatccccctcaacccctaggctggactcacaggagccccatctctggggctatgcccccaccagagaccactgcccccaacactcggactccctctttaagacctggctcagtgctggcccctcagtgcccacccactcctgtgctacccagccccagaggcagaagccaatgggtcactgtgccctaaggggtttgaccagggaaccacgggctgtcccttgaggtgcctggacagggtaagggggtgcttccagcctcctaacccaaagccagctgttccaggctccaggggaaaaaggtgtggccaggctgctcctcgaggaggctgggagctggccgactgcaaaagccagactggggcacctcccgtatccttggggcatggtgtggggtggtgagggtctcctgctatattctcctggatccgtggaaatagcctggctccctcttacccagtaatgaggggcagggaagggaactgggaggcagccgtttagtcctccctgccctgcccactgcctggatggggcgatgcgggtccctcaagtgcttatccaatgggggttcctccagagtccagtatcacc

SEQ ID NO: 419273 - DNA, 1391 bp, Homo sapiens
ggcggggccgacgagggccgggggcggggcgcgccgcttgtctcctgcgagagccgcgggggccgcggagctggagccggagctgaagccggagccgggttggagtctgggcgggggccgggccggagcgggctccagagacatggggtcgaccgactccaagctgaacttccggaaggcggtgatccagctcaccaccaagacgcagcccgtggaagccaccgatgatgccttttgggaccagttctgggcagacacagccacctcggtgcaggatgtgtttgcactggtgccggcagcagagatccgggccgtgcgggaagagtcaccctccaacttggccaccctgtgctacaaggccgttgagaagctggtgcagggagctgagagtggctgccactcggagaaggagaagcagatcgtcctgaactgcagccggctgctcacccgcgtgctgccctacatctttgaggaccccgactggaggggcttcttctggtccacagtgcccggggcagggcgaggagggcagggagaagaggatgatgagcatgccaggcccctggccgagtccctgctcctggccattgctgacctgctcttctgcccggacttcacggttcagagccaccggaggagcactgtggactcggcagaggacgtccactccctggacagctgtgaatacatctgggaggctggtgtgggcttcgctcactccccccagcctaactacatccacgatatgaaccggatggagctgctgaaactgctgctgacatgcttctccgaggccatgtacctgcccccagctccggaaagtggcagcaccaacccatgggttcagttcttttgttccacggagaacagacatgccctgcccctcttcacctccctcctcaacaccgtgtgtgcctatgaccctgtgggctacgggatcccctacaaccacctgctcttctctgactaccgggaacccctggtggaggaggctgcccaggtgctcattgtcactttggaccacgacagtgccagcagtgccagccccactgtggacggcaccaccactggcaccgccatggatgatgccgatcctccaggccctgagaacctgtttgtgaactacctgtcccgcatccatcgtgaggaggacttccagttcatcctcaagggtatagcccggctgctgtccaaccccctgctccagacctacctgcctaactccaccaagaagatccagttccaccaggagctgctagttctcttctggaagctctgcgacttcaacaaggtgggccagcctcgaggggccctgcagggagatggagagcagctgccccaataacccgggggcagggacagtgtcagactggaggggggtggggaagaag

SEQ ID NO: 419274 - DNA, 905 bp, Homo sapiens
ttgtgctgcgcttggagacctgcccgccctcggggcctgtgtgcacagggaggataggctgtttatctctgcaggctcaggaaggcaggtagctggcccgtcagtcatccgccctgcaaagcgctcccgagagaccccgtagagcgggccagcgcgcgcctggcctgaggtttcccgcccccggaggccctcacatctccccgttctgtagtcagaagtccaacatggttctcaatggcctaaaatcaaggtgtccacaggattgtgttcctttctagagagcaagctgcagtgtggtaaactgcctttgaaagagacccacatgtcaagaaactgagcatcacctgtgaccaacaccttgtgagaaattctgaactagaggacctcgtatgccttacccataggtcttacaagataatacgtgtttttcaaaaaagtaagtttggggataatttcttatgcagcaatagataatgaataataaagtaaatacagttttttgctgttgacttcaaaaatgtttaaagattttactgttatataattgtacatatttatggggtacatgtgatattttgatacatgcatacaatgtgtaatgatcaaactggggtaatttgaatatccatcacctcaaatgttatttagtggtattgggaacattccaaatcttgtaggtattttgaaatatacaaaaagttaattttatatataaatatatgtcatatattattaatatattaataatatatgccatatatatatatgtatgtataaatgccatatatattaattacatgtatggcatgttttcttttatacatttatccactgataaacacttaggttccttccttcccttggctattgtgaatagtgctgcaataaacatgggagtgtagata

SEQ ID NO: 419275 - DNA, 938 bp, Homo sapiens
agctccctcaagactggacagcctatagctatgacagtgggaatttttgctccaagttcttctgtgaaatccttgcctcatacttgccagaagctacatacaaaaaagaataaagtttaaaagggagttccctttcctcactctacaaatcaaatccattgccaaggactgttgcaagctgcagtgtggtaaactgcctttgaaagagacccacatgtcaagaaactgagcatcacctgtgaccaacagccagaaagtaactgaagccccaagacgaacagcttgtgcaaaactaaattctgcctacaacaagagcatgaattgagacgcagatccttccctagttgatccttgaaatgcttgcagctctatggacaccttgattgcagccttgtgagaaattctgaactagaggacctcgtatgccttacccataggtcttacaagataatacgtgtttttcaaaaaagtaagtttggggataatttcttatgcagcaatagataatgaataataaagtaaatacagttttttgctgttgacttcaaaaatgtttaaagattttactgttatataattgtacatatttatggggtacatgtgatattttgatacatgcatacaatgtgtaatgatcaaactggggtaatttgaatatccatcacctcaaatgttatttagtggtattgggaacattccaaatcttgtaggtattttgaaatatacaaaaagttaattttatatataaatatatgtcatatattattaatatattaataatatatgccatatatatatatgtatgtataaatgccatatatattaattacatgtatggcatgttttcttttatacatttatccactgataaacacttaggttccttccttcccttggctattgtgaatagtgctgcaataaacatgggagtgtagata

SEQ ID NO: 419276 - DNA, 982 bp, Homo sapiens
gcctgagcgcccccaattgggtggattttgattgcacatatggagaatagcacttaacagtttacaaagcacttcatcctcctaacattcagtaaaatacattttatcgaaactctccattaactataacttcctcttgcccaagtctaaaatgttcagggaaggtccatgcccttttttctcttgcatttttccttcataggaagtatgagaagatgctttttctccactcagcttgaatcatgcttttggttttgtctctgacagatgcagctgtcttctcctcagtgctggcgctctgactacccttcccaaagaaccacggccctctccctttactgttctatagccccagaactgggagatggcttcctaagttggctataccttgtccacttccagtactggacgtgctcagggtctagggtcacagatggtgctattaattgaactggaacacagcagaattgttgcaaaggttctaggagccagattcattccttcttcattctttgcaaaacagtggtacagacatggagtctagaattgacccagatggaaagtaattggtattcttaatatcctgggtgactaatatccaggcagagaagctcctggaaccataactgtaagttcctagctggctagggattgaagtcctggacagtgacagaggataccacagtagttcaagacttagcacaagtcaccaactgcttcagggatacctggaggggccagcaagtagagtgttggtggcccaagcaaaccagtgttgccaataccattgccaaaagggcctttggatcctggacaaagcttggctgccggcttcatttattcctgctgatggctgagaagcatctgtcttccatcccacttgcctgtcccaagttttgttccattttttaaaaatttgttgtaaactgcatgttttataaaataaaaataaaatatcgtttgttatttatctcattagaga

SEQ ID NO: 419277 - DNA, 4652 bp, Homo sapiens
gttgagccctaggcgtgggggagaactggggaaactggaatttcccgcggagctgacagcgcttgcgctccccctactcgttctaattccacgcgctccaaaatatccgccatggagaaatcttggccaggatgtccattctaggcccatcggtgctgtcttgctgaaggttgggtcaggcatctaaagggactgtggtaagggagggtgtgacacaggtgtaagctgccatcgtcatcatgaactttgagggtctggaccctggactggcagaatatgccccagccatgcattctgccctggaccctgtcttggatgcccacctgaacccaagtctgctacagaatgtggagctggacccagagggagtggccttggaggctcttcccgtccaggaatcagtgcacataatggaaggtgtctactctgaattgcacagcgtggtggctgaagtgggtgtacctgtttccgtctcccactttgacttgcacgaggagatgctgtgggtggggagccacgggggccatgccacttcattttttggcccagccttggagcgctactcatcctttcaagtcaatggcagtgatgatattcggcagatccagagcctggagaatggtatcctttttctcaccaagaacaacctcaagtatatggcccgtgggggcctcattatatttgattacctgctggatgagaatgaggatatgcacagtctcctactgactgacagcagcactctactcgttggtgggctgcagaatcacatactagagattgatcttaacactgtccaggagactcagaagtatgcagtagagacgcctggagtcaccatcatgagacagacaaatcgcttcttcttctgcggccacacgtctggcaaggtttccctgagagacctccgtacttttaaggtggaacatgagtttgatgccttctcaggaagtctgtcagactttgatgtgcatggcaacctgctagctgcctgtggcttctccagccgcctcactggcctggcctgcgaccgtttcctcaaggtgtatgatttgcgcatgatgcgtgccatcacaccacttcaagtacatgtggatcctgccttcttgcgcttcattcctacatatacttctcgtcttgctatcatctctcagtcagggcagtgccaattctgtgaacccacaggcctggccaacccagccgatatctttcatgtgaatcctgtggggcctctgctaatgacatttgatgtgtcagccagcaagcaggctctggcctttggggattctgagggctgtgtgcacctctggactgattccccggagccttccttcaacccctactcccgtgagactgagtttgctttgccgtgtctcgtggactcactgcctcctctggactggagccaggacctgctgcctctttccctcatccctgtcccactcaccactgacacacttctctctgattggcctgctgccaactctgctccagctcccaggcgagcaccacccgtggatgcagagattctgcgcaccatgaagaaggtgggcttcattggctatgcgcccaatccccgcaccaggctgcgcaatcagataccctacagactcaaggagtcagacagtgaatttgacagcttcagccaggtcactgagtcaccagtaggacgagaagaggaaccacatctccacatggtttctaagaaataccgcaaggtgaccatcaaatattccaagctagggctggaggactttgacttcaaacactacaataagaccttgtttgctggattagagccccacattcccaacgcctactgtaactgcatgatccaggtgctctatttcctggagcctgtacgctgtctaattcaaaaccacctttgccagaaggagttctgtctggcatgtgagctgggcttcctgtttcacatgttggacctctctcgtggtgacccttgccagggcaataattttcttcgggcattccgtactattcctgaggcctcagccctcggtctaatcctggctgactcagatgaggcctcaggcaagggcaatctggccaggctcattcagaggtggaatcgcttcattctcactcaactgcatcaagatatgcaggagctggaaataccacaggcttatcgaggtgctggaggcagcagcttttgctcatcgggggactctgttattgggcagctcttcagctgtgagatggagaactgcagcctctgccgctgtggcagtgagaccgtgcgagcctcatccactctgcttttcacactctcctaccctgatggtagcaaatgataaaactgggaagaactatgactttgctcaggtgctgaagcgaagcatctgcctggaccagaatacacaggcctggtgtgacacctgtgaaaagtaccagcccacgattcagacccgcaacatccgccatctgccagatattcttgtcatcaattgtgaggtgaacagctcaaaagaggctgatttctggagaatgcaggctgaggttgccttcaagatggcagtaaagaaacacggtggggaaatctccaagaacaaggaatttgctttggctgattggaaggaactagggagtccagagggtgtgctggtgtgtccctccattgaggagttgaagaacgtctggcttcctttctccattcgcatgaagatgaccaaaaacaaagggctggatgtttgcaattggactgatggggatgagatgcagtggggcccagccagggcagaggaggagcatggtgtctatgtgtatgacctgatggctactgtggtacacatcctggactcacgcacagggggcagcctggtggctcacatcaaagttggagagacctaccaccagcgcaaggagggcgttactcaccagcagtggtatctgttcaatgactttcttattgaacctattgataagcatgaagctgtgcagtttgacatgaattggaaagtacctgcaatcctttattatgtcaaacggaatctcaattccagatacaacctgaacatcaagaaccctattgaggcaagtgtcttgctggctgaagcctcgctggcacggaagcagcggaaaacacatactacctttattccactgatgctgaatgagatgccacagattggggacctggtgggtctggatgctgagtttgtcacccttaatgaggaggaagcagagttacgcagtgatggtaccaagtctaccattaaaccaagccagatgtcagtagccaggattacctgtgttcggggccagggacccaatgagggtatccccttcattgatgactacatctctacccaggagcaggtggtggattacttgactcaatactcgggtataaagcctggtgacctcgatgccaaaatttcctccaagcacctaacaactctcaagtctacctacttaaagcttcgttttctcattgacattggagtcaagtttgtgggtcatggcctgcagaaggacttccgggtcatcaacctgatggtttggcagggctcttttaagagtcttcttgtgagagtgggcccctcagggtatacattgtgcctttagagaatggggaattataggtcccctaccttaagtctccccctcttttatccttgccaggtgcccaaggaccaagtccttgacactgtctacctgttccatatgccccgaaaacgaatgatttccctgcgattccttgcttggtactttctggacctgaagattcaaggggaaacccatgacagtattgaggatgcccgcacagcccttcagctgtaccgaaagtatctggagctaagcaaaaatggcactgagcctgagtctttccacaaggtgctcaagggtctttatgagaagggcagaaagatggactggaaggtgcctgagcctgagggccaaacaagtcccaagaatgcagctgtcttctcctcagtgctggcgctctgactacccttcccaaagaaccacggccctctccctttactgttctatagccccagaactgggagatggcttcctaagttggctataccttgtccacttccagtactggacgtgctcagggtctagggtcacagatggtgctattaattgaactggaacacagcagaattgttgcaaaggttctaggagccagattcattccttcttcattctttgcaaaacagtggtacagacatggagtctagaattgacccagatggaaagtaattggtattcttaatatcctgggtgactaatatccaggcagagaagctcctggaaccataactgtaagttcctagctggctagggattgaagtcctggacagtgacagaggataccacagtagttcaagacttagcacaagtcaccaactgcttcagggatacctggaggggccagcaagtagagtgttggtggcccaagcaaaccagtgttgccaataccattgccaaaagggcctttggatcctggacaaagcttggctgccggcttcatttattcctgctgatggctgagaagcatctgtcttccatcccacttgcctgtcccaagttttgttccattttttaaaaatttgttgtaaactgcatgttttataaaataaaaataaaatatcgtttgttatttatctcattagaga

SEQ ID NO: 419278 - DNA, 547 bp, Homo sapiens
  misc_feature (1)..(1): n is a, c, g, or t
ntatactttgtccacttcaagtactgcatgtgtaaagggtatagggtaaaagatggtgatattaattgaagtggaacctagaagaattgttgaaaaggttataggagctagattcattcattattcattctttgtaaaacataatatcctgggtgactaatatccaggcagagaagctcctggaaccataactgtaagttcctagctggctagggattgaagtcctggacagtgacagaggataccacagtagttcaagacttagcacaagtcaccaactgcttcagggatacctggaggggccagcaagtagagtgttggtggcccaagcaaaccagtgttgccaataccattgccaaaagggcctttggatcctggacaaagcttggctgccggcttcatttattcctgctgatggctgagaagcatctgtcttccatcccacttgcctgtcccaagttttgttccattttttaaaaatttgttgtaaactgcatgttttataaaataaaaataaaatatcgtttgttatttatctcattagaga

SEQ ID NO: 419279 - DNA, 573 bp, Homo sapiens
aaaaagtaggaaaagtgttagaggacaaaatgggagtaggggagaccctcagttagtggtgacagttactaatggatttaattaacttcaatatcccttctgtgcactgaggaagatgtctgacaattttccttaagggcagtcaggctttttagttttctggagtcaggtaggagtggggagacatgttcctacctccctttgctgggtcccaaactattccacctttacttaccccagaacctgaagattcaaggggaaacccatgacagtattgaggatgcccgcacagcccttcagctgtaccgaaagtatctggagctaagcaaaaatggcactgagcctgagtctttccacaaggtgctcaagggtctttatgagaagggcagaaagatggactggaaggtgcctgagcctgagggccaaacaagtcccaagagtaagacctgggatgggacaagggaaactggactgggtggattttgtattttgtttgtttgtgacagggtctcactctgtcacccaggctgaagtgcagtagcgtgattacagctcactgcagcctcgacttcc

SEQ ID NO: 419280 - DNA, 4653 bp, Homo sapiens
gttgagccctaggcgtgggggagaactggggaaactggaatttcccgcggagctgacagcgcttgcgctccccctactcgttctaattccacgcgctccaaaatatccgccatggagaaatcttggccaggatgtccattctaggcccatcggtgctgtcttgctgaaggttgggtcaggcatctaaagggactgtggtaagggagggtgtgacacaggtgtaagctgccatcgtcatcatgaactttgagggtctggaccctggactggcagaatatgccccagccatgcattctgccctggaccctgtcttggatgcccacctgaacccaagtctgctacagaatgtggagctggacccagagggagtggccttggaggctcttcccgtccaggaatcagtgcacataatggaaggtgtctactctgaattgcacagcgtggtggctgaagtgggtgtacctgtttccgtctcccactttgacttgcacgaggagatgctgtgggtggggagccacgggggccatgccacttcattttttggcccagccttggagcgctactcatcctttcaagtcaatggcagtgatgatattcggcagatccagagcctggagaatggtatcctttttctcaccaagaacaacctcaagtatatggcccgtgggggcctcattatatttgattacctgctggatgagaatgaggatatgcacagtctcctactgactgacagcagcactctactcgttggtgggctgcagaatcacatactagagattgatcttaacactgtccaggagactcagaagtatgcagtagagacgcctggagtcaccatcatgagacagacaaatcgcttcttcttctgcggccacacgtctggcaaggtttccctgagagacctccgtacttttaaggtggaacatgagtttgatgccttctcaggaagtctgtcagactttgatgtgcatggcaacctgctagctgcctgtggcttctccagccgcctcactggcctggcctgcgaccgtttcctcaaggtgtatgatttgcgcatgatgcgtgccatcacaccacttcaagtacatgtggatcctgccttcttgcgcttcattcctacatatacttctcgtcttgctatcatctctcagtcagggcagtgccaattctgtgaacccacaggcctggccaacccagccgatatctttcatgtgaatcctgtggggcctctgctaatgacatttgatgtgtcagccagcaagcaggctctggcctttggggattctgagggctgtgtgcacctctggactgattccccggagccttccttcaacccctactcccgtgagactgagtttgctttgccgtgtctcgtggactcactgcctcctctggactggagccaggacctgctgcctctttccctcatccctgtcccactcaccactgacacacttctctctgattggcctgctgccaactctgctccagctcccaggcgagcaccacccgtggatgcagagattctgcgcaccatgaagaaggtgggcttcattggctatgcgcccaatccccgcaccaggctgcgcaatcagataccctacagactcaaggagtcagacagtgaatttgacagcttcagccaggtcactgagtcaccagtaggacgagaagaggaaccacatctccacatggtttctaagaaataccgcaaggtgaccatcaaatattccaagctagggctggaggactttgacttcaaacactacaataagaccttgtttgctggattagagccccacattcccaacgcctactgtaactgcatgatccaggtgctctatttcctggagcctgtacgctgtctaattcaaaaccacctttgccagaaggagttctgtctggcatgtgagctgggcttcctgtttcacatgttggacctctctcgtggtgacccttgccagggcaataattttcttcgggcattccgtactattcctgaggcctcagccctcggtctaatcctggctgactcagatgaggcctcaggcaagggcaatctggccaggctcattcagaggtggaatcgcttcattctcactcaactgcatcaagatatgcaggagctggaaataccacaggcttatcgaggtgctggaggcagcagcttttgctcatcgggggactctgttattgggcagctcttcagctgtgagatggagaactgcagcctctgccgctgtggcagtgagaccgtgcgagcctcatccactctgcttttcacactctcctaccctgatggtagcaaatgagtggtatacccttcagctcagttgggaaggctccccaaaatgtcctgtaatatcagggagagggtgttggggactaactgtgggtagaggggagaaccaggagtatagcatctaattttccctcagataaaactgggaagaactatgactttgctcaggtgctgaagcgaagcatctgcctggaccagaatacacaggcctggtgtgacacctgtgaaaagtaccagcccacgattcagacccgcaacatccgccatctgccagatattcttgtcatcaattgtgaggtgaacagctcaaaagaggctgatttctggagaatgcaggctgaggttgccttcaagatggcagtaaagaaacacggtggggaaatctccaagaacaaggaatttgctttggctgattggaaggaactagggagtccagagggtgtgctggtgtgtccctccattgaggagttgaagaacgtctggcttcctttctccattcgcatgaagatgaccaaaaacaaagggctggatgtttgcaattggactgatggggatgagatgcagtggggcccagccagggcagaggaggagcatggtgtctatgtgtatgacctgatggctactgtggtacacatcctggactcacgcacagggggcagcctggtggctcacatcaaagttggagagacctaccaccagcgcaaggagggcgttactcaccagcagtggtatctgttcaatgactttcttattgaacctattgataagcatgaagctgtgcagtttgacatgaattggaaagtacctgcaatcctttattatgtcaaacggaatctcaattccagatacaacctgaacatcaagaaccctattgaggcaagtgtcttgctggctgaagcctcgctggcacggaagcagcggaaaacacatactacctttattccactgatgctgaatgagatgccacagattggggacctggtgggtctggatgctgagtttgtcacccttaatgaggaggaagcagagttacgcagtgatggtaccaagtctaccattaaaccaagccagatgtcagtagccaggattacctgtgttcggggccagggacccaatgagggtatccccttcattgatgactacatctctacccaggagcaggtggtggattacttgactcaatactcgggtataaagcctggtgacctcgatgccaaaatttcctccaagcacctaacaactctcaagtctacctacttaaagcttcgttttctcattgacattggagtcaagtttgtgggtcatggcctgcagaaggacttccgggtcatcaacctgatggtgcccaaggaccaagtccttgacactgtctacctgttccatatgccccgaaaacgaatgatttccctgcgattccttgcttggtactttctggacctgaagattcaaggggaaacccatgacagtattgaggatgcccgcacagcccttcagctgtaccgaaagtatctggagctaagcaaaaatggcactgagcctgagtctttccacaaggtgctcaagggtctttatgagaagggcagaaagatggactggaaggtgcctgagcctgagggccaaacaagtcccaagaatgcagctgtcttctcctcagtgctggcgctctgactacccttcccaaagaaccacggccctctccctttactgttctatagccccagaactgggagatggcttcctaagttggctataccttgtccacttccagtactggacgtgctcagggtctagggtcacagatggtgctattaattgaactggaacacagcagaattgttgcaaaggttctaggagccagattcattccttcttcattctttgcaaaacagtggtacagacatggagtctagaattgacccagatggaaagtaattggtattcttaatatcctgggtgactaatatccaggcagagaagctcctggaaccataactgtaagttcctagctggctagggattgaagtcctggacagtgacagaggataccacagtagttcaagacttagcacaagtcaccaactgcttcagggatacctggaggggccagcaagtagagtgttggtggcccaagcaaaccagtgttgccaataccattgccaaaagggcctttggatcctggacaaagcttggctgccggcttcatttattcctgctgatggctgagaagcatctgtcttccatcccacttgcctgtcccaagttttgttccattttttaaaaatttgttgtaaactgcatgttttataaaataaaaataaaatatcgtttgttatttatctcattagaga

SEQ ID NO: 419281 - DNA, 4664 bp, Homo sapiens
agagaattctgggtaactagccgtttccgtcaccttcccctgcccccgccccaattgtgggtaactggccattattgttttcctctagagaatcctgggtagctattggagaggattctaggaaactgacttctcgttctccccaccgtccaatccacccgttttcacccccaattctgggagaaagcaccttaaatccctctacctaactccaacccccgcaattctcgctcccttcacctgatgattcagggctgaacaaggccaggatgtccattctaggcccatcggtgctgtcttgctgaaggttgggtcaggcatctaaagggactgtggtaagggagggtgtgacacaggtgtaagctgccatcgtcatcatgaactttgagggtctggaccctggactggcagaatatgccccagccatgcattctgccctggaccctgtcttggatgcccacctgaacccaagtctgctacagaatgtggagctggacccagagggagtggccttggaggctcttcccgtccaggaatcagtgcacataatggaaggtgtctactctgaattgcacagcgtggtggctgaagtgggtgtacctgtttccgtctcccactttgacttgcacgaggagatgctgtgggtggggagccacgggggccatgccacttcattttttggcccagccttggagcgctactcatcctttcaagtcaatggcagtgatgatattcggcagatccagagcctggagaatggtatcctttttctcaccaagaacaacctcaagtatatggcccgtgggggcctcattatatttgattacctgctggatgagaatgaggatatgcacagtctcctactgactgacagcagcactctactcgttggtgggctgcagaatcacatactagagattgatcttaacactgtccaggagactcagaagtatgcagtagagacgcctggagtcaccatcatgagacagacaaatcgcttcttcttctgcggccacacgtctggcaaggtttccctgagagacctccgtacttttaaggtggaacatgagtttgatgccttctcaggaagtctgtcagactttgatgtgcatggcaacctgctagctgcctgtggcttctccagccgcctcactggcctggcctgcgaccgtttcctcaaggtgtatgatttgcgcatgatgcgtgccatcacaccacttcaagtacatgtggatcctgccttcttgcgcttcattcctacatatacttctcgtcttgctatcatctctcagtcagggcagtgccaattctgtgaacccacaggcctggccaacccagccgatatctttcatgtgaatcctgtggggcctctgctaatgacatttgatgtgtcagccagcaagcaggctctggcctttggggattctgagggctgtgtgcacctctggactgattccccggagccttccttcaacccctactcccgtgagactgagtttgctttgccgtgtctcgtggactcactgcctcctctggactggagccaggacctgctgcctctttccctcatccctgtcccactcaccactgacacacttctctctgattggcctgctgccaactctgctccagctcccaggcgagcaccacccgtggatgcagagattctgcgcaccatgaagaaggtgggcttcattggctatgcgcccaatccccgcaccaggctgcgcaatcagataccctacagactcaaggagtcagacagtgaatttgacagcttcagccaggtcactgagtcaccagtaggacgagaagaggaaccacatctccacatggtttctaagaaataccgcaaggtgaccatcaaatattccaagctagggctggaggactttgacttcaaacactacaataagaccttgtttgctggattagagccccacattcccaacgcctactgtaactgcatgatccaggtgctctatttcctggagcctgtacgctgtctaattcaaaaccacctttgccagaaggagttctgtctggcatgtgagctgggcttcctgtttcacatgttggacctctctcgtggtgacccttgccagggcaataattttcttcgggcattccgtactattcctgaggcctcagccctcggtctaatcctggctgactcagatgaggcctcaggcaagggcaatctggccaggctcattcagaggtggaatcgcttcattctcactcaactgcatcaagatatgcaggagctggaaataccacaggcttatcgaggtgctggaggcagcagcttttgctcatcgggggactctgttattgggcagctcttcagctgtgagatggagaactgcagcctctgccgctgtggcagtgagaccgtgcgagcctcatccactctgcttttcacactctcctaccctgatggtagcaaatgataaaactgggaagaactatgactttgctcaggtgctgaagcgaagcatctgcctggaccagaatacacaggcctggtgtgacacctgtgaaaagtaccagcccacgattcagacccgcaacatccgccatctgccagatattcttgtcatcaattgtgaggtgaacagctcaaaagaggctgatttctggagaatgcaggctgaggttgccttcaagatggcagtaaagaaacacggtggggaaatctccaagaacaaggaatttgctttggctgattggaaggaactagggagtccagagggtgtgctggtgtgtccctccattgaggagttgaagaacgtctggcttcctttctccattcgcatgaagatgaccaaaaacaaagggctggatgtttgcaattggactgatggggatgagatgcagtggggcccagccagggcagaggaggagcatggtgtctatgtgtatgacctgatggctactgtggtacacatcctggactcacgcacagggggcagcctggtggctcacatcaaagttggagagacctaccaccagcgcaaggagggcgttactcaccagcagtggtatctgttcaatgactttcttattgaacctattgataagcatgaagctgtgcagtttgacatgaattggaaagtacctgcaatcctttattatgtcaaacggaatctcaattccagatacaacctgaacatcaagaaccctattgaggcaagtgtcttgctggctgaagcctcgctggcacggaagcagcggaaaacacatactacctttattccactgatgctgaatgagatgccacagattggggacctggtgggtctggatgctgagtttgtcacccttaatgaggaggaagcagagttacgcagtgatggtaccaagtctaccattaaaccaagccagatgtcagtagccaggattacctgtgttcggggccagggacccaatgagggtatccccttcattgatgactacatctctacccaggagcaggtggtggattacttgactcaatactcgggtataaagcctggtgacctcgatgccaaaatttcctccaagcacctaacaactctcaagtctacctacttaaagcttcgttttctcattgacattggagtcaagtttgtgggtcatggcctgcagaaggacttccgggtcatcaacctgatggtgcccaaggaccaagtccttgacactgtctacctgttccatatgccccgaaaacgaatgatttccctgcgattccttgcttggtactttctggacctgaagattcaaggggaaacccatgacagtattgaggatgcccgcacagcccttcagctgtaccgaaagtatctggagctaagcaaaaatggcactgagcctgagtctttccacaaggtgctcaagggtctttatgagaagggcagaaagatggactggaaggtgcctgagcctgagggccaaacaagtcccaagaatgcagctgtcttctcctcagtgctggcgctctgactacccttcccaaagaaccacggccctctccctttactgttctatagccccagaactgggagatggcttcctaagttggctataccttgtccacttccagtactggacgtgctcagggtctagggtcacagatggtgctattaattgaactggaacacagcagaattgttgcaaaggttctaggagccagattcattccttcttcattctttgcaaaacagtggtacagacatggagtctagaattgacccagatggaaagtaattggtattcttaatatcctgggtgactaatatccaggcagagaagctcctggaaccataactgtaagttcctagctggctagggattgaagtcctggacagtgacagaggataccacagtagttcaagacttagcacaagtcaccaactgcttcagggatacctggaggggccagcaagtagagtgttggtggcccaagcaaaccagtgttgccaataccattgccaaaagggcctttggatcctggacaaagcttggctgccggcttcatttattcctgctgatggctgagaagcatctgtcttccatcccacttgcctgtcccaagttttgttccattttttaaaaatttgttgtaaactgcatgttttataaaataaaaataaaatatcgtttgttatttatctcattagaga

SEQ ID NO: 419282 - DNA, 2880 bp, Homo sapiens
ggacgcgctgggtcgacccacgcgtccggaggaaccagcatctccacatggtttctaataaaataccgcaaggtgaccatcaaatattccaagctagggctggaggactttgacttcaaacactacaataagaccttgtttgctggattagagccccacattcccaacgcctactgtaactgcatgatccaggtgctctatttcctggagcctgtacgctgtctaattcaaaaccacctttgccagaaggagttctgtctggcatgtgagctgggcttcctgtttcacatgttggacctctctcgtggtgacccttgccagggcaataattttcttcgggcattccgtactattcctgaggcctcagccctcggtctaatcctggctgactcagatgaggcctcaggcaagggcaatctggccaggctcattcagaggtggaatcgcttcattctcactcaactgcatcaagatatgcaggagctggaaataccacaggcttatcgaggtgctggaggcagcagcttttgctcatcgggggactctgttattgggcagctcttcagctgtgagatggagaactgcagcctctgccgctgtggcagtgagaccgtgcgagcctcatccactctgcttttcacactctcctaccctgatggtagcaaatgataaaactgggaagaactatgactttgctcaggtgctgaagcgaagcatctgcctggaccagaatacacaggcctggtgtgacacctgtgaaaagtaccagcccacgattcagacccgcaacatccgccatctgccagatattcttgtcatcaattgtgaggtgaacagctcaaaagaggctgatttctggagaatgcaggctgaggttgccttcaagatggcagtaaagaaacacggtggggaaatctccaagaacaaggaatttgctttggctgattggaaggaactagggagtccagagggtgtgctggtgtgtccctccattgaggagttgaagaacgtctggcttcctttctccattcgcatgaagatgaccaaaaacaaagggctggatgtttgcaattggactgatggggatgagatgcagtggggcccagccagggcagaggaggagcatggtgtctatgtgtatgacctgatggctactgtggtacacatcctggactcacgcacagggggcagcctggtggctcacatcaaagttggagagacctaccaccagcgcaaggagggcgttactcaccagcagtggtatctgttcaatgactttcttattgaacctattgataagcatgaagctgtgcagtttgacatgaattggaaagtacctgcaatcctttattatgtcaaacggaatctcaattccagatacaacctgaacatcaagaaccctattgaggcaagtgtcttgctggctgaagcctcgctggcacggaagcagcggaaaacacatactacctttattccactgatgctgaatgagatgccacagattggggacctggtgggtctggatgctgagtttgtcacccttaatgaggaggaagcagagttacgcagtgatggtaccaagtctaccattaaaccaagccagatgtcagtagccaggattacctgtgttcggggccagggacccaatgagggtatccccttcattgatgactacatctctacccaggagcaggtggtggattacttgactcaatactcgggtataaagcctggtgacctcgatgccaaaatttcctccaagcacctaacaactctcaagtctacctacttaaagcttcgttttctcattgacattggagtcaagtttgtgggtcatggcctgcagaaggacttccgggtcatcaacctgatggtgcccaaggaccaagtccttgacactgtctacctgttccatatgccccgaaaacgaatgatttccctgcgattccttgcttggtactttctggacctgaagattcaaggggaaacccatgacagtattgaggatgcccgcacagcccttcagctgtaccgaaagtatctggagctaagcaaaaatggcactgagcctgagtctttccacaaggtgctcaagggtctttatgagaagggcagaaagatggactggaaggtgcctgagcctgagggccaaacaagtcccaagaatgcagctgtcttctcctcagtgctggcgctctgactacccttcccaaagaaccacggccctctccctttactgttctatagccccagaactgggagatggcttcctaagttggctataccttgtccacttccagtactggacgtgctcagggtctagggtcacagatggtgctattaattgaactggaacacagcagaattgttgcaaaggttctaggagccagattcattccttcttcattctttgcaaaacagtggtacagacatggagtctagaattgacccagatggaaagtaattggtattcttaatatcctgggtgactaatatccaggcagagaagctcctggaaccataactgtaagttcctagctggctagggattgaagtcctggacagtgacagaggataccacagtagttcaagacttagcacaagtcaccaactgcttcagggatacctggaggggccagcaagtagagtgttggtggcccaagcaaaccagtgttgccaataccattgccaaaagggcctttggatcctggacaaagcttggctgccggcttcatttattcctgctgatggctgagaagcatctgtcttccatcccacttgcctgtcccaagttttgttccattttttaaaaatttgttgtaaactgcatgttttataaaataaaaataaaatatcgtttgttatttatctcattagaga

SEQ ID NO: 419283 - DNA, 4472 bp, Homo sapiens
gttgagccctaggcgtgggggagaactggggaaactggaatttcccgcggagctgacagcgcttgcgctccccctactcgttctaattccacgcgctccaaaatatccgccatggagaaatcttggccaggatgtccattctaggcccatcggtgctgtcttgctgaaggttgggtcaggcatctaaagggactgtggtaagggagggtgtgacacaggtgtaagctgccatcgtcatcatgaactttgagggtctggaccctggactggcagaatatgccccagccatgcattctgccctggaccctgtcttggatgcccacctgaacccaagtctgctacagaatgtggagctggacccagagggagtggccttggaggctcttcccgtccaggaatcagtgcacataatggaaggtgtctactctgaattgcacagcgtggtggctgaagtgggtgtacctgtttccgtctcccactttgacttgcacgaggagatgctgtgggtggggagccacgggggccatgccacttcattttttggcccagccttggagcgctactcatcctttcaagtcaatggcagtgatgatattcggcagatccagagcctggagaatggtatcctttttctcaccaagaacaacctcaagtatatggcccgtgggggcctcattatatttgattacctgctggatgagaatgaggatatgcacagtctcctactgactgacagcagcactctactcgttggtgggctgcagaatcacatactagagattgatcttaacactgtccaggagactcagaagtatgcagtagagacgcctggagtcaccatcatgagacagacaaatcgcttcttcttctgcggccacacgtctggcaaggtttccctgagagacctccgtacttttaaggtggaacatgagtttgatgccttctcaggaagtctgtcagactttgatgtgcatggcaacctgctagctgcctgtggcttctccagccgcctcactggcctggcctgcgaccgtttcctcaaggtgtatgatttgcgcatgatgcgtgccatcacaccacttcaagtacatgtggatcctgccttcttgcgcttcattcctacatatacttctcgtcttgctatcatctctcagtcagggcagtgccaattctgtgaacccacaggcctggccaacccagccgatatctttcatgtgaatcctgtggggcctctgctaatgacatttgatgtgtcagccagcaagcaggctctggcctttggggattctgagggctgtgtgcacctctggactgattccccggagccttccttcaacccctactcccgtgagactgagtttgctttgccgtgtctcgtggactcactgcctcctctggactggagccaggacctgctgcctctttccctcatccctgtcccactcaccactgacacacttctctctgattggcctgctgccaactctgctccagctcccaggcgagcaccacccgtggatgcagagattctgcgcaccatgaagaaggtgggcttcattggctatgcgcccaatccccgcaccaggctgcgcaatcagataccctacagactcaaggagtcagacagtgaatttgacagcttcagccaggtcactgagtcaccagtaggacgagaagaggaaccacatctccacatggtttctaagaaataccgcaaggtgaccatcaaatattccaagctagggctggaggactttgacttcaaacactacaataagaccttgtttgctggattagagccccacattcccaacgcctactgtaactgcatgatccaggtgctctatttcctggagcctgtacgctgtctaattcaaaaccacctttgccagaaggagttctgtctggcatgtgagctgggcttcctgtttcacatgttggacctctctcgtggtgacccttgccagggcaataattttcttcgggcattccgtactattcctgaggcctcagccctcggtctaatcctggctgactcagatgaggcctcaggcaagggcaatctggccaggctcattcagaggtggaatcgcttcattctcactcaactgcatcaagatatgcaggagctggaaataccacaggcttatcgaggtgctggaggcagcagcttttgctcatcgggggactctgttattgggcagctcttcagctgtgagatggagaactgcagcctctgccgctgtggcagtgagaccgtgcgagcctcatccactctgcttttcacactctcctaccctgatggtagcaaatgataaaactgggaagaactatgactttgctcaggtgctgaagcgaagcatctgcctggaccagaatacacaggcctggtgtgacacctgtgaaaagtaccagcccacgattcagacccgcaacatccgccatctgccagatattcttgtcatcaattgtgaggtgaacagctcaaaagaggctgatttctggagaatgcaggctgaggttgccttcaagatggcagtaaagaaacacggtggggaaatctccaagaacaaggaatttgctttggctgattggaaggaactagggagtccagagggtgtgctggtgtgtccctccattgaggagttgaagaacgtctggcttcctttctccattcgcatgaagatgaccaaaaacaaagggctggatgtttgcaattggactgatggggatgagatgcagtggggcccagccagggcagaggaggagcatggtgtctatgtgtatgacctgatggctactgtggtacacatcctggactcacgcacagggggcagcctggtggctcacatcaaagttggagagacctaccaccagcgcaaggagggcgttactcaccagcagtggtatctgttcaatgactttcttattgaacctattgataagcatgaagctgtgcagtttgacatgaattggaaagtacctgcaatcctttattatgtcaaacggaatctcaattccagatacaacctgaacatcaagaaccctattgaggcaagtgtcttgctggctgaagcctcgctggcacggaagcagcgggacctggtgggtctggatgctgagtttgtcacccttaatgaggaggaagcagagttacgcagtgatggtaccaagtctaccattaaaccaagccagatgtcagtagccaggattacctgtgttcggggccagggacccaatgagggtatccccttcattgatgactacatctctacccaggagcaggtggtggattacttgactcaatactcgggtataaagcctggtgacctcgatgccaaaatttcctccaagcacctaacaactctcaagtctacctacttaaagcttcgttttctcattgacattggagtcaagtttgtgggtcatggcctgcagaaggacttccgggtcatcaacctgatggtgcccaaggaccaagtccttgacactgtctacctgttccatatgccccgaaaacgaatgatttccctgcgattccttgcttggtactttctggacctgaagattcaaggggaaacccatgacagtattgaggatgcccgcacagcccttcagctgtaccgaaagtatctggagctaagcaaaaatggcactgagcctgagtctttccacaaggtgctcaagggtctttatgagaagggcagaaagatggactggaaggtgcctgagcctgagggccaaacaagtcccaagaatgcagctgtcttctcctcagtgctggcgctctgactacccttcccaaagaaccacggccctctccctttactgttctatagccccagaactgggagatggcttcctaagttggctataccttgtccacttccagtactggacgtgctcagggtctagggtcacagatggtgctattaattgaactggaacacagcagaattgttgcaaaggttctaggagccagattcattccttcttcattctttgcaaaacagtggtacagacatggagtctagaattgacccagatggaaagtaattggtattcttaatatcctgggtgactaatatccaggcagagaagctcctggaaccataactgtaagttcctagctggctagggattgaagtcctggacagtgacagaggataccacagtagttcaagacttagcacaagtcaccaactgcttcagggatacctggaggggccagcaagtagagtgttggtggcccaagcaaaccagtgttgccaataccattgccaaaagggcctttggatcctggacaaagcttggctgccggcttcatttattcctgctgatggctgagaagcatctgtcttccatcccacttgcctgtcccaagttttgttccattttttaaaaatttgttgtaaactgcatgttttataaaataaaaataaaatatcgtttgttatttatctcattagaga

SEQ ID NO: 419284 - DNA, 4479 bp, Homo sapiens
gttgagccctaggcgtgggggagaactggggaaactggaatttcccgcggagctgacagcgcttgcgctccccctactcgttctaattccacgcgctccaaaatatccgccatggagaaatcttggccaggatgtccattctaggcccatcggtgctgtcttgctgaaggttgggtcaggcatctaaagggactgtggtaagggagggtgtgacacaggtgtaagctgccatcgtcatcatgaactttgagggtctggaccctggactggcagaatatgccccagccatgcattctgccctggaccctgtcttggatgcccacctgaacccaagtctgctacagaatgtggagctggacccagagggagtggccttggaggctcttcccgtccaggaatcagtgcacataatggaaggtgtctactctgaattgcacagcgtggtggctgaagtgggtgtacctgtttccgtctcccactttgacttgcacgaggagatgctgtgggtggggagccacgggggccatgccacttcattttttggcccagccttggagcgctactcatcctttcaagtcaatggcagtgatgatattcggcagatccagagcctggagaatggtatcctttttctcaccaagaacaacctcaagtatatggcccgtgggggcctcattatatttgattacctgctggatgagaatgaggatatgcacagtctcctactgactgacagcagcactctactcgttggtgggctgcagaatcacatactagagattgatcttaacactgtccaggagactcagaagtatgcagtagagacgcctggagtcaccatcatgagacagacaaatcgcttcttcttctgcggccacacgtctggcaaggtttccctgagagacctccgtacttttaaggtggaacatgagtttgatgccttctcaggaagtctgtcagactttgatgtgcatggcaacctgctagctgcctgtggcttctccagccgcctcactggcctggcctgcgaccgtttcctcaaggtgtatgatttgcgcatgatgcgtgccatcacaccacttcaagtacatgtggatcctgccttcttgcgcttcattcctacatatacttctcgtcttgctatcatctctcagtcagggcagtgccaattctgtgaacccacaggcctggccaacccagccgatatctttcatgtgaatcctgtggggcctctgctaatgacatttgatgtgtcagccagcaagcaggctctggcctttggggattctgagggctgtgtgcacctctggactgattccccggagccttccttcaacccctactcccgtgagactgagtttgctttgccgtgtctcgtggactcactgcctcctctggactggagccaggacctgctgcctctttccctcatccctgtcccactcaccactgacacacttctctctgattggcctgctgccaactctgctccagctcccaggcgagcaccacccgtggatgcagagattctgcgcaccatgaagaaggtgggcttcattggctatgcgcccaatccccgcaccaggctgcgcaatcagataccctacagactcaaggagtcagacagtgaatttgacagcttcagccaggtcactgagtcaccagtaggacgagaagaggaaccacatctccacatggtttctaagaaataccgcaaggtgaccatcaaatattccaagctagggctggaggactttgacttcaaacactacaataagaccttgtttgctggattagagccccacattcccaacgcctactgtaactgcatgatccaggtgctctatttcctggagcctgtacgctgtctaattcaaaaccacctttgccagaaggagttctgtctggcatgtgagctgggcttcctgtttcacatgttggacctctctcgtggtgacccttgccagggcaataattttcttcgggcattccgtactattcctgaggcctcagccctcggtctaatcctggctgactcagatgaggcctcaggcaagggcaatctggccaggctcattcagaggtggaatcgcttcattctcactcaactgcatcaagatatgcaggagctggaaataccacaggcttatcgaggtgctggaggcagcagcttttgctcatcgggggactctgttattgggcagctcttcagctgtgagatggagaactgcagcctctgccgctgtggcagtgagaccgtgcgagcctcatccactctgcttttcacactctcctaccctgatggtagcaaatgataaaactgggaagaactatgactttgctcaggtgctgaagcgaagcatctgcctggaccagaatacacaggcctggtgtgacacctgtgaaaagtaccagcccacgattcagacccgcaacatccgccatctgccagatattcttgtcatcaattgtgaggtgaacagctcaaaagaggctgatttctggagaatgcaggctgaggttgccttcaagatggcagtaaagaaacacggtggggaaatctccaagaacaaggaatttgctttggctgattggaaggaactagggagtccagagggtgtgctggtgtgtccctccattgaggagttgaagaacgtctggcttcctttctccattcgcatgaagatgaccaaaaacaaagggctggatgtttgcaattggactgatggggatgagatgcagtggggcccagccagggcagaggaggagcatggtgtctatgtgtatgacctgatggctactgtggtacacatcctggactcacgcacagggggcagcctggtggctcacatcaaagttggagagacctaccaccagcgcaaggagggcgttactcaccagcagtggtatctgttcaatgactttcttattgaacctattgataagcatgaagctgtgcagtttgacatgaattggaaagtacctgcaatcctttattatgtcaaacggaatctcaattccagatacaacctgaacatcaagaaccctattgaggcaagtgtcttgctggctgaagcctcgctggcacggaagcagcggaaaacacatactacctttattccactgatgctgaatgagatgccacagattggggacctggtgggtctggatgctgagtttgtcacccttaatgaggaggaagcagagttacgcagtgatggtaccaagtctaccattaaaccaagccagatgtcagtagccaggattacctgtgttcggggccagggacccaatgagggtatccccttcattgatgactacatctctacccaggagcaggtggtggattacttgactcaatactcgggtataaagcctggtgacctcgatgccaaaatttcctccaagcacctaacaactctcaagtctacctacttaaagcttcgttttctcattgacattggagtcaagtttgtgggtcatggcctgcagaaggacttccgggtcatcaacctgatggtgcccaaggaccaagtccttgacactgtctacctgttccatatgccacctgaagattcaaggggaaacccatgacagtattgaggatgcccgcacagcccttcagctgtaccgaaagtatctggagctaagcaaaaatggcactgagcctgagtctttccacaaggtgctcaagggtctttatgagaagggcagaaagatggactggaaggtgcctgagcctgagggccaaacaagtcccaagaatgcagctgtcttctcctcagtgctggcgctctgactacccttcccaaagaaccacggccctctccctttactgttctatagccccagaactgggagatggcttcctaagttggctataccttgtccacttccagtactggacgtgctcagggtctagggtcacagatggtgctattaattgaactggaacacagcagaattgttgcaaaggttctaggagccagattcattccttcttcattctttgcaaaacagtggtacagacatggagtctagaattgacccagatggaaagtaattggtattcttaatatcctgggtgactaatatccaggcagagaagctcctggaaccataactgtaagttcctagctggctagggattgaagtcctggacagtgacagaggataccacagtagttcaagacttagcacaagtcaccaactgcttcagggatacctggaggggccagcaagtagagtgttggtggcccaagcaaaccagtgttgccaataccattgccaaaagggcctttggatcctggacaaagcttggctgccggcttcatttattcctgctgatggctgagaagcatctgtcttccatcccacttgcctgtcccaagttttgttccattttttaaaaatttgttgtaaactgcatgttttataaaataaaaataaaatatcgtttgttatttatctcattagaga

SEQ ID NO: 419285 - DNA, 4472 bp, Homo sapiens
gttgagccctaggcgtgggggagaactggggaaactggaatttcccgcggagctgacagcgcttgcgctccccctactcgttctaattccacgcgctccaaaatatccgccatggagaaatcttggccaggatgtccattctaggcccatcggtgctgtcttgctgaaggttgggtcaggcatctaaagggactgtggtaagggagggtgtgacacaggtgtaagctgccatcgtcatcatgaactttgagggtctggaccctggactggcagaatatgccccagccatgcattctgccctggaccctgtcttggatgcccacctgaacccaagtctgctacagaatgtggagctggacccagagggagtggccttggaggctcttcccgtccaggaatcagtgcacataatggaaggtgtctactctgaattgcacagcgtggtggctgaagtgggtgtacctgtttccgtctcccactttgacttgcacgaggagatgctgtgggtggggagccacgggggccatgccacttcattttttggcccagccttggagcgctactcatcctttcaagtcaatggcagtgatgatattcggcagatccagagcctggagaatggtatcctttttctcaccaagaacaacctcaagtatatggcccgtgggggcctcattatatttgattacctgctggatgagaatgaggatatgcacagtctcctactgactgacagcagcactctactcgttggtgggctgcagaatcacatactagagattgatcttaacactgtccaggagactcagaagtatgcagtagagacgcctggagtcaccatcatgagacagacaaatcgcttcttcttctgcggccacacgtctggcaaggtttccctgagagacctccgtacttttaaggtggaacatgagtttgatgccttctcaggaagtctgtcagactttgatgtgcatggcaacctgctagctgcctgtggcttctccagccgcctcactggcctggcctgcgaccgtttcctcaaggtgtatgatttgcgcatgatgcgtgccatcacaccacttcaagtacatgtggatcctgccttcttgcgcttcattcctacatatacttctcgtcttgctatcatctctcagtcagggcagtgccaattctgtgaacccacaggcctggccaacccagccgatatctttcatgtgaatcctgtggggcctctgctaatgacatttgatgtgtcagccagcaagcaggctctggcctttggggattctgagggctgtgtgcacctctggactgattccccggagccttccttcaacccctactcccgtgagactgagtttgctttgccgtgtctcgtggactcactgcctcctctggactggagccaggacctgctgcctctttccctcatccctgtcccactcaccactgacacacttctctctgattggcctgctgccaactctgctccagctcccaggcgagcaccacccgtggatgcagagattctgcgcaccatgaagaaggtgggcttcattggctatgcgcccaatccccgcaccaggctgcgcaatcagataccctacagactcaaggagtcagacagtgaatttgacagcttcagccaggtcactgagtcaccagtaggacgagaagaggaaccacatctccacatggtttctaagaaataccgcaaggtgaccatcaaatattccaagctagggctggaggactttgacttcaaacactacaataagaccttgtttgctggattagagccccacattcccaacgcctactgtaactgcatgatccaggtgctctatttcctggagcctgtacgctgtctaattcaaaaccacctttgccagaaggagttctgtctggcatgtgagctgggcttcctgtttcacatgttggacctctctcgtggtgacccttgccagggcaataattttcttcgggcattccgtactattcctgaggcctcagccctcggtctaatcctggctgactcagatgaggcctcaggcaagggcaatctggccaggctcattcagaggtggaatcgcttcattctcactcaactgcatcaagatatgcaggagctggaaataccacaggcttatcgaggtgctggaggcagcagcttttgctcatcgggggactctgttattgggcagctcttcagctgtgagatggagaactgcagcctctgccgctgtggcagtgagaccgtgcgagcctcatccactctgcttttcacactctcctaccctgatggtagcaaatgataaaactgggaagaactatgactttgctcaggtgctgaagcgaagcatctgcctggaccagaatacacaggcctggtgtgacacctgtgaaaagtaccagcccacgattcagacccgcaacatccgccatctgccagatattcttgtcatcaattgtgaggtgaacagctcaaaagaggctgatttctggagaatgcaggctgaggttgccttcaagatggcagtaaagaaacacggtggggaaatctccaagaacaaggaatttgctttggctgattggaaggaactagggagtccagagggtgtgctggtgtgtccctccattgaggagttgaagaacgtctggcttcctttctccattcgcatgaagatgaccaaaaacaaagggctggatgtttgcaattggactgatggggatgagatgcagtggggcccagccagggcagaggaggagcatggtgtctatgtgtatgacctgatggctactgtggtacacatcctggactcacgcacagggggcagcctggtggctcacatcaaagttggagagacctaccaccagcgcaaggagggcgttactcaccagcagtggtatctgttcaatgactttcttattgaacctattgataagcatgaagctgtgcagtttgacatgaattggaaagtacctgcaatcctttattatgtcaaacggaatctcaattccagatacaacctgaacatcaagaaccctattgaggcaagtgtcttgctggctgaagcctcgctggcacggaagcagcggaaaacacatactacctttattccactgatgctgaatgagatgccacagattggggacctggtgggtctggatgctgagtttgtcacccttaatgaggaggaagcagagttacgcagtgatggtaccaagtctaccattaaaccaagccagatgtcagtagccaggattacctgtgttcggggccagggacccaatgagggtatccccttcattgatgactacatctctacccaggagcaggtggtggattacttgactcaatactcgggtataaagcctggtgacctcgatgccaaaatttcctccaagcacctaacaactctcaagtctacctacttaaagcttcgttttctcattgacattggagtcaagtttgtgggtcatggcctgcagaaggacttccgggtcatcaacctgatggtgcccaaggaccaagtccttgacactgtctacctgttccatatgccccgaaaacgaatgatttccctgcgattccttgcttggtactttctggacctgaagattcaaggggaaacccatgacagtattgaggatgcccgcacagcccttcagctgtaccgaaagtatctggagctaagcaagggcagaaagatggactggaaggtgcctgagcctgagggccaaacaagtcccaagaatgcagctgtcttctcctcagtgctggcgctctgactacccttcccaaagaaccacggccctctccctttactgttctatagccccagaactgggagatggcttcctaagttggctataccttgtccacttccagtactggacgtgctcagggtctagggtcacagatggtgctattaattgaactggaacacagcagaattgttgcaaaggttctaggagccagattcattccttcttcattctttgcaaaacagtggtacagacatggagtctagaattgacccagatggaaagtaattggtattcttaatatcctgggtgactaatatccaggcagagaagctcctggaaccataactgtaagttcctagctggctagggattgaagtcctggacagtgacagaggataccacagtagttcaagacttagcacaagtcaccaactgcttcagggatacctggaggggccagcaagtagagtgttggtggcccaagcaaaccagtgttgccaataccattgccaaaagggcctttggatcctggacaaagcttggctgccggcttcatttattcctgctgatggctgagaagcatctgtcttccatcccacttgcctgtcccaagttttgttccattttttaaaaatttgttgtaaactgcatgttttataaaataaaaataaaatatcgtttgttatttatctcattagaga

SEQ ID NO: 419286 - DNA, 1501 bp, Homo sapiens
ccgatgaagatgccgttttcgccgctcgagcgctccgcaaccaagaggaagcagagttacgcagtgatggtaccaagtctaccattaaaccaagccagatgtcagtagccaggattacctgtgttcggggccagggacccaatgagggtatccccttcattgatgactacatctctacccaggagcaggtggtggattacttgactcaatactcgggtataaagcctggtgacctcgatgccaaaatttcctccaagcacctaacaactctcaagtctacctacttaaagcttcgttttctcattgacattggagtcaagtttgtgggtcatggcctgcagaaggacttccgggtcatcaacctgatggtttggcagggctcttttaagagtcttcttgtgagagtgggcccctcagggtatacattgtgcctttagagaatggggaattataggtcccctaccttaagtctccccctcttttatccttgccaggtgcccaaggaccaagtccttgacactgtctacctgttccatatgccccgaaaacgaatgatttccctgcgattccttgcttggtactttctggacctgaagattcaaggggaaacccatgacagtattgaggatgcccgcacagcccttcagctgtaccgaaagtatctggagctaagcaaaaatggcactgagcctgagtctttccacaaggtgctcaagggtctttatgagaagggcagaaagatggactggaaggtgcctgagcctgagggccaaacaagtcccaagaatgcagctgtcttctcctcagtgctggcgctctgactacccttcccaaagaaccacggccctctccctttactgttctatagccccagaactgggagatggcttcctaagttggctataccttgtccacttccagtactggacgtgctcagggtctagggtcacagatggtgctattaattgaactggaacacagcagaattgttgcaaaggttctaggagccagattcattccttcttcattctttgcaaaacagtggtacagacatggagtctagaattgacccagatggaaagtaattggtattcttaatatcctgggtgactaatatccaggcagagaagctcctggaaccataactgtaagttcctagctggctagggattgaagtcctggacagtgacagaggataccacagtagttcaagacttagcacaagtcaccaactgcttcagggatacctggaggggccagcaagtagagtgttggtggcccaagcaaaccagtgttgccaataccattgccaaaagggcctttggatcctggacaaagcttggctgccggcttcatttattcctgctgatggctgagaagcatctgtcttccatcccacttgcctgtcccaagttttgttccattttttaaaaatttgttgtaaactgcatgttttataaaataaaaataaaatatcgtttgttatttatctcattagaga

SEQ ID NO: 419287 - DNA, 1154 bp, Homo sapiens
aaaaagtaggaaaagtgttagaggacaaaatgggagtaggggagaccctcagttagtggtgacagttactaatggatttaattaacttcaatatcccttctgtgcactgaggaagatgtctgacaattttccttaagggcagtcaggctttttagttttctggagtcaggtaggagtggggagacatgttcctacctccctttgctgggtcccaaactattccacctttacttaccccagaacctgaagattcaaggggaaacccatgacagtattgaggatgcccgcacagcccttcagctgtaccgaaagtatctggagctaagcaaaaatggcactgagcctgagtctttccacaaggtgctcaagggtctttatgagaagggcagaaagatggactggaaggtgcctgagcctgagggccaaacaagtcccaagaatgcagctgtcttctcctcagtgctggcgctctgactacccttcccaaagaaccacggccctctccctttactgttctatagccccagaactgggagatggcttcctaagttggctataccttgtccacttccagtactggacgtgctcagggtctagggtcacagatggtgctattaattgaactggaacacagcagaattgttgcaaaggttctaggagccagattcattccttcttcattctttgcaaaacagtggtacagacatggagtctagaattgacccagatggaaagtaattggtattcttaatatcctgggtgactaatatccaggcagagaagctcctggaaccataactgtaagttcctagctggctagggattgaagtcctggacagtgacagaggataccacagtagttcaagacttagcacaagtcaccaactgcttcagggatacctggaggggccagcaagtagagtgttggtggcccaagcaaaccagtgttgccaataccattgccaaaagggcctttggatcctggacaaagcttggctgccggcttcatttattcctgctgatggctgagaagcatctgtcttccatcccacttgcctgtcccaagttttgttccattttttaaaaatttgttgtaaactgcatgttttataaaataaaaataaaatatcgtttgttatttatctcattagaga

SEQ ID NO: 419288 - DNA, 4597 bp, Homo sapiens
gttgagccctaggcgtgggggagaactggggaaactggaatttcccgcggagctgacagcgcttgcgctccccctactcgttctaattccacgcgctccaaaatatccgccatggagaaatcttggccaggatgtccattctaggcccatcggtgctgtcttgctgaaggttgggtcaggcatctaaagggactgtggtaagggagggtgtgacacaggtgtaagctgccatcgtcatcatgaactttgagggtctggaccctggactggcagaatatgccccagccatgcattctgccctggaccctgtcttggatgcccacctgaacccaagtctgctacagaatgtggagctggacccagagggagtggccttggaggctcttcccgtccaggaatcagtgcacataatggaaggtgtctactctgaattgcacagcgtggtggctgaagtgggtgtacctgtttccgtctcccactttgacttgcacgaggagatgctgtgggtggggagccacgggggccatgccacttcattttttggcccagccttggagcgctactcatcctttcaagtcaatggcagtgatgatattcggcagatccagagcctggagaatggtatcctttttctcaccaagaacaacctcaagtatatggcccgtgggggcctcattatatttgattacctgctggatgagaatgaggatatgcacagtctcctactgactgacagcagcactctactcgttggtgggctgcagaatcacatactagagattgatcttaacactgtccaggagactcagaagtatgcagtagagacgcctggagtcaccatcatgagacagacaaatcgcttcttcttctgcggccacacgtctggcaaggtttccctgagagacctccgtacttttaaggtggaacatgagtttgatgccttctcaggaagtctgtcagactttgatgtgcatggcaacctgctagctgcctgtggcttctccagccgcctcactggcctggcctgcgaccgtttcctcaaggtgtatgatttgcgcatgatgcgtgccatcacaccacttcaagtacatgtggatcctgccttcttgcgcttcattcctacatatacttctcgtcttgctatcatctctcagtcagggcagtgccaattctgtgaacccacaggcctggccaacccagccgatatctttcatgtgaatcctgtggggcctctgctaatgacatttgatgtgtcagccagcaagcaggctctggcctttggggattctgagggctgtgtgcacctctggactgattccccggagccttccttcaacccctactcccgtgagactgagtttgctttgccgtgtctcgtggactcactgcctcctctggactggagccaggacctgctgcctctttccctcatccctgtcccactcaccactgacacacttctctctgattggcctgctgccaactctgctccagctcccaggcgagcaccacccgtggatgcagagattctgcgcaccatgaagaaggtgggcttcattggctatgcgcccaatccccgcaccaggctgcgcaatcagataccctacagactcaaggagtcagacagtgaatttgacagcttcagccaggtcactgagtcaccagtaggacgagaagaggaaccacatctccacatggtttctaagaaataccgcaaggtgaccatcaaatattccaagctagggctggaggactttgacttcaaacactacaataagaccttgtttgctggattagagccccacattcccaacgcctactgtaactgcatgatccaggtgctctatttcctggagcctgtacgctgtctaattcaaaaccacctttgccagaaggagttctgtctggcatgtgagctgggcttcctgtttcacatgttggacctctctcgtggtgacccttgccagggcaataattttcttcgggcattccgtactattcctgaggcctcagccctcggtctaatcctggctgactcagatgaggcctcaggcaagggcaatctggccaggctcattcagaggtggaatcgcttcattctcactcaactgcatcaagatatgcaggagctggaaataccacaggcttatcgaggtgctggaggcagcagcttttgctcatcgggggactctgttattgggcagctcttcagctgtgagatggagaactgcagcctctgccgctgtggcagtgagaccgtgcgagcctcatccactctgcttttcacactctcctaccctgatggtagcaaatgataaaactgggaagaactatgactttgctcaggtgctgaagcgaagcatctgcctggaccagaatacacaggcctggtgtgacacctgtgaaaagtaccagcccacgattcagacccgcaacatccgccatctgccagatattcttgtcatcaattgtgaggtgaacagctcaaaagaggctgatttctggagaatgcaggctgaggttgccttcaagatggcagtaaagaaacacggtggggaaatctccaagaacaaggaatttgctttggctgattggaaggaactagggagtccagagggtgtgctggtgtgtccctccattgaggagttgaagaacgtctggcttcctttctccattcgcatgaagatgaccaaaaacaaagggctggatgtttgcaattggactgatggggatgagatgcagtggggcccagccagggcagaggaggagcatggtgtctatgtgtatgacctgatggctactgtggtacacatcctggactcacgcacagggggcagcctggtggctcacatcaaagttggagagacctaccaccagcgcaaggagggcgttactcaccagcagtggtatctgttcaatgactttcttattgaacctattgataagcatgaagctgtgcagtttgacatgaattggaaagtacctgcaatcctttattatgtcaaacggaatctcaattccagatacaacctgaacatcaagaaccctattgaggcaagtgtcttgctggctgaagcctcgctggcacggaagcagcggaaaacacatactacctttattccactgatgctgaatgagatgccacagattggggacctggtgggtctggatgctgagtttgtcacccttaatgaggaggaagcagagttacgcagtgatggtaccaagtctaccattaaaccaagccagatgtcagtagccaggattacctgtgttcggggccagggacccaatgagggtatccccttcattgatgactacatctctacccaggagcaggtggtggattacttgactcaatactcgggtataaagcctggtgacctcgatgccaaaatttcctccaagcacctaacaactctcaagtctacctacttaaagcttcgttttctcattgacattggagtcaagtttgtgggtcatggcctgcagaaggacttccgggtcatcaacctgatggtgcccaaggaccaagtccttgacactgtctacctgttccatatgccccgaaaacgaatgatttccctgcgattccttgcttggtactttctggacctgaagattcaaggggaaacccatgacagtattgaggatgcccgcacagcccttcagctgtaccgaaagtatctggagctaagcaaaaatggcactgagcctgagtctttccacaaggtgctcaagggtctttatgagaagggcagaaagatggactggaaggtgcctgagcctgagggccaaacaagtcccaagaatgcagctgtcttctcctcagtgctggcgctctgactacccttcccaaagaaccacggccctctccctttactgttctatagccccagaactgggagatggcttcctaagttggctataccttgtccacttccagtactggacgtgctcagggtctagggtcacagatggtgctattaattgaactggaacacagcagaattgttgcaaaggttctaggagccagattcattccttcttcattctttgcaaaacagtggtacagacatggagtctagaattgacccagatggaaagtaattggtattcttaatatcctgggtgactaatatccaggcagagaagctcctggaaccataactgtaagttcctagctggctagggattgaagtcctggacagtgacagaggataccacagtagttcaagacttagcacaagtcaccaactgcttcagggatacctggaggggccagcaagtagagtgttggtggcccaagcaaaccagtgttgccaataccattgccaaaagggcctttggatcctggacaaagcttggctgccggcttcatttattcctgctgatggctgagaagcatctgtcttccatcccacttgcctgtcccaagttttgttccattttttaaaaatttgttgtaaactgcatgttttataaaataaaaataaaatatcgtttgttatttatctcattagagaactgctagtgtgggttctctggcttcagtcttcctctccttcctttgaaggtaaaggtccggaatccaaag

SEQ ID NO: 419289 - DNA, 3691 bp, Homo sapiens
gttgagccctaggcgtgggggagaactggggaaactggaatttcccgcggagctgacagcgcttgcgctccccctactcgttctaattccacgcgctccaaaatatccgccatggagaaatcttggccaggatgtccattctaggcccatcggtgctgtcttgctgaaggttgggtcaggcatctaaagggactgtggtaagggagggtgtgacacaggtgtaagctgccatcgtcatcatgaactttgagggtctggaccctggactggcagaatatgccccagccatgcattctgccctggaccctgtcttggatgcccacctgaacccaagtctgctacagaatgtggagctggacccagagggagtggccttggaggctcttcccgtccaggaatcagtgcacataatggaaggtgtctactctgaattgcacagcgtggtggctgaagtgggtgtacctgtttccgtctcccactttgacttgcacgaggagatgctgtgggtggggagccacgggggccatgccacttcattttttggcccagccttggagcgctactcatcctttcaagtcaatggcagtgatgatattcggcagatccagagcctggagaatggtatcctttttctcaccaagaacaacctcaagtatatggcccgtgggggcctcattatatttgattacctgctggatgagaatgaggatatgcacagtctcctactgactgacagcagcactctactcgttggtgggctgcagaatcacatactagagattgatcttaacactgtccaggagactcagaagtatgcagtagagacgcctggagtcaccatcatgagacagacaaatcgcttcttcttctgcggccacacgtctggcaaggtttccctgagagacctccgtacttttaaggtggaacatgagtttgatgccttctcaggaagtctgtcagactttgatgtgcatggcaacctgctagctgcctgtggcttctccagccgcctcactggcctggcctgcgaccgtttcctcaaggtgtatgatttgcgcatgatgcgtgccatcacaccacttcaagtacatgtggatcctgccttcttgcgcttcattcctacatatacttctcgtcttgctatcatctctcagtcagggcagtgccaattctgtgaacccacaggcctggccaacccagccgatatctttcatgtgaatcctgtggggcctctgctaatgacatttgatgtgtcagccagcaagcaggctctggcctttggggattctgagggctgtgtgcacctctggactgattccccggagccttccttcaacccctactcccgtgagactgagtttgctttgccgtgtctcgtggactcactgcctcctctggactggagccaggacctgctgcctctttccctcatccctgtcccactcaccactgacacacttctctctgattggcctgctgccaactctgctccagctcccaggcgagcaccacccgtggatgcagagattctgcgcaccatgaagaaggtgggcttcattggctatgcgcccaatccccgcaccaggctgcgcaatcagataccctacagactcaaggagtcagacagtgaatttgacagcttcagccaggtcactgagtcaccagtaggacgagaagaggaaccacatctccacatggtttctaagaaataccgcaaggtgaccatcaaatattccaagctagggctggaggactttgacttcaaacactacaataagaccttgtttgctggattagagccccacattcccaacgcctactgtaactgcatgatccaggtgctctatttcctggagcctgtacgctgtctaattcaaaaccacctttgccagaaggagttctgtctggcatgtgagctgggcttcctgtttcacatgttggacctctctcgtggtgacccttgccagggcaataattttcttcgggcattccgtactattcctgaggcctcagccctcggtctaatcctggctgactcagatgaggcctcaggcaagggcaatctggccaggctcattcagaggtggaatcgcttcattctcactcaactgcatcaagatatgcaggagctggaaataccacaggcttatcgaggtgctggaggcagcagcttttgctcatcgggggactctgttattgggcagctcttcagctgtgagatggagaactgcagcctctgccgctgtggcagtgagaccgtgcgagcctcatccactctgcttttcacactctcctaccctgatggtagcaaatgataaaactgggaagaactatgactttgctcaggtgctgaagcgaagcatctgcctggaccagaatacacaggcctggtgtgacacctgtgaaaagtaccagcccacgattcagacccgcaacatccgccatctgccagatattcttgtcatcaattgtgaggtgaacagctcaaaagaggctgatttctggagaatgcaggctgaggttgccttcaagatggcagtaaagaaacacggtggggaaatctccaagaacaaggaatttgctttggctgattggaaggaactagggagtccagagggtgtgctggtgtgtccctccattgaggagttgaagaacgtctggcttcctttctccattcgcatgaagatgaccaaaaacaaagggctggatgtttgcaattggactgatggggatgagatgcagtggggcccagccagggcagaggaggagcatggtgtctatgtgtatgacctgatggctactgtggtacacatcctggactcacgcacagggggcagcctggtggctcacatcaaagttggagagacctaccaccagcgcaaggagggcgttactcaccagcagtggtatctgttcaatgactttcttattgaacctattgataagcatgaagctgtgcagtttgacatgaattggaaagtacctgcaatcctttattatgtcaaacggaatctcaattccagatacaacctgaacatcaagaaccctattgaggcaagtgtcttgctggctgaagcctcgctggcacggaagcagcggaaaacacatactacctttattccactgatgctgaatgagatgccacagattggggacctggtgggtctggatgctgagtttgtcacccttaatgaggaggaagcagagttacgcagtgatggtaccaagtctaccattaaaccaagccagatgtcagtagccaggattacctgtgttcggggccagggacccaatgagggtatccccttcattgatgactacatctctacccaggagcaggtggtggattacttgactcaatactcgggtataaagcctggtgacctcgatgccaaaatttcctccaagcacctaacaactctcaagtctacctacttaaagcttcgttttctcattgacattggagtcaagtttgtgggtcatggcctgcagaaggacttccgggtcatcaacctgatggcccaatgtaccaagccttgacactgactacccgttccatatgccccgaagacgactgattaccgtgcgattgcttgcttcgtactttctggacctgtagattcaacgtggaacccatgacaggattggcgatgctcgcacagaccttaacttgacccaatgtattgggctc

SEQ ID NO: 419290 - DNA, 2768 bp, Homo sapiens
gttgagccctaggcgtgggggagaactggggaaactggaatttcccgcggagctgacagcgcttgcgctccccctactcgttctaattccacgcgctccaaaatatccgccatggagaaatcttggccaggatgtccattctaggcccatcggtgctgtcttgctgaaggttgggtcaggcatctaaagggactgtggtaagggagggtgtgacacaggtgtaagctgccatcgtcatcatgaactttgagggtctggaccctggactggcagaatatgccccagccatgcattctgccctggaccctgtcttggatgcccacctgaacccaagtctgctacagaatgtggagctggacccagagggagtggccttggaggctcttcccgtccaggaatcagtgcacataatggaaggtgtctactctgaattgcacagcgtggtggctgaagtgggtgtacctgtttccgtctcccactttgacttgcacgaggagatgctgtgggtggggagccacgggggccatgccacttcattttttggcccagccttggagcgctactcatcctttcaagtcaatggcagtgatgatattcggcagatccagagcctggagaatggtatcctttttctcaccaagaacaacctcaagtatatggcccgtgggggcctcattatatttgattacctgctggatgagaatgaggatatgcacagtctcctactgactgacagcagcactctactcgttggtgggctgcagaatcacatactagagattgatcttaacactgtccaggagactcagaagtatgcagtagagacgcctggagtcaccatcatgagacagacaaatcgcttcttcttctgcggccacacgtctggcaaggtttccctgagagacctccgtacttttaaggtggaacatgagtttgatgccttctcaggaagtctgtcagactttgatgtgcatggcaacctgctagctgcctgtggcttctccagccgcctcactggcctggcctgcgaccgtttcctcaaggtgtatgatttgcgcatgatgcgtgccatcacaccacttcaagtacatgtggatcctgccttcttgcgcttcattcctacatatacttctcgtcttgctatcatctctcagtcagggcagtgccaattctgtgaacccacaggcctggccaacccagccgatatctttcatgtgaatcctgtggggcctctgctaatgacatttgatgtgtcagccagcaagcaggctctggcctttggggattctgagggctgtgtgcacctctggactgattccccggagccttccttcaacccctactcccgtgagactgagtttgctttgccgtgtctcgtggactcactgcctcctctggactggagccaggacctgctgcctctttccctcatccctgtcccactcaccactgacacacttctctctgattggcctgctgccaactctgctccagctcccaggcgagcaccacccgtggatgcagagattctgcgcaccatgaagaaggtgggcttcattggctatgcgcccaatccccgcaccaggctgcgcaatcagataccctacagactcaaggagtcagacagtgaatttgacagcttcagccaggtcactgagtcaccagtaggacgagaagaggaaccacatctccacatggtttctaagaaataccgcaaggtgaccatcaaatattccaagctagggctggaggactttgacttcaaacactacaataagaccttgtttgctggattagagccccacattcccaacgcctactgtaactgcatgatccaggtgctctatttcctggagcctgtacgctgtctaattcaaaaccacctttgccagaaggagttctgtctggcatgtgagctgggcttcctgtttcacatgttggacctctctcgtggtgacccttgccagggcaataattttcttcgggcattccgtactattcctgaggcctcagccctcggtctaatcctggctgactcagatgaggcctcaggcaagggcaatctggccaggctcattcagaggtggaatcgcttcattctcactcaactgcatcaagatatgcaggagctggaaataccacaggcttatcgaggtgctggaggcagcagcttttgctcatcgggggactctgttattgggcagctcttcagctgtgagatggagaactgcagcctctgccgctgtggcagtgagaccgtgcgagcctcatccactctgcttttcacactctcctaccctgatggtagcaaatgataaaactgggaagaactatgactttgctcaggtgctgaagcgaagcatctgcctggaccagaatacacaggcctggtgtgacacctgtgaaaagtaccagcccacgattcagacccgcaacatccgccatctgccagatattcttgtcatcaattgtgaggtgaacagctcaaaagaggctgatttctggagaatgcaggctgaggttgccttcaagatggcagtaaagaaacacggtggggaaatctccaagaacaaggaatttgctttggctgattggaaggaactagggagtccagagggtgtgctggtgtgtccctccattgaggagttgaagaacgtctggcttcctttctccattcgcatgaagatgaccaaaaacaaagggctggatgtttgcaattggactgatggggatgagatgcagcgttttgggatcctctagatcacccg

SEQ ID NO: 419291 - DNA, 353 bp, Homo sapiens
cgcatcttcgtcccatcaggttcagtggaggtggattgtgacagaggataccacagtagttcaagacttagcacaagtcaccaactgcttcagggatacctggaggggccagcaagtagagtgttggtggcccaagcaaaccagtgttgccaataccattgccaaaagggcctttggatcctggacaaagcttggctgccggcttcatttattcctgctgatggctgagaagcatctgtcttccatcccacttgcctgtcccaagttttgttccattttttaaaaatttgttgtaaactgcatgttttataaaataaaaataaaatatcgtttgttatttatctcattagaga

SEQ ID NO: 419292 - DNA, 4526 bp, Homo sapiens
gttgagccctaggcgtgggggagaactggggaaactggaatttcccgcggagctgacagcgcttgcgctccccctactcgttctaattccacgcgctccaaaatatccgccatggagaaatcttggccaggatgtccattctaggcccatcggtgctgtcttgctgaaggttgggtcaggcatctaaagggactgtggtaagggagggtgtgacacaggtgtaagctgccatcgtcatcatgaactttgagggtctggaccctggactggcagaatatgccccagccatgcattctgccctggaccctgtcttggatgcccacctgaacccaagtctgctacagaatgtggagctggacccagagggagtggccttggaggctcttcccgtccaggaatcagtgcacataatggaaggtgtctactctgaattgcacagcgtggtggctgaagtgggtgtacctgtttccgtctcccactttgacttgcacgaggagatgctgtgggtggggagccacgggggccatgccacttcattttttggcccagccttggagcgctactcatcctttcaagtcaatggcagtgatgatattcggcagatccagagcctggagaatggtatcctttttctcaccaagaacaacctcaagtatatggcccgtgggggcctcattatatttgattacctgctggatgagaatgaggatatgcacagtctcctactgactgacagcagcactctactcgttggtgggctgcagaatcacatactagagattgatcttaacactgtccaggagactcagaagtatgcagtagagacgcctggagtcaccatcatgagacagacaaatcgcttcttcttctgcggccacacgtctggcaaggtttccctgagagacctccgtacttttaaggtggaacatgagtttgatgccttctcaggaagtctgtcagactttgatgtgcatggcaacctgctagctgcctgtggcttctccagccgcctcactggcctggcctgcgaccgtttcctcaaggtgtatgatttgcgcatgatgcgtgccatcacaccacttcaagtacatgtggatcctgccttcttgcgcttcattcctacatatacttctcgtcttgctatcatctctcagtcagggcagtgccaattctgtgaacccacaggcctggccaacccagccgatatctttcatgtgaatcctgtggggcctctgctaatgacatttgatgtgtcagccagcaagcaggctctggcctttggggattctgagggctgtgtgcacctctggactgattccccggagccttccttcaacccctactcccgtgagactgagtttgctttgccgtgtctcgtggactcactgcctcctctggactggagccaggacctgctgcctctttccctcatccctgtcccactcaccactgacacacttctctctgattggcctgctgccaactctgctccagctcccaggcgagcaccacccgtggatgcagagattctgcgcaccatgaagaaggtgggcttcattggctatgcgcccaatccccgcaccaggctgcgcaatcagataccctacagactcaaggagtcagacagtgaatttgacagcttcagccaggtcactgagtcaccagtaggacgagaagaggaaccacatctccacatggtttctaagaaataccgcaaggtgaccatcaaatattccaagctagggctggaggactttgacttcaaacactacaataagaccttgtttgctggattagagccccacattcccaacgcctactgtaactgcatgatccaggtgctctatttcctggagcctgtacgctgtctaattcaaaaccacctttgccagaaggagttctgtctggcatgtgagctgggcttcctgtttcacatgttggacctctctcgtggtgacccttgccagggcaataattttcttcgggcattccgtactattcctgaggcctcagccctcggtctaatcctggctgactcagatgaggcctcaggcaagggcaatctggccaggctcattcagaggtggaatcgcttcattctcactcaactgcatcaagatatgcaggagctggaaataccacaggcttatcgaggtgctggaggcagcagcttttgctcatcgggggactctgttattgggcagctcttcagctgtgagatggagaactgcagcctctgccgctgtggcagtgagaccgtgcgagcctcatccactctgcttttcacactctcctaccctgatggtagcaaatgataaaactgggaagaactatgactttgctcaggtgctgaagcgaagcatctgcctggaccagaatacacaggcctggtgtgacacctgtgaaaagtaccagcccacgattcagacccgcaacatccgccatctgccagatattcttgtcatcaattgtgaggtgaacagctcaaaagaggctgatttctggagaatgcaggctgaggttgccttcaagatggcagtaaagaaacacggtggggaaatctccaagaacaaggaatttgctttggctgattggaaggaactagggagtccagagggtgtgctggtgtgtccctccattgaggagttgaagaacgtctggcttcctttctccattcgcatgaagatgaccaaaaacaaagggctggatgtttgcaattggactgatggggatgagatgcagtggggcccagccagggcagaggaggagcatggtgtctatgtgtatgacctgatggctactgtggtacacatcctggactcacgcacagggggcagcctggtggctcacatcaaagttggagagacctaccaccagcgcaaggagggcgttactcaccagcagtggtatctgttcaatgactttcttattgaacctattgataagcatgaagctgtgcagtttgacatgaattggaaagtacctgcaatcctttattatgtcaaacggaatctcaattccagatacaacctgaacatcaagaaccctattgaggcaagtgtcttgctggctgaagcctcgctggcacggaagcagcggaaaacacatactacctttattccactgatgctgaatgagatgccacagattggggacctggtgggtctggatgctgagtttgtcacccttaatgaggaggaagcagagttacgcagtgatggtaccaagtctaccattaaaccaagccagatgtcagtagccaggattacctgtgttcggggccagggacccaatgagggtatccccttcattgatgactacatctctacccaggagcaggtggtggattacttgactcaatactcgggtataaagcctggtgacctcgatgccaaaatttcctccaagcacctaacaactctcaagtctacctacttaaagcttcgttttctcattgacattggagtcaagtttgtgggtcatggcctgcagaaggacttccgggtcatcaacctgatggtgcccaaggaccaagtccttgacactgtctacctgttccatatgccccgaaaacgaatgatttccctgcgattccttgcttggtactttctggacctgaagattcaaggggaaacccatgacagtattgaggatgcccgcacagcccttcagctgtaccgaaagtatctggagctaagcaaaaatggcactgagcctgagtctttccacaaggtgctcaagggtctttatgagaagggcagaaagatggactggaaggtgcctgagcctgagggccaaacaagtcccaagaatgcagctgtcttctcctcagtgctggcgctctgactacccttcccaaagaaccacggccctctccctttactgttctatagccccagaactgggagatggcttcctaagttggctataccttgtccacttccagtactggacgtgctcagggtctagggtcacagatggtgctattaattgaactggaacacagcagaattgttgcaaaggttctaggagccagattcattccttcttcattctttgcaaaacagtggtacagacatggagtctagaattgacccagatggaaagtaattggtattcttaatatcctgggtgactaatatccaggcagagaagctcctggaaccataactgtaagttcctagctggctagggattgaagtcctggacagtgacagaggataccacagtagttcaagacttagcacaagtcaccaactgcttcagggatacctggaggggccagcaagtagagtgttggtggcccaagcaaaccagtgttgccaataccattgccaaaagggcctttggatcctggacaaagcttggctgccggcttcatttattcctgctgatggctgagaagcatctgtcttccatcccacttgcctgtcccaagttttgttccattttttaaaaatttgttgtaaactgcatgttttataaaataaaaataaaatatcgtttgttatttatctcattagaga

SEQ ID NO: 419293 - DNA, 4560 bp, Homo sapiens
agagaattctgggtaactagccgtttccgtcaccttcccctgcccccgccccaattgtgggtaactggccattattgttttcctctagagaatcctgggtagctattggagaggattctaggaaactgacttctcgttctccccaccgtccaatccacccgttttcacccccaattctgggagaaagcaccttaaatccctctacctaactccaacccccgcaattctcgctcccttcacctgatgattcagggctgaacaaggccaggatgtccattctaggcccatcggtgctgtcttgctgaaggttgggtcaggcatctaaagggactgtggtaagggagggtgtgacacaggtgtaagctgccatcgtcatcatgaactttgagggtctggaccctggactggcagaatatgccccagccatgcattctgccctggaccctgtcttggatgcccacctgaacccaagtctgctacagaatgtggagctggacccagagggagtggccttggaggctcttcccgtccaggaatcagtgcacataatggaagggccatgccacttcattttttggcccagccttggagcgctactcatcctttcaagtcaatggcagtgatgatattcggcagatccagagcctggagaatggtatcctttttctcaccaagaacaacctcaagtatatggcccgtgggggcctcattatatttgattacctgctggatgagaatgaggatatgcacagtctcctactgactgacagcagcactctactcgttggtgggctgcagaatcacatactagagattgatcttaacactgtccaggagactcagaagtatgcagtagagacgcctggagtcaccatcatgagacagacaaatcgcttcttcttctgcggccacacgtctggcaaggtttccctgagagacctccgtacttttaaggtggaacatgagtttgatgccttctcaggaagtctgtcagactttgatgtgcatggcaacctgctagctgcctgtggcttctccagccgcctcactggcctggcctgcgaccgtttcctcaaggtgtatgatttgcgcatgatgcgtgccatcacaccacttcaagtacatgtggatcctgccttcttgcgcttcattcctacatatacttctcgtcttgctatcatctctcagtcagggcagtgccaattctgtgaacccacaggcctggccaacccagccgatatctttcatgtgaatcctgtggggcctctgctaatgacatttgatgtgtcagccagcaagcaggctctggcctttggggattctgagggctgtgtgcacctctggactgattccccggagccttccttcaacccctactcccgtgagactgagtttgctttgccgtgtctcgtggactcactgcctcctctggactggagccaggacctgctgcctctttccctcatccctgtcccactcaccactgacacacttctctctgattggcctgctgccaactctgctccagctcccaggcgagcaccacccgtggatgcagagattctgcgcaccatgaagaaggtgggcttcattggctatgcgcccaatccccgcaccaggctgcgcaatcagataccctacagactcaaggagtcagacagtgaatttgacagcttcagccaggtcactgagtcaccagtaggacgagaagaggaaccacatctccacatggtttctaagaaataccgcaaggtgaccatcaaatattccaagctagggctggaggactttgacttcaaacactacaataagaccttgtttgctggattagagccccacattcccaacgcctactgtaactgcatgatccaggtgctctatttcctggagcctgtacgctgtctaattcaaaaccacctttgccagaaggagttctgtctggcatgtgagctgggcttcctgtttcacatgttggacctctctcgtggtgacccttgccagggcaataattttcttcgggcattccgtactattcctgaggcctcagccctcggtctaatcctggctgactcagatgaggcctcaggcaagggcaatctggccaggctcattcagaggtggaatcgcttcattctcactcaactgcatcaagatatgcaggagctggaaataccacaggcttatcgaggtgctggaggcagcagcttttgctcatcgggggactctgttattgggcagctcttcagctgtgagatggagaactgcagcctctgccgctgtggcagtgagaccgtgcgagcctcatccactctgcttttcacactctcctaccctgatggtagcaaatgataaaactgggaagaactatgactttgctcaggtgctgaagcgaagcatctgcctggaccagaatacacaggcctggtgtgacacctgtgaaaagtaccagcccacgattcagacccgcaacatccgccatctgccagatattcttgtcatcaattgtgaggtgaacagctcaaaagaggctgatttctggagaatgcaggctgaggttgccttcaagatggcagtaaagaaacacggtggggaaatctccaagaacaaggaatttgctttggctgattggaaggaactagggagtccagagggtgtgctggtgtgtccctccattgaggagttgaagaacgtctggcttcctttctccattcgcatgaagatgaccaaaaacaaagggctggatgtttgcaattggactgatggggatgagatgcagtggggcccagccagggcagaggaggagcatggtgtctatgtgtatgacctgatggctactgtggtacacatcctggactcacgcacagggggcagcctggtggctcacatcaaagttggagagacctaccaccagcgcaaggagggcgttactcaccagcagtggtatctgttcaatgactttcttattgaacctattgataagcatgaagctgtgcagtttgacatgaattggaaagtacctgcaatcctttattatgtcaaacggaatctcaattccagatacaacctgaacatcaagaaccctattgaggcaagtgtcttgctggctgaagcctcgctggcacggaagcagcggaaaacacatactacctttattccactgatgctgaatgagatgccacagattggggacctggtgggtctggatgctgagtttgtcacccttaatgaggaggaagcagagttacgcagtgatggtaccaagtctaccattaaaccaagccagatgtcagtagccaggattacctgtgttcggggccagggacccaatgagggtatccccttcattgatgactacatctctacccaggagcaggtggtggattacttgactcaatactcgggtataaagcctggtgacctcgatgccaaaatttcctccaagcacctaacaactctcaagtctacctacttaaagcttcgttttctcattgacattggagtcaagtttgtgggtcatggcctgcagaaggacttccgggtcatcaacctgatggtgcccaaggaccaagtccttgacactgtctacctgttccatatgccccgaaaacgaatgatttccctgcgattccttgcttggtactttctggacctgaagattcaaggggaaacccatgacagtattgaggatgcccgcacagcccttcagctgtaccgaaagtatctggagctaagcaaaaatggcactgagcctgagtctttccacaaggtgctcaagggtctttatgagaagggcagaaagatggactggaaggtgcctgagcctgagggccaaacaagtcccaagaatgcagctgtcttctcctcagtgctggcgctctgactacccttcccaaagaaccacggccctctccctttactgttctatagccccagaactgggagatggcttcctaagttggctataccttgtccacttccagtactggacgtgctcagggtctagggtcacagatggtgctattaattgaactggaacacagcagaattgttgcaaaggttctaggagccagattcattccttcttcattctttgcaaaacagtggtacagacatggagtctagaattgacccagatggaaagtaattggtattcttaatatcctgggtgactaatatccaggcagagaagctcctggaaccataactgtaagttcctagctggctagggattgaagtcctggacagtgacagaggataccacagtagttcaagacttagcacaagtcaccaactgcttcagggatacctggaggggccagcaagtagagtgttggtggcccaagcaaaccagtgttgccaataccattgccaaaagggcctttggatcctggacaaagcttggctgccggcttcatttattcctgctgatggctgagaagcatctgtcttccatcccacttgcctgtcccaagttttgttccattttttaaaaatttgttgtaaactgcatgttttataaaataaaaataaaatatcgtttgttatttatctcattagaga

SEQ ID NO: 419294 - DNA, 4912 bp, Homo sapiens
gttgagccctaggcgtgggggagaactggggaaactggaatttcccgcggagctgacagcgcttgcgctccccctactcgttctaattccacgcgctccaaaatatccgccatggagaaatcttggccaggatgtccattctaggcccatcggtgctgtcttgctgaaggttgggtcaggcatctaaagggactgtggtaagggagggtgtgacacaggtgtaagctgccatcgtcatcatgaactttgagggtctggaccctggactggcagaatatgccccagccatgcattctgccctggaccctgtcttggatgcccacctgaacccaagtctgctacagaatgtggagctggacccagagggagtggccttggaggctcttcccgtccaggaatcagtgcacataatggaaggtgtctactctgaattgcacagcgtggtggctgaagtgggtgtacctgtttccgtctcccactttgacttgcacgaggagatgctgtgggtggggagccacgggggccatgccacttcattttttggcccagccttggagcgctactcatcctttcaagtcaatggcagtgatgatattcggcagatccagagcctggagaatggtatcctttttctcaccaagaacaacctcaagtatatggcccgtgggggcctcattatatttgattacctgctggatgagaatgaggatatgcacagtctcctactgactgacagcagcactctactcgttggtgggctgcagaatcacatactagagattgatcttaacactgtccaggagactcagaagtatgcagtagagacgcctggagtcaccatcatgagacagacaaatcgcttcttcttctgcggccacacgtctggcaaggtttccctgagagacctccgtacttttaaggtggaacatgagtttgatgccttctcaggaagtctgtcagactttgatgtgcatggcaacctgctagctgcctgtggcttctccagccgcctcactggcctggcctgcgaccgtttcctcaaggtgtatgatttgcgcatgatgcgtgccatcacaccacttcaagtacatgtggatcctgccttcttgcgcttcattcctacatatacttctcgtcttgctatcatctctcagtcagggcagtgccaattctgtgaacccacaggcctggccaacccagccgatatctttcatgtgaatcctgtggggcctctgctaatgacatttgatgtgtcagccagcaagcaggctctggcctttggggattctgagggctgtgtgcacctctggactgattccccggagccttccttcaacccctactcccgtgagactgagtttgctttgccgtgtctcgtggactcactgcctcctctggactggagccaggacctgctgcctctttccctcatccctgtcccactcaccactgacacacttctctctgattggcctgctgccaactctgctccagctcccaggcgagcaccacccgtggatgcagagattctgcgcaccatgaagaaggtgggcttcattggctatgcgcccaatccccgcaccaggctgcgcaatcagataccctacagactcaaggagtcagacagtgaatttgacagcttcagccaggtcactgagtcaccagtaggacgagaagaggaaccacatctccacatggtttctaagaaataccgcaaggtgaccatcaaatattccaagctagggctggaggactttgacttcaaacactacaataagaccttgtttgctggattagagccccacattcccaacgcctactgtaactgcatgatccaggtgctctatttcctggagcctgtacgctgtctaattcaaaaccacctttgccagaaggagttctgtctggcatgtgagctgggcttcctgtttcacatgttggacctctctcgtggtgacccttgccagggcaataattttcttcgggcattccgtactattcctgaggcctcagccctcggtctaatcctggctgactcagatgaggcctcaggcaagggcaatctggccaggctcattcagaggtggaatcgcttcattctcactcaactgcatcaagatatgcaggagctggaaataccacaggcttatcgaggtgctggaggcagcagcttttgctcatcgggggactctgttattgggcagctcttcagctgtgagatggagaactgcagcctctgccgctgtggcagtgagaccgtgcgagcctcatccactctgcttttcacactctcctaccctgatggtagcaaatgataaaactgggaagaactatgactttgctcaggtgctgaagcgaagcatctgcctggaccagaatacacaggcctggtgtgacacctgtgaaaagtaccagcccacgattcagacccgcaacatccgccatctgccagatattcttgtcatcaattgtgaggtgaacagctcaaaagaggctgatttctggagaatgcaggctgaggttgccttcaagatggcagtaaagaaacacggtggggaaatctccaagaacaaggaatttgctttggctgattggaaggaactagggagtccagagggtgtgctggtgtgtccctccattgaggagttgaagaacgtctggcttcctttctccattcgcatgaagatgaccaaaaacaaagggctggatgtttgcaattggactgatggggatgagatgcagtggggcccagccagggcagaggaggagcatggtgtctatgtgtatgacctgatggctactgtggtacacatcctggactcacgcacagggggcagcctggtggctcacatcaaagttggagagacctaccaccagcgcaaggaggtgagtgaggttgtagagggcaggaacactcctgggatggccacagtgagtcccagatctgtccttgagtctgagacagagtggtccagccatcaatttgtatcgccacaggctttctttgtatttccatagggcgttactcaccagcagtggtatctgttcaatgactttcttattgaacctattgataaggttagttgcaacatgttctgtttcttctttcatttccccttttcctagcatccttatctttagggctctatagaatgccaggcagattcaacagggagggaggaaggaatcctcaggaataaaaaccattagcacttaaaaatagcacctgaaaaaaaacaaaaactagcacctgagtcctggcctccgtctgaagtgggggaaaaggaaaagggtgatatacattagccataagtgctttttctcttctatagcatgaagctgtgcagtttgacatgaattggaaagtacctgcaatcctttattatgtcaaacggaatctcaattccagatacaacctgaacatcaagaaccctattgaggcaagtgtcttgctggctgaagcctcgctggcacggaagcagcggaaaacacatactacctttattccactgatgctgaatgagatgccacagattggggacctggtgggtctggatgctgagtttgtcacccttaatgaggaggaagcagagttacgcagtgatggtaccaagtctaccattaaaccaagccagatgtcagtagccaggattacctgtgttcggggccagggacccaatgagggtatccccttcattgatgactacatctctacccaggagcaggtggtggattacttgactcaatactcgggtataaagcctggtgacctcgatgccaaaatttcctccaagcacctaacaactctcaagtctacctacttaaagcttcgttttctcattgacattggagtcaagtttgtgggtcatggcctgcagaaggacttccgggtcatcaacctgatggtgcccaaggaccaagtccttgacactgtctacctgttccatatgccccgaaaacgaatgatttccctgcgattccttgcttggtactttctggacctgaagattcaaggggaaacccatgacagtattgaggatgcccgcacagcccttcagctgtaccgaaagtatctggagctaagcaaaaatggcactgagcctgagtctttccacaaggtgctcaagggtctttatgagaagggcagaaagatggactggaaggtgcctgagcctgagggccaaacaagtcccaagaatgcagctgtcttctcctcagtgctggcgctctgactacccttcccaaagaaccacggccctctccctttactgttctatagccccagaactgggagatggcttcctaagttggctataccttgtccacttccagtactggacgtgctcagggtctagggtcacagatggtgctattaattgaactggaacacagcagaattgttgcaaaggttctaggagccagattcattccttcttcattctttgcaaaacagtggtacagacatggagtctagaattgacccagatggaaagtaattggtattcttaatatcctgggtgactaatatccaggcagagaagctcctggaaccataactgtaagttcctagctggctagggattgaagtcctggacagtgacagaggataccacagtagttcaagacttagcacaagtcaccaactgcttcagggatacctggaggggccagcaagtagagtgttggtggcccaagcaaaccagtgttgccaataccattgccaaaagggcctttggatcctggacaaagcttggctgccggcttcatttattcctgctgatggctgagaagcatctgtcttccatcccacttgcctgtcccaagttttgttccattttttaaaaatttgttgtaaactgcatgttttataaaataaaaataaaatatcgtttgttatttatctcattagaga

SEQ ID NO: 419295 - DNA, 4432 bp, Homo sapiens
gttgagccctaggcgtgggggagaactggggaaactggaatttcccgcggagctgacagcgcttgcgctccccctactcgttctaattccacgcgctccaaaatatccgccatggagaaatcttggccaggatgtccattctaggcccatcggtgctgtcttgctgaaggttgggtcaggcatctaaagggactgtggtaagggagggtgtgacacaggtgtaagctgccatcgtcatcatgaactttgagggtctggaccctggactggcagaatatgccccagccatgcattctgccctggaccctgtcttggatgcccacctgaacccaagtctgctacagaatgtggagctggacccagagggagtggccttggaggctcttcccgtccaggaatcagtgcacataatggaaggtgtctactctgaattgcacagcgtggtggctgaagtgggtgtacctgtttccgtctcccactttgacttgcacgaggagatgctgtgggtggggagccacgggggccatgccacttcattttttggcccagccttggagcgctactcatcctttcaagtcaatggcagtgatgatattcggcagatccagagcctggagaatggtatcctttttctcaccaagaacaacctcaagtatatggcccgtgggggcctcattatatttgattacctgctggatgagaatgaggatatgcacagtctcctactgactgacagcagcactctactcgttggtgggctgcagaatcacatactagagattgatcttaacactgtccaggagactcagaagtatgcagtagagacgcctggagtcaccatcatgagacagacaaatcgcttcttcttctgcggccacacgtctggcaaggtttccctgagagacctccgtacttttaaggtggaacatgagtttgatgccttctcaggaagtctgtcagactttgatgtgcatggcaacctgctagctgcctgtggcttctccagccgcctcactggcctggcctgcgaccgtttcctcaaggtgtatgatttgcgcatgatgcgtgccatcacaccacttcaagtacatgtggatcctgccttcttgcgcttcattcctacatatacttctcgtcttgctatcatctctcagtcagggcagtgccaattctgtgaacccacaggcctggccaacccagccgatatctttcatgtgaatcctgtggggcctctgctaatgacatttgatgtgtcagccagcaagcaggctctggcctttggggattctgagggctgtgtgcacctctggactgattccccggagccttccttcaacccctactcccgtgagactgagtttgctttgccgtgtctcgtggactcactgcctcctctggactggagccaggacctgctgcctctttccctcatccctgtcccactcaccactgacacacttctctctgattggcctgctgccaactctgctccagctcccaggcgagcaccacccgtggatgcagagattctgcgcaccatgaagaaggtgggcttcattggctatgcgcccaatccccgcaccaggctgcgcaatcagataccctacagactcaaggagtcagacagtgaatttgacagcttcagccaggtcactgagtcaccagtaggacgagaagaggaaccacatctccacatggtttctaagaaataccgcaaggtgaccatcaaatattccaagctagggctggaggactttgacttcaaacactacaataagaccttgtttgctggattagagccccacattcccaacgcctactgtaactgcatgatccaggtgctctatttcctggagcctgtacgctgtctaattcaaaaccacctttgccagaaggagttctgtctggcatgtgagctgggcttcctgtttcacatgttggacctctctcgtggtgacccttgccagggcaataattttcttcgggcattccgtactattcctgaggcctcagccctcggtctaatcctggctgactcagatgaggcctcaggcaagggcaatctggccaggctcattcagaggtggaatcgcttcattctcactcaactgcatcaagatatgcaggagctggaaataccacaggcttatcgaggtgctggaggcagcagcttttgctcatcgggggactctgttattgggcagctcttcagctgtgagatggagaactgcagcctctgccgctgtggcagtgagaccgtgcgagcctcatccactctgcttttcacactctcctaccctgatggtagcaaatgataaaactgggaagaactatgactttgctcaggtgctgaagcgaagcatctgcctggaccagaatacacaggcctggtgtgacacctgtgaaaagtaccagcccacgattcagacccgcaacatccgccatctgccagatattcttgtcatcaattgtgaggtgaacagctcaaaagaggctgatttctggagaatgcaggctgaggttgccttcaagatggcagtaaagaaacacggtggggaaatctccaagaacaaggaatttgctttggctgattggaaggaactagggagtccagagggtgtgctggtgtgtccctccattgaggagttgaagaacgtctggcttcctttctccattcgcatgaagatgaccaaaaacaaagggctggatgtttgcaattggactgatggggatgagatgcagtggggcccagccagggcagaggaggagcatggtgtctatgtgtatgacctgatggctactgtggtacacatcctggactcacgcacagggggcagcctggtggctcacatcaaagttggagagacctaccaccagcgcaaggagggcgttactcaccagcagtggtatctgttcaatgactttcttattgaacctattgataagcatgaagctgtgcagtttgacatgaattggaaagtacctgcaatcctttattatgtcaaacggaatctcaattccagatacaacctgaacatcaagaaccctattgaggcaagtgtcttgctggctgaagcctcgctggcacggaagcagcggaaaacacatactacctttattccactgatgctgaatgagatgccacagattggggacctggtgggtctggatgctgagtttgtcacccttaatgaggaggaagcagagttacgcagtgatggtaccaagtctaccattaaaccaagccagatgtcagtagccaggattacctgtgttcggggccagggacccaatgagggtatccccttcattgatgactacatctctacccaggagcaggtggtggattacttgactcaatactcgggtataaagcctggtgacctcgatgccaaaatttcctccaagcacctaacaactctcaagtctacctacttaaagcttcgttttctcattgacattggagtcaagtttgtgggtcatggcctgcagaaggacttccgggtcatcaacctgatgacctgaagattcaaggggaaacccatgacagtattgaggatgcccgcacagcccttcagctgtaccgaaagtatctggagctaagcaaaaatggcactgagcctgagtctttccacaaggtgctcaagggtctttatgagaagggcagaaagatggactggaaggtgcctgagcctgagggccaaacaagtcccaagaatgcagctgtcttctcctcagtgctggcgctctgactacccttcccaaagaaccacggccctctccctttactgttctatagccccagaactgggagatggcttcctaagttggctataccttgtccacttccagtactggacgtgctcagggtctagggtcacagatggtgctattaattgaactggaacacagcagaattgttgcaaaggttctaggagccagattcattccttcttcattctttgcaaaacagtggtacagacatggagtctagaattgacccagatggaaagtaattggtattcttaatatcctgggtgactaatatccaggcagagaagctcctggaaccataactgtaagttcctagctggctagggattgaagtcctggacagtgacagaggataccacagtagttcaagacttagcacaagtcaccaactgcttcagggatacctggaggggccagcaagtagagtgttggtggcccaagcaaaccagtgttgccaataccattgccaaaagggcctttggatcctggacaaagcttggctgccggcttcatttattcctgctgatggctgagaagcatctgtcttccatcccacttgcctgtcccaagttttgttccattttttaaaaatttgttgtaaactgcatgttttataaaataaaaataaaatatcgtttgttatttatctcattagaga

SEQ ID NO: 419296 - DNA, 4454 bp, Homo sapiens
gttgagccctaggcgtgggggagaactggggaaactggaatttcccgcggagctgacagcgcttgcgctccccctactcgttctaattccacgcgctccaaaatatccgccatggagaaatcttggccaggatgtccattctaggcccatcggtgctgtcttgctgaaggttgggtcaggcatctaaagggactgtggtaagggagggtgtgacacaggtgtaagctgccatcgtcatcatgaactttgagggtctggaccctggactggcagaatatgccccagccatgcattctgccctggaccctgtcttggatgcccacctgaacccaagtctgctacagaatgtggagctggacccagagggagtggccttggaggctcttcccgtccaggaatcagtgcacataatggaaggtgtctactctgaattgcacagcgtggtggctgaagtgggtgtacctgtttccgtctcccactttgacttgcacgaggagatgctgtgggtggggagccacgggggccatgccacttcattttttggcccagccttggagcgctactcatcctttcaagtcaatggcagtgatgatattcggcagatccagagcctggagaatggtatcctttttctcaccaagaacaacctcaagtatatggcccgtgggggcctcattatatttgattacctgctggatgagaatgaggatatgcacagtctcctactgactgacagcagcactctactcgttggtgggctgcagaatcacatactagagattgatcttaacactgtccaggagactcagaagtatgcagtagagacgcctggagtcaccatcatgagacagacaaatcgcttcttcttctgcggccacacgtctggcaaggtttccctgagagacctccgtacttttaaggtggaacatgagtttgatgccttctcaggaagtctgtcagactttgatgtgcatggcaacctgctagctgcctgtggcttctccagccgcctcactggcctggcctgcgaccgtttcctcaaggtgtatgatttgcgcatgatgcgtgccatcacaccacttcaagtacatgtggatcctgccttcttgcgcttcattcctacatatacttctcgtcttgctatcatctctcagtcagggcagtgccaattctgtgaacccacaggcctggccaacccagccgatatctttcatgtgaatcctgtggggcctctgctaatgacatttgatgtgtcagccagcaagcaggctctggcctttggggattctgagggctgtgtgcacctctggactgattccccggagccttccttcaacccctactcccgtgagactgagtttgctttgccgtgtctcgtggactcactgcctcctctggactggagccaggacctgctgcctctttccctcatccctgtcccactcaccactgacacacttctctctgattggcctgctgccaactctgctccagctcccaggcgagcaccacccgtggatgcagagattctgcgcaccatgaagaaggtgggcttcattggctatgcgcccaatccccgcaccaggctgcgcaatcagataccctacagactcaaggagtcagacagtgaatttgacagcttcagccaggtcactgagtcaccagtaggacgagaagaggaaccacatctccacatggtttctaagaaataccgcaaggtgaccatcaaatattccaagctagggctggaggactttgacttcaaacactacaataagaccttgtttgctggattagagccccacattcccaacgcctactgtaactgcatgatccaggtgctctatttcctggagcctgtacgctgtctaattcaaaaccacctttgccagaaggagttctgtctggcatgtgagctgggcttcctgtttcacatgttggacctctctcgtggtgacccttgccagggcaataattttcttcgggcattccgtactattcctgaggcctcagccctcggtctaatcctggctgactcagatgaggcctcaggcaagggcaatctggccaggctcattcagaggtggaatcgcttcattctcactcaactgcatcaagatatgcaggagctggaaataccacaggcttatcgaggtgctggaggcagcagcttttgctcatcgggggactctgttattgggcagctcttcagctgtgagatggagaactgcagcctctgccgctgtggcagtgagaccgtgcgagcctcatccactctgcttttcacactctcctaccctgatggtagcaaatgataaaactgggaagaactatgactttgctcaggtgctgaagcgaagcatctgcctggaccagaatacacaggcctggtgtgacacctgtgaaaagtaccagcccacgattcagacccgcaacatccgccatctgccagatattcttgtcatcaattgtgaggtgaacagctcaaaagaggctgatttctggagaatgcaggctgaggttgccttcaagatggcagtaaagaaacacggtggggaaatctccaagaacaaggaatttgctttggctgattggaaggaactagggagtccagagggtgtgctggtgtgtccctccattgaggagttgaagaacgtctggcttcctttctccattcgcatgaagatgaccaaaaacaaagggctggatgtttgcaattggactgatggggatgagatgcagtggggcccagccagggcagaggaggagcatggtgtctatgtgtatgacctgatggctactgtggtacacatcctggactcacgcacagggggcagcctggtggctcacatcaaagttggagagacctaccaccagcgcaaggagggcgttactcaccagcagtggtatctgttcaatgactttcttattgaacctattgataagcatgaagctgtgcagtttgacatgaattggaaagtacctgcaatcctttattatgtcaaacggaatctcaattccagatacaacctgaacatcaagaaccctattgaggcaagtgtcttgctggctgaagcctcgctggcacggaagcagcggaaaacacatactacctttattccactgatgctgaatgagatgccacagattggggacctggtgggtctggatgctgagtttgtcacccttaatgaggaggaagcagagttacgcagtgatggtaccaagtctaccattaaaccaagccagatgtcagtagccaggattacctgtgttcggggccagggacccaatgagggtatccccttcattgatgactacatctctacccaggagcaggtggtggattacttgactcaatactcgggtataaagcctggtgacctcgatgccaaaatttcctccaagcacctaacaactctcaagtctacctacttaaagcttcgttttctcattgacattggagtcaagtttgtgggtcatggcctgcagaaggacttccgggtcatcaacctgatggtttggcagggctcttttaagagtcttcttgtgagagtgggcccctcagggtatacattgtgcctttagagaatggggaattataggtcccctaccttaagtctccccctcttttatccttgccaggtgcccaaggaccaagtccttgacactgtctacctgttccatatgccccgaaaacgaatgatttccctgcgattccttgcttggtactttctggatgcagctgtcttctcctcagtgctggcgctctgactacccttcccaaagaaccacggccctctccctttactgttctatagccccagaactgggagatggcttcctaagttggctataccttgtccacttccagtactggacgtgctcagggtctagggtcacagatggtgctattaattgaactggaacacagcagaattgttgcaaaggttctaggagccagattcattccttcttcattctttgcaaaacagtggtacagacatggagtctagaattgacccagatggaaagtaattggtattcttaatatcctgggtgactaatatccaggcagagaagctcctggaaccataactgtaagttcctagctggctagggattgaagtcctggacagtgacagaggataccacagtagttcaagacttagcacaagtcaccaactgcttcagggatacctggaggggccagcaagtagagtgttggtggcccaagcaaaccagtgttgccaataccattgccaaaagggcctttggatcctggacaaagcttggctgccggcttcatttattcctgctgatggctgagaagcatctgtcttccatcccacttgcctgtcccaagttttgttccattttttaaaaatttgttgtaaactgcatgttttataaaataaaaataaaatatcgtttgttatttatctcattagaga

SEQ ID NO: 419297 - DNA, 736 bp, Homo sapiens
tcggggcaattctggactcggggcaattctggactctgatgttcgccgaccgttgactacccttcccaaagaaccacggccctctccctttactgttctatagccccagaactgggagatggcttcctaagttggctataccttgtccacttccagtactggacgtgctcagggtctagggtcacagatggtgctattaattgaactggaacacagcagaattgttgcaaaggttctaggagccagattcattccttcttcattctttgcaaaacagtggtacagacatggagtctagaattgacccagatggaaagtaattggtattcttaatatcctgggtgactaatatccaggcagagaagctcctggaaccataactgtaagttcctagctggctagggattgaagtcctggacagtgacagaggataccacagtagttcaagacttagcacaagtcaccaactgcttcagggatacctggaggggccagcaagtagagtgttggtggcccaagcaaaccagtgttgccaataccattgccaaaagggcctttggatcctggacaaagcttggctgccggcttcatttattcctgctgatggctgagaagcatctgtcttccatcccacttgcctgtcccaagttttgttccattttttaaaaatttgttgtaaactgcatgttttataaaataaaaataaaatatcgtttgttatttatctcattagaga

SEQ ID NO: 419298 - DNA, 3945 bp, Homo sapiens
gttgagccctaggcgtgggggagaactggggaaactggaatttcccgcggagctgacagcgcttgcgctccccctactcgttctaattccacgcgctccaaaatatccgccatggagaaatcttggccaggatgtccattctaggcccatcggtgctgtcttgctgaaggttgggtcaggcatctaaagggactgtggtaagggagggtgtgacacaggtgtaagctgccatcgtcatcatgaactttgagggtctggaccctggactggcagaatatgccccagccatgcattctgccctggaccctgtcttggatgcccacctgaacccaagtctgctacagaatgtggagctggacccagagggagtggccttggaggctcttcccgtccaggaatcagtgcacataatggaaggtgtctactctgaattgcacagcgtggtggctgaagtgggtgtacctgtttccgtctcccactttgacttgcacgaggagatgctgtgggtggggagccacgggggccatgccacttcattttttggcccagccttggagcgctactcatcctttcaagtcaatggcagtgatgatattcggcagatccagagcctggagaatggtatcctttttctcaccaagaacaacctcaagtatatggcccgtgggggcctcattatatttgattacctgctggatgagaatgaggatatgcacagtctcctactgactgacagcagcactctactcgttggtgggctgcagaatcacatactagagattgatcttaacactgtccaggagactcagaagtatgcagtagagacgcctggagtcaccatcatgagacagacaaatcgcttcttcttctgcggccacacgtctggcaaggtttccctgagagacctccgtacttttaaggtggaacatgagtttgatgccttctcaggaagtctgtcagactttgatgtgcatggcaacctgctagctgcctgtggcttctccagccgcctcactggcctggcctgcgaccgtttcctcaaggtgtatgatttgcgcatgatgcgtgccatcacaccacttcaagtacatgtggatcctgccttcttgcgcttcattcctacatatacttctcgtcttgctatcatctctcagtcagggcagtgccaattctgtgaacccacaggcctggccaacccagccgatatctttcatgtgaatcctgtggggcctctgctaatgacatttgatgtgtcagccagcaagcaggctctggcctttggggattctgagggctgtgtgcacctctggactgattccccggagccttccttcaacccctactcccgtgagactgagtttgctttgccgtgtctcgtggactcactgcctcctctggactggagccaggacctgctgcctctttccctcatccctgtcccactcaccactgacacacttctctctgattggcctgctgccaactctgctccagctcccaggcgagcaccacccgtggatgcagagattctgcgcaccatgaagaaggtgggcttcattggctatgcgcccaatccccgcaccaggctgcgcaatcagataccctacagactcaaggagtcagacagtgaatttgacagcttcagccaggtcactgagtcaccagtaggacgagaagaggaaccacatctccacatggtttctaagaaataccgcaaggtgaccatcaaatattccaagctagggctggaggactttgacttcaaacactacaataagaccttgtttgctggattagagccccacattcccaacgcctactgtaactgcatgatccaggtgctctatttcctggagcctgtacgctgtctaattcaaaaccacctttgccagaaggagttctgtctggcatgtgagctgggcttcctgtttcacatgttggacctctctcgtggtgacccttgccagggcaataattttcttcgggcattccgtactattcctgaggcctcagccctcggtctaatcctggctgactcagatgaggcctcaggcaagggcaatctggccaggctcattcagaggtggaatcgcttcattctcactcaactgcatcaagatatgcaggagctggaaataccacaggcttatcgaggtgctggaggcagcagcttttgctcatcgggggactctgttattgggcagctcttcagctgtgagatggagaactgcagcctctgccgctgtggcagtgagaccgtgcgagcctcatccactctgcttttcacactctcctaccctgatggtagcaaatgataaaactgggaagaactatgactttgctcaggtgctgaagcgaagcatctgcctggaccagaatacacaggcctggtgtgacacctgtgaaaagtaccagcccacgattcagacccgcaacatccgccatctgccagatattcttgtcatcaattgtgaggtgaacagctcaaaagaggctgatttctggagaatgcaggctgaggttgccttcaagatggcagtaaagaaacacggtggggaaatctccaagaacaaggaatttgctttggctgattggaaggaactagggagtccagagggtgtgctggtgtgtccctccattgaggagttgaagaacgtctggcttcctttctccattcgcatgaagatgaccaaaaacaaagggctggatgtttgcaattggactgatggggatgagatgcagtggggcccagccagggcagaggaggagcatggtgtctatgtgtatgacctgatggctactgtggtacacatcctggactcacgcacagggggcagcctggtggctcacatcaaagttggagagacctaccaccagcgcaaggagggcgttactcaccagcagtggtatctgttcaatgactttcttattgaacctattgataagcatgaagctgtgcagtttgacatgaattggaaagtacctgcaatcctttattatgtcaaacggaatctcaattccagatacaacctgaacatcaagaaccctattgaggcaagtgtcttgctggctgaagcctcgctggcacggaagcagcggaaaacacatactacctttattccactgatgctgaatgagatgccacagattggggacctggtgggtctggatgctgagtttgtcacccttaatgaggaggaagcagagttacgcagtgatggtaccaagtctaccattaaaccaagccagatgtcagtagccaggattacctgtgttcggggccagggacccaatgagggtatccccttcattgatgactacatctctacccaggagcaggtggtggattacttgactcaatactcgggtataaagcctggtgacctcgatgccaaaatttcctccaagcacctaacaactctcaagtctacctacttaaagcttcgttttctcattgacattggagtcaagtttgtgggtcatggcctgcagaaggacttccgggtcatcaacctgatggtgcccaaggaccaagtccttgacactgtctacctgttccatatgccccgaaaacgaatgatttccctgcgattccttgcttggtactttctggacctgaagattcaaggggaaacccatgacagtattgaggatgcccgcacagcccttcagctgtaccgaaagtatctggagctaagcaaaaatggcactgagcctgagtctttccacaaggtgctcaagggtctttatgagaagggcagaaagatggactggaaggtgcctgagcctgagggccaaacaagtcccaagagtaagacctgggatgggacaagggaaactggactgggtggattttgtattttgtttgtttgtgacagggtctcactctgtcacccaggctgaagtgcagtagcgtgattacagctcactgcagcctcgacttcc

SEQ ID NO: 419299 - DNA, 2795 bp, Homo sapiens
gttgagccctaggcgtgggggagaactggggaaactggaatttcccgcggagctgacagcgcttgcgctccccctactcgttctaattccacgcgctccaaaatatccgccatggagaaatcttggccaggatgtccattctaggcccatcggtgctgtcttgctgaaggttgggtcaggcatctaaagggactgtggtaagggagggtgtgacacaggtgtaagctgccatcgtcatcatgaactttgagggtctggaccctggactggcagaatatgccccagccatgcattctgccctggaccctgtcttggatgcccacctgaacccaagtctgctacagaatgtggagctggacccagagggagtggccttggaggctcttcccgtccaggaatcagtgcacataatggaaggtgtctactctgaattgcacagcgtggtggctgaagtgggtgtacctgtttccgtctcccactttgacttgcacgaggagatgctgtgggtggggagccacgggggccatgccacttcattttttggcccagccttggagcgctactcatcctttcaagtcaatggcagtgatgatattcggcagatccagagcctggagaatggtatcctttttctcaccaagaacaacctcaagtatatggcccgtgggggcctcattatatttgattacctgctggatgagaatgaggatatgcacagtctcctactgactgacagcagcactctactcgttggtgggctgcagaatcacatactagagattgatcttaacactgtccaggagactcagaagtatgcagtagagacgcctggagtcaccatcatgagacagacaaatcgcttcttcttctgcggccacacgtctggcaaggtttccctgagagacctccgtacttttaaggtggaacatgagtttgatgccttctcaggaagtctgtcagactttgatgtgcatggcaacctgctagctgcctgtggcttctccagccgcctcactggcctggcctgcgaccgtttcctcaaggtgtatgatttgcgcatgatgcgtgccatcacaccacttcaagtacatgtggatcctgccttcttgcgcttcattcctacatatacttctcgtcttgctatcatctctcagtcagggcagtgccaattctgtgaacccacaggcctggccaacccagccgatatctttcatgtgaatcctgtggggcctctgctaatgacatttgatgtgtcagccagcaagcaggctctggcctttggggattctgagggctgtgtgcacctctggactgattccccggagccttccttcaacccctactcccgtgagactgagtttgctttgccgtgtctcgtggactcactgcctcctctggactggagccaggacctgctgcctctttccctcatccctgtcccactcaccactgacacacttctctctgattggcctgctgccaactctgctccagctcccaggcgagcaccacccgtggatgcagagattctgcgcaccatgaagaaggtgggcttcattggctatgcgcccaatccccgcaccaggctgcgcaatcagataccctacagactcaaggagtcagacagtgaatttgacagcttcagccaggtcactgagtcaccagtaggacgagaagaggaaccacatctccacatggtttctaagaaataccgcaaggtgaccatcaaatattccaagctagggctggaggactttgacttcaaacactacaataagaccttgtttgctggattagagccccacattcccaacgcctactgtaactgcatgatccaggtgctctatttcctggagcctgtacgctgtctaattcaaaaccacctttgccagaaggagttctgtctggcatgtgagctgggcttcctgtttcacatgttggacctctctcgtggtgacccttgccagggcaataattttcttcgggcattccgtactattcctgaggcctcagccctcggtctaatcctggctgactcagatgaggcctcaggcaagggcaatctggccaggctcattcagaggtggaatcgcttcattctcactcaactgcatcaagatatgcaggagctggaaataccacaggcttatcgaggtgctggaggcagcagcttttgctcatcgggggactctgttattgggcagctcttcagctgtgagatggagaactgcagcctctgccgctgtggcagtgagaccgtgcgagcctcatccaggcgttactcaccagcagtggtatctgttcaatgactttcttattgaacctattgataagcatgaagctgtgcagtttgacatgaattggaaagtacctgcaatcctttattatgtcaaacggaatctcaattccagatacaacctgaacatcaagaaccctattgaggcaagtgtcttgctggctgaagcctcgctggcacggaagcagcggaaaacacatactacctttattccactgatgctgaatgagatgccacagattggggacctggtgggtctggatgctgagtttgtcacccttaatgagcagtgttgccaataccattgccaaaagggcctttggatcctggacaaagcttggctgccggcttcatttattcctgctgatggctgagaagcatctgtcttccatcccacttgcctgtcccaagttttgttccattttttaaaaatttgttgtaaactgcatgttttataaaataaaaataaaatatcgtttgttatttatctcattagaga

SEQ ID NO: 419300 - DNA, 405 bp, Homo sapiens
cctggaccctgtcttggatgcccacctgaacccaagtctgctacagaatgtggagctggacccagagggagtggccttggaggctcttcccgtccaggaatcagtgcacataatggaaggtgtctactctgaattgcacagcgtggtggctgaagtgggtgtacctgtttccgtctcccactttgacttgcacgaggagatgctgtgggtggggagccacggggtaagaactgtacccctttgtgagggttgaaagatgttgaaggtctttatctggtcttaacccaaggaagctgctttgcagatagccagtaccgaggagttgtagtgatgagacagctgggtctggttggagggataaagggagaatctaggatctaggagtaaatgacatattctttctca

SEQ ID NO: 419301 - DNA, 1919 bp, Homo sapiens
aatcagctatttcatgcagtgcaaagattgcaaagagtacaaaaccagctgaaaagcatgcgccaagctgcagcagatgcaaagcctgaaagtttaatgaagaggctagaggaggagataaaatttaatttatatatggtaactgaaaaatttcctaaagaattagaaaataagaaaaaggaattacattttttacaaaaagtagtttcagagccagctatgggccattctgatcttcttgaacttgaatctaaaataaatgaaataaacacagaaattaaccagttgattgaaaagaaaatgatgagaaatgagcccattgaaggcaaactctcactgtataggcaacaggcatctatcatttcccgtaaaaaagaagccaaagctgaggaacttcaggaggccaaggagaagttagccagcctagagagagaagcatcagtaaagagaaatcagacccgtgaatttgatggtactgaagttttaaagggagatgagttcaaacgatatgtcaataaacttcgaagcaagagtacagttttcaaaaagaagcatcagataatagctgaacttaaagctgaattcggtcttttgcagaggactgaagaacttcttaagcaacgtcatgaaaatattcaacaacaactgcaaactatggaggagaaaaagggtatatctggatatagttacacccaagaagagctagaaagagtatctgcactgaagagtgaagttgatgaaatgaaaggacgaacattggatgatatgtctgaaatggtgaaaaaactgtattcattggtatctgaaaagaagtcagctcttgcctcagttataaaagagctacgacagttgcgtcaaaaatatcaagaactgacccaggagtgtgatgaaaagaaatcccagtatgatagctgtgcagcaggcctcgaaagcaatcggtccaaattagaacaggaagttagaagactccgtgaagaatgtcttcaagaagaaagtagataccattatacaaattgtatgattaagaacctagaagttcaacttcgtcgtgctactgatgagatgaaggcatatatctcttctgatcaacaagaaaaaagaaaggcaattagggaacagtataccaaaaatactgctgaacaagaaaaccttggaaagaaacttcgggaaaaacaaaaagttatacgagaaagtcatggtccaaatatgaaacaagcaaaaatgtggcgtgatttggaacaattaatggaatgtaagaaacagtgctttctgaaacaacaaagccaaacttccattggtcaggtaattcaggagggtggggaggaccggctaatactgtgaattcttgtgtcatcgtttggggttttacttgataccactagctataagcctaatctcataatgtatttcttttttgaaactgatttgtatagcattttgttttcagaagagccattctttattaagttttcatagaaaataatgttaaggtagatttagtttgaatgttttttcatatgaaaaagaggcttttattcttttccatagtttagacatcactggcgtcttctgagttttatgagacaggaaactaagtttactatctgtaaatgtaaacatatgtccattaagaaacatgtagtttttttttagaatgtaataacccagtggcttactgtttttcttaatctcttttaaaaaaactttagaagaatcttttaggaactaatatctcttgttctgaagaaacatttatctgacgttcagcagttcctacagttttacttcagtttatttttcttctgtaaaatgcaagaaaatttaatattttgactaacatgtcttttctgtttgtatcatttaaaggcaaataaacttggtacgtatttcatatctatttaaaaaatgtaaaaaaaaat

SEQ ID NO: 419302 - DNA, 2501 bp, Homo sapiens
cttcctgaaaggatctggagacaccagctccacaagtcctggtgtctttaaaaggatcagcttgaggaataaggctcgtctgagagctgtgacattcatctgactctagtgaaagtccaacagccactccctttttggcctccaactgggcaccatgagggcctgcatctccctggtattggccgtgctgtgtggcctggcctgggctgaggaccacaaagagtcagagccattgccacagctggaggaagagacagaagaggccctcgccagcaacttgtactcggcacccacctcctgccagggccgctgctacgaagcctttgacaagcaccaccaatgtcactgcaatgcccgctgccaagagtttgggaactgctgcaaggattttgagagcctgtgtagtgaccacgaggtctcccacagcagtgatgccataacaaaagaggagattcagagcatctctgagaagatctacagggcagacaccaacaaagcccagaaggaagacatcgttctcaatagccaaaactgcatctccccgtcagagaccagaaaccaagtggatcgctgcccaaagccactcttcacttatgtcaatgagaagctgttctccaagcccacctatgcagccttcatcaacctcctcaacaactaccagcgggcaacaggccatggggagcacttcagtgcccaggagctggccgagcaggacgccttcctcagagagatcatgaagacagcagtcatgaaggagctctacagcttcctccatcaccagaatcgctatggctcagagcaagagtttgtcgatgacttgaagaacatgtggtttgggctctattcgagaggcaatgaagagggggactcgagtggctttgaacatgtcttctcaggtgaggtaaaaaaaggcaaggttactggcttccataactggatccgcttctacctggaggagaaggagggtctggttgactattacagtcacatctacgatgggccttgggattcttaccccgatgtgctggcaatgcagttcaactgggacggctactataaggaagtgggctctgctttcatcggcagcagccctgagtttgagtttgcactctactccctgtgcttcatcgccaggccaggcaaagtgtgccagttaagcctgggaggatatcccttagctgtccggacatatacctgggacaagtccacctatgggaatggcaagaagtacatcgccacagcctacatagtgtcttccacctaatagaacttcgagccagaaaggggcatgagggctcttgcgagactgaagtgctatcttctctggactagagagaagagggagaggactggaagggatcaccaaatctcaaagcaatgagaagcattcctaaatcccaaagtgcccacatgggaaagagataaaatgtacaaattagaaaaatgtggataaacagtcaaacctttatcctctagaattttggcaatgttgactaagaaacagagtccaagcagagaaggtaggaaccctccatagctctctgccctgatgtgtgggggaactaggaagaagtcctttgacctcaccaggcctcatgcttccctttaatgtaaagggaaggggtttgcccactttcctctttttggggttggtgagagggcaaaccctgatatttttactgtgaaggtgttttcagttgttcttaggaagaacagctgatagaaattcaagattactataatggctgttattatacacagctctgtaaactaccactcagccctgtgttggggtcctcaaagaagtaaggccacagtaatcaagcaagggcctttggttttttccagagttagatcctctcagaacagagtctgggagaactccaatgctgaatggagaagggtaataggttggtgcagtgaatgggctgggggtggggtggccttctccaggcctgagtgtttttgtgtccagctcagtatctgcaacaagaagtttcccacttgtggatgtttagtgcagccacagacttgtattttgatccccaattttttttttgaaagagttctcctcataggaggatgattcagcatcagaagaagaaggaacccatagcttggtgtcattaacataattattttaagccttatccagcagccataatttgaataactctacgagaccagagagactgtagttccctattttaacctcaattatgcatttgtcccccaaccccactgagaactaaatgctgtaccacagagccgggtgtgaactatggtttagaaggttcaagtttccaattaaagtcattgaagaaaacttgaaatgagtgtcttctttgtatatggcctccctccaatgtctgtctccctgccttttccctagagcagggctggcagtgatacttttgctctagagtcttttcagaatggcttgaagaatgtggtatctgggtgaagtctctgttgactcactaagtctctctagccaagag

SEQ ID NO: 419303 - DNA, 1661 bp, Homo sapiens
ctcgcgaacgtatatccgaacgagggggaccgagtggcttgaacatgtcttctcaggtgaggtaaaaaaaggcaaggttactggcttccataactggatccgcttctacctggaggagaaggagggtctggttgactattacagtcacatctacgatgggccttgggattcttaccccgatgtgctggcaatgcagttcaactgggacggctactataaggaagtgggctctgctttcatcggcagcagccctgagtttgagtttgcactctactccctgtgcttcatcgccaggccaggcaaagtgtgccagttaagcctgggaggatatcccttagctgtccggacatatacctgggacaagtccacctatgggaatggcaagaagtacatcgccacagcctacatagtgtcttccacctaatagaacttcgagccagaaaggggcatgagggctcttgcgagactgaagtgctatcttctctggactagagagaagagggagaggactggaagggatcaccaaatctcaaagcaatgagaagcattcctaaatcccaaagtgcccacatgggaaagagataaaatgtacaaattagaaaaatgtggataaacagtcaaacctttatcctctagaattttggcaatgttgactaagaaacagagtccaagcagagaaggtaggaaccctccatagctctctgccctgatgtgtgggggaactaggaagaagtcctttgacctcaccaggcctcatgcttccctttaatgtaaagggaaggggtttgcccactttcctctttttggggttggtgagagggcaaaccctgatatttttactgtgaaggtgttttcagttgttcttaggaagaacagctgatagaaattcaagattactataatggctgttattatacacagctctgtaaactaccactcagccctgtgttggggtcctcaaagaagtaaggccacagtaatcaagcaagggcctttggttttttccagagttagatcctctcagaacagagtctgggagaactccaatgctgaatggagaagggtaataggttggtgcagtgaatgggctgggggtggggtggccttctccaggcctgagtgtttttgtgtccagctcagtatctgcaacaagaagtttcccacttgtggatgtttagtgcagccacagacttgtattttgatccccaattttttttttgaaagagttctcctcataggaggatgattcagcatcagaagaagaaggaacccatagcttggtgtcattaacataattattttaagccttatccagcagccataatttgaataactctacgagaccagagagactgtagttccctattttaacctcaattatgcatttgtcccccaaccccactgagaactaaatgctgtaccacagagccgggtgtgaactatggtttagaaggttcaagtttccaattaaagtcattgaagaaaacttgaaatgagtgtcttctttgtatatggcctccctccaatgtctgtctccctgccttttccctagagcagggctggcagtgatacttttgctctagagtcttttcagaatggcttgaagaatgtggtatctgggtgaagtctctgttgactcactaagtctctctagccaagag

SEQ ID NO: 419304 - DNA, 2433 bp, Homo sapiens
tccattcggacgtctccatcctcagaacctcctctcttccccaaaaagcaccatgacttgtggatcttactgtggtggccgcgccttcagctgcatctcggcctgtgggccccggcccggccgctgctgcatcaccgctgccccctaccgtggcatctcctgctaccgcggcctcaccgggggcttcggcagccacagcgtgtgcggaggctttcgggccggctcctgcggacgcagcttcggctaccgctccgggggcgtgtgcgggcccagtcccccatgcatcaccaccgtgtcggtcaacgagagcctcctcacgcccctcaacctggagatcgaccccaacgcgcagtgcgtgaagcaggaggagaaggagcagatcaagtccctcaacagcagattcgcggccttcatcgacaaggtgcgcttcctggagcagcagaacaaactgctggagacaaagctgcagttctaccagaaccgcgagtgttgccagagcaacctggagcccctgtttgagggctacatcgagactctgcggcgggaggccgagtgcgtggaggccgacagcgggaggctggcctcagagcttaaccacgtgcaggaggtgctggagggctacaagaagaagtatgaggaggaggtttctctgagagcaacagctgagaacgagtttgtggctctgaagaaggatgtggactgcgcctacctccgcaaatcagacctggaggccaatgtggaggccctgatccaggagatcgacttcctgaggcggctgtatgaggaggagatccgcgttctccagtcccacatctcagacacctccgtggttgtcaagctggacaacagccgggacctgaacatggactgcatcattgccgagatcaaggcacagtacgatgacattgtcacccgtagccgggctgaggccgagtcctggtaccgcagcaagtgtgaggagatgaaggccacggtgatcaggcacggggagaccctgcgccgcaccaaggaggagatcaacgagctgaaccgcatgatccagaggctgacggctgaggtggagaatgccaagtgccagaattccaagctggaggctgcggtggctcagtctgagcagcagggtgaggcggccctcagcgatgcccgctgcaagttggccgagctggagggtgccctgcagaaggccaagcaggacatggcctgcctgatcagggagtaccaggaggtgatgaactccaagctgggcctggacatcgagatcgccacctacaggcgcctgctggagggcgaggagcagaggctgtgcgagggcgtcggctcggtgaatgtctgcgtcagcagctcccgcggtggcgttgtctgtggcgatctctgcgcctccactactgcccctgttgtctccaccagagtcagtagcgtccccagcaacagcaacgtggtggtgggcactactaacgcctgcgccccctccgcccgggttggcgtctgcggcggcagctgtaagaggtgctaggaggctgccgcctccgccagcgcctgtcgccgtcactctccacccagccagtacctcgcgccaccagaacgcgccgcccgcgccggcctcccaatagccgccgcccgctgcctgcactctaagcgccctccccaccgctccgctccgggagccatccccggtcgcaggagtccggggagggccgggaggcgccatggtctctctctgtagcctttcctggtagtcaatttgttgtcccgaggattcatctttttcttccgcctgccttctgttttttttgctgtatgcattggtcttgcctgagctcttccccaaagcttggaggaacgggggaggcccgggaatgtccctgtctgcacgacctgggactctgcccatgtgcttttgcctgtggaatggagacgcggaccctggatagtggttctatgactctgcgagggacaggcccacgcgtgtggggagaacatctcccttccggggctgccctcaagagcttctgaaaaactaatgactctgctgccttctcctttgtctttgtttcactctgtgtttccaataaactcattgtagcgaatcaaaaaaaaaatcgccctcgtgtctcagcgtgagctctgcgcgctcctttatgaggctactatgacctcctcctgaccctggctcgccgttgctgggaacggaccctactaagccgcatcgattcagaccggacacagaaaactgccaagcacaagccgacctaaggcggttgcctttattctcgccctaacacccaatcccataaggcgaacgagcacaaaagggtccgaatcttgctcttcacctcgtacacgccttcctgcacgggttacatcgcgaagtggcgcgccgcggccgcgtcgcgcgtcgcttgtccgaacttctcgcggcgaacgtctcccgcg

SEQ ID NO: 419305 - DNA, 2091 bp, Homo sapiens
tccattcggacgtctccatcctcagaacctcctctcttccccaaaaagcaccatgacttgtggatcttactgtggtggccgcgccttcagctgcatctcggcctgtgggccccggcccggccgctgctgcatcaccgctgccccctaccgtggcatctcctgctaccgcggcctcaccgggggcttcggcagccacagcgtgtgcggaggctttcgggccggctcctgcggacgcagcttcggctaccgctccgggggcgtgtgcgggcccagtcccccatgcatcaccaccgtgtcggtcaacgagagcctcctcacgcccctcaacctggagatcgaccccaacgcgcagtgcgtgaagcaggaggagaaggagcagatcaagtccctcaacagcagattcgcggccttcatcgacaaggtgcgcttcctggagcagcagaacaaactgctggagacaaagctgcagttctaccagaaccgcgagtgttgccagagcaacctggagcccctgtttgagggctacatcgagactctgcggcgggaggccgagtgcgtggaggccgacagcgggaggctggcctcagagcttaaccacgtgcaggaggtgctggagggctacaagaagaagtatgaggaggaggtttctctgagagcaacagctgagaacgagtttgtggctctgaagaaggatgtggactgcgcctacctccgcaaatcagacctggaggccaatgtggaggccctgatccaggagatcgacttcctgaggcggctgtatgaggaggagatccgcgttctccagtcccacatctcagacacctccgtggttgtcaagctggacaacagccgggacctgaacatggactgcatcattgccgagatcaaggcacagtacgatgacattgtcacccgtagccgggctgaggccgagtcctggtaccgcagcaagtgtgaggagatgaaggccacggtgatcaggcacggggagaccctgcgccgcaccaaggaggagatcaacgagctgaaccgcatgatccagaggctgacggctgaggtggagaatgccaagtgccagaattccaagctggaggctgcggtggctcagtctgagcagcagggtgaggcggccctcagcgatgcccgctgcaagttggccgagctggagggtgccctgcagaaggccaagcaggacatggcctgcctgatcagggagtaccaggaggtgatgaactccaagctgggcctggacatcgagatcgccacctacaggcgcctgctggagggcgaggagcagaggctgtgcgagggcgtcggctcggtgaatgtctgcgtcagcagctcccgcggtggcgttgtctgtggcgatctctgcgcctccactactgcccctgttgtctccaccagagtcagtagcgtccccagcaacagcaacgtggtggtgggcactactaacgcctgcgccccctccgcccgggttggcgtctgcggcggcagctgtaagaggtgctaggaggctgccgcctccgccagcgcctgtcgccgtcactctccacccagccagtacctcgcgccaccagaacgcgccgcccgcgccggcctcccaatagccgccgcccgctgcctgcactctaagcgccctccccaccgctccgctccgggagccatccccggtcgcaggagtccggggagggccgggaggcgccatggtctctctctgtagcctttcctggtagtcaatttgttgtcccgaggattcatctttttcttccgcctgccttctgttttttttgctgtatgcattggtcttgcctgagctcttccccaaagcttggaggaacgggggaggcccgggaatgtccctgtctgcacgacctgggactctgcccatgtgcttttgcctgtggaatggagacgcggaccctggatagtggttctatgactctgcgagggacaggcccacgcgtgtggggagaacatctcccttccggggctgccctcaagagcttctgaaaaactaatgactctgctgccttctcctttgtctttgtttcactctgtgtttccaataaactcattgtagcgaatcaa

SEQ ID NO: 419306 - DNA, 763 bp, Homo sapiens
cctttcatgaaagcaattcaaccaactgcggctccacccaaagagcttctatacttacttttcttacagtttttgagtgacgcactacaaaacgatgaaaaaaaaaagaagaagaagaaaaggaggaggcagccctctcctacagggcgtcttccgccctgtaaacttggcaaaaggcaaactggcctgaaatacagcactctccatataaggcagcccagctaaacatgtcatgcgtaatttatgggtagcaagcagagaattaacctttgcgtgcacatatttggcccagatgaaaaccgggcgggatggcagccccggggccagggatgcgggagccgccgggaagacccgcgcgccgctcgactcagagggactcacaccttcccccgacaaaggtcattaagttaggcggccccactgtcgaccaagtgcccaaggattgtgggagtcatgattccaagatgcccgcgacggaaaatggaacttgtcagctccttgtcatgggagcattgtgggcgccacaactcattcagctgcagtgaaaagactgttgcatgtcgctgtgcagcctcttatcgccgaggtctggcttccgctgctgctgcgcggcccctcccccgcccgcccagccccaccaggaagcccagggcggactcgtcgagctcctaatgcacgcggcggcgagaaaaacgctcttcaactttccgccggcgccctcccgcgcttccccgggccacagggtcgcctgtcaaccggacag

SEQ ID NO: 419307 - DNA, 520 bp, Homo sapiens
cctttcatgaaagcaattcaaccaactgcggctccacccaaagagcttctatacttacttttcttacagtttttgagtgacgcactacaaaacgatgaaaaaaaaaagaagaagaagaaaaggaggaggcagccctctcctacagggcgtcttccgccctgtaaacttggcaaaaggcaaactggcctgaaatacagcactctccatataaggcagcccagctaaacatgtcatgcgtaatttatgggtagcaagcagagaattaacctttgcgtgcacatatttggcccagatgaaaaccgggcgggatggcagccccggggccagggatgcgggagccgccgggaagacccgcgcgccgctcgactcagagggactcacaccttcccccgacaaaggtcattaagttgtgagtacacttgcacgcacctgtttctcttctcgcccccctgtttctccctgggtcccgctgggctgccaagccgtgcgcgggctgtgccgtgacagcgtccgcagagcc

SEQ ID NO: 419308 - DNA, 476 bp, Homo sapiens
aaagagaggccagcgagatctgtgatggagtccagaactaaactgcacaatgaaagcaagaagacggcccccaggcaggaggccatccccgatctggaggactctccgccagtgtcggattcagagttttgttggtccagtttcgccttctgagcagttcttctgtatcccgggaaaagtacgctcggccccaaactggtatttgtcagacgatacatgtaaaagtttgtccttgaacgtggaacaagacttgtgtaaagtctgagacgggaactagtgatcactagctcaagaactgcaaatgagacaggaagctgttcactgtgaaacagtctcttgcttgtcgtgtatttttcgagtacttctgaagtgtgaagtaaaaaaatctggctaatttatttgtacaaatacactttgataattttttatattttcataaacttttacagatgtaaaattaaagaacttcacttgtt

SEQ ID NO: 419309 - DNA, 4300 bp, Homo sapiens
  misc_feature (789)..(789): n is a, c, g, or t
taatcattctaagaagagccggatgttaatcagacgaggtgcagactctctttggaaagaagaaatcattcgacccgtccgccagagagcctcccgggtccaccgcaggtctcccccaggagcccaaaaccacagcagaggacggggtgccggcacctccgttgttagatccgatcgtccagcagttcggtcagttctcaaaagataaggctctagaggaagaggaggacgacaggccatacgaccctgaggaggagtacgacccggagagggccttcgacactcagcttgtggagcgagggcggcgccacgaggtggaaagggctcctgaagcagctgcagccgagcgggaagaggtggcctatgaccccgaggatgagaccatcttagaagaagcgaaagtgactgttgatgacctgcccaacaggatgtgtgccgacgtgagaaggaactccgtggagaggcctgccgagccggtggccggggctgcgacgccctccctggtggagcaacagaagatgctagaagagctgaacaaacagatcgaggagcagaagagacagctggaggagcaagaagaagctctcaggcagcagagggccgccgtcggggtctccatggcccacttctcggtgtcggacgccttgatgtctccaccaccaaagtcgtccttgcccaaggcagagctgttccagcaagagcagcagtctgcagacaagcccgcctcactgccccccgccagccaggcgtcaaaccacagggacccccggcaggcgaggcgcctggccnctgagaccggtgagggggagggggagcctctctccaggctctcggcacgtggtgcccagggtgccctgcccgagagagatgcttccaggggtggcctcgtgggccaggcgcccatgccagtcccggaggaaaaagagccagcctcttccccctgggcttcgggcgaaaagcccccagcggggtccgagcaggacggctggaaggcagagcctggggagggcacccgccccgccacggttggagacagctcggccaggcctgcccggagggtgctgctgcccacaccgccttgcggcgccctgcagcccggcttcccgctgcagcacgacggtgagagggaccctttcacctgcccggggttcgcgtcgcaggacaaggctctcggctcagcccagtatgaggacccaagaaatcttcattctgctggaaggagcagcagccctgcaggtgaaacagagggggacagagagccacaggccagacccggcgagggcaccgccccgctccccccaccaggacagaaagtggggggctctcagcccccgtttcagggtcagcgggaacctggacctcatgctttggggatgtcagggcttcacggccccaatttcccgggaccaagggggccagcccctccgtttccagaagagaatatcgcttctaacgatgggccacgagggcctccgccagccagattcggagcccagaaggggcccatcccttccttattctcggggcaacatgggccacctccttatggggacagcagaggcccctcaccctcttaccttggtggaccacgaggagtggcaccatcccaatttgaagaacgcaaggatccccatggggagaagagggagttccaggacgccccgtataacgaggtgacgggcgcccccgcccagtttgaagggacagagcaagccccatttctgggaagcagaggcggcgcgcctttccagttcggaggccagagaaggccactgctgtctcagctgaaaggcccccgaggcggcccccctccctctcagtttggaggtcagagaggaccaccccctggtcatttcgtgggcccaagagggccccatcctagtcagtttgaaactgcccggggccctcatcccaaccagtttgaaggacccagaggccaagcgcctaactttatgccaggtcccaggggcattcagcctcagcagttcgaagaccagagggtccattcaccaccaagattcacaaaccaaagggcgcctgcacccctgcagtttggtggactacgggggtccgcacccttttctgaaaaaaatgagcagaccccttcgcgatttcacttccagggccaggccccgcaggtgatgaagccgggccccaggcccctgctggagcttcccagccaccccccgcagcaccggaaggaccgctgggaggaggccgggccgccctccgcgctctcctccagtgcgcccggacagggccccgaggccgacggacagtgggcatcggccgacttccgagaggggaaaggccacgaatacagaaaccagactttcgaagggaggcagagagagcggtttgacgtggggcccaaagagaagccgctggaggagcccgacgcccagggccgggcgtccgaggacaggaggagagagcgcgagcgcggccgaaactggagccgagagcgggactgggaccggccccgggagtgggaccgacaccgggacaaggactccagccgggactgggacagaaaccgggagaggagcgccaaccgcgaccgagagcgcgaggccgaccggggcaaggagtgggaccgcagccgggagcggagcaggaaccgagagcgcgagcgagaccggaggcgcgaccgggaccggtcccggagcagagagcgggaccgagacaaggccagggacagggagcggggccgcgaccgcaaggaccggagcaagagcaaagagagcgctcgggacccgaagcccgaggcctcgagggcctccgacgctggcaccgcctcgcaggcctagacgccccggccgggcagagaccctttttaaagccacgttcgtaagatgcgttgaacaaatagcttttgaaatagccacgatcttagattcaggatagaatattctggacttaaacattactgtaattttgtgtaaatggtttcttacaagatttcacatctttacaattctgatgcttttttaaaaaaactaaactttaatatttccatttaaaattaaaagaaatgggaaattgcctacggagcatattgcttttcagatcatagttatcttttccaataactttattgtaaattttaagggagtttcgttggaccctagagccataccttcactgacatctcatccgtttgtgtttccaaaagctgcttttacaggtcttagccgccgccccggaggccggtgtgggcgtgacctgcaggcgtccaccctgcggctacgggagaagtcttagtagcttgtatctggagtcttgagaaacacaaaccttacaaatgcatctttcttttgtcataaaattggaattacaattttcaactgggaaacagaaacacatttcttagcgtgctcagattttatatatcaccttatcaattttttccaaaacatgatttaaagcaacatctgtcctagtataattgttgcattttaaataacaatttattgaaaaatgttaagttttaccagcctaaaaaaagtaacaaaccaattaagtgtactttgggggcagggaggagtccttgatttgaataatcaggagttttgttggtccagtttcgccttctgagcagttcttctgtatcccgggaaaagtacgctcggccccaaactggtatttgtcagacgatacatgtaaaagtttgtccttgaacgtggaacaagacttgtgtaaagtctgagacgggaactagtgatcactagctcaagaactgcaaatgagacaggaagctgttcactgtgaaacagtctcttgcttgtcgtgtatttttcgagtacttctgaagtgtgaagtaaaaaaatctggctaatttatttgtacaaatacactttgataattttttatattttcataaacttttacagatgtaaaattaaagaacttcacttgttctttggagtctgttattccattgtacgtcactacagatttttcactttatagcacagattttttaagttaagaaaacattgagaatgtatcagtttgagatgtttggtgttgaaagccaagtgtccataggttaaattacattaaagtaggtgtcacgttccaacatctagtacgatgagaaggttttgtttgtttaacatataaagcaaatttttctaatttaaatacacaaatgtaaaaatcaagtgtgtttctttagtttacttgatagagattcctgtacattgtattttatattgcggaggcttatatcactgtacatgagaacatggaacgacctaggttttgttactcgcagtagaataaacagctacaggaa

SEQ ID NO: 419310 - DNA, 4273 bp, Homo sapiens
  misc_feature (789)..(789): n is a, c, g, or t
taatcattctaagaagagccggatgttaatcagacgaggtgcagactctctttggaaagaagaaatcattcgacccgtccgccagagagcctcccgggtccaccgcaggtctcccccaggagcccaaaaccacagcagaggacggggtgccggcacctccgttgttagatccgatcgtccagcagttcggtcagttctcaaaagataaggctctagaggaagaggaggacgacaggccatacgaccctgaggaggagtacgacccggagagggccttcgacactcagcttgtggagcgagggcggcgccacgaggtggaaagggctcctgaagcagctgcagccgagcgggaagaggtggcctatgaccccgaggatgagaccatcttagaagaagcgaaagtgactgttgatgacctgcccaacaggatgtgtgccgacgtgagaaggaactccgtggagaggcctgccgagccggtggccggggctgcgacgccctccctggtggagcaacagaagatgctagaagagctgaacaaacagatcgaggagcagaagagacagctggaggagcaagaagaagctctcaggcagcagagggccgccgtcggggtctccatggcccacttctcggtgtcggacgccttgatgtctccaccaccaaagtcgtccttgcccaaggcagagctgttccagcaagagcagcagtctgcagacaagcccgcctcactgccccccgccagccaggcgtcaaaccacagggacccccggcaggcgaggcgcctggccnctgagaccggtgagggggagggggagcctctctccaggctctcggcacgtggtgcccagggtgccctgcccgagagagatgcttccaggggtggcctcgtgggccaggcgcccatgccagtcccggaggaaaaagagccagcctcttccccctgggcttcgggcgaaaagcccccagcggggtccgagcaggacggctggaaggcagagcctggggagggcacccgccccgccacggttggagacagctcggccaggcctgcccggagggtgctgctgcccacaccgccttgcggcgccctgcagcccggcttcccgctgcagcacgacggtgagagggaccctttcacctgcccggggttcgcgtcgcaggacaaggctctcggctcagcccagtatgaggacccaagaaatcttcattctgctggaaggagcagcagccctgcaggtgaaacagagggggacagagagccacaggccagacccggcgagggcaccgccccgctccccccaccaggacagaaagtggggggctctcagcccccgtttcagggtcagcgggaacctggacctcatgctttggggatgtcagggcttcacggccccaatttcccgggaccaagggggccagcccctccgtttccagaagagaatatcgcttctaacgatgggccacgagggcctccgccagccagattcggagcccagaaggggcccatcccttccttattctcggggcaacatgggccacctccttatggggacagcagaggcccctcaccctcttaccttggtggaccacgaggagtggcaccatcccaatttgaagaacgcaaggatccccatggggagaagagggagttccaggacgccccgtataacgaggtgacgggcgcccccgcccagtttgaagggacagagcaagccccatttctgggaagcagaggcggcgcgcctttccagttcggaggccagagaaggccactgctgtctcagctgaaaggcccccgaggcggcccccctccctctcagtttggaggtcagagaggaccaccccctggtcatttcgtgggcccaagagggccccatcctagtcagtttgaaactgcccggggccctcatcccaaccagtttgaaggacccagaggccaagcgcctaactttatgccaggtcccaggggcattcagcctcagcagttcgaagaccagagggtccattcaccaccaagattcacaaaccaaagggcgcctgcacccctgcagtttggtggactacgggggtccgcacccttttctgaaaaaaatgagcagaccccttcgcgatttcacttccagggccaggccccgcaggtgatgaagccgggccccaggcccctgctggagcttcccagccaccccccgcagcaccggaaggaccgctgggaggaggccgggccgccctccgcgctctcctccagtgcgcccggacagggccccgaggccgacggacagtgggcatcggccgacttccgagaggggaaaggccacgaatacagaaaccagactttcgaagggaggcagagagagcggtttgacgtggggcccaaagagaagccgctggaggagcccgacgcccagggccgggcgtccgaggacaggaggagagagcgcgagcgcggccgaaactggagccgagagcgggactgggaccggccccgggagtgggaccgacaccgggacaaggactccagccgggactgggacagaaaccgggagaggagcgccaaccgcgaccgagagcgcgaggccgaccggggcaaggagtgggaccgcagccgggagcggagcaggaaccgagagcgcgagcgagaccggaggcgcgaccgggaccggtcccggagcagagagcgggaccgagacaaggccagggacagggagcggggccgcgaccgcaaggaccggagcaagagcaaagagagcgctcgggacccgaagcccgaggcctcgagggcctccgacgctggcaccgcctcgcaggcctagacgccccggccgggcagagaccctttttaaagccacgttcgtaagatgcgttgaacaaatagcttttgaaatagccacgatcttagattcaggatagaatattctggacttaaacattactgtaattttgtgtaaatggtttcttacaagatttcacatctttacaattctgatgcttttttaaaaaaactaaactttaatatttccatttaaaattaaaagaaatgggaaattgcctacggagcatattgcttttcagatcatagttatcttttccaataactttattgtaaattttaagggagtttcgttggaccctagagccataccttcactgacatctcatccgtttgtgtttccaaaagctgcttttacaggtcttagccgccgccccggaggccggtgtgggcgtgacctgcaggcgtccaccctgcggctacgggagaagtcttagtagcttgtatctggagtcttgagaaacacaaaccttacaaatgcatctttcttttgtcataaaattggaattacaattttcaactgggaaacagaaacacatttcttagcgtgctcagattttatatatcaccttatcaattttttccaaaacatgatttaaagcaacatctgtcctagtataattgttgcattttaaataacaatttattgaaaaatgttaagttttaccagcctaaaaaaagtaacaaaccaattaagtgtactttgggggcagggaggagtccttgatttgaataatcaggagttttgttggtccagtttcgccttctgagcagttcttctgtatcccgggaaaagtacgctcggccccaaactggtatttgtcagacgatacatgtaaaagtttgtccttgaacgtggaacaagacttgtgtaaagtctgagacgggaactagtgatcactagctcaagaactgcaaatgagacaggaagctgttcactgtgaaacagtctcttgcttgtcgtgtatttttcgagtacttctgaagtgtgaagtaaaaaaatctggctaatttatttgtacaaatacactttgataattttttatattttcataaacttttacagatgtaaaattaaagaacttcacttgttctttggagtctgttattccattgtacgtcactacagatttttcactttatagcacagattttttaagttaagaaaacattgagaatgtatcagtttgagatgtttggtgttgaaagccaagtgtccatagaatatatctgcagatattttctatggggacatcagtcaatatacacaaagatgtacattggttcagtctagttaggcaggacaactggaagcaaaggcaggaagactcaaagcagggaggggacttataggttataggtagataagagtcaagtgattgcatccttctgagtttctgattagcattgccagaggaggcagtctagagacgcaggtatctcaga

SEQ ID NO: 419311 - DNA, 3920 bp, Homo sapiens
  misc_feature (789)..(789): n is a, c, g, or t
taatcattctaagaagagccggatgttaatcagacgaggtgcagactctctttggaaagaagaaatcattcgacccgtccgccagagagcctcccgggtccaccgcaggtctcccccaggagcccaaaaccacagcagaggacggggtgccggcacctccgttgttagatccgatcgtccagcagttcggtcagttctcaaaagataaggctctagaggaagaggaggacgacaggccatacgaccctgaggaggagtacgacccggagagggccttcgacactcagcttgtggagcgagggcggcgccacgaggtggaaagggctcctgaagcagctgcagccgagcgggaagaggtggcctatgaccccgaggatgagaccatcttagaagaagcgaaagtgactgttgatgacctgcccaacaggatgtgtgccgacgtgagaaggaactccgtggagaggcctgccgagccggtggccggggctgcgacgccctccctggtggagcaacagaagatgctagaagagctgaacaaacagatcgaggagcagaagagacagctggaggagcaagaagaagctctcaggcagcagagggccgccgtcggggtctccatggcccacttctcggtgtcggacgccttgatgtctccaccaccaaagtcgtccttgcccaaggcagagctgttccagcaagagcagcagtctgcagacaagcccgcctcactgccccccgccagccaggcgtcaaaccacagggacccccggcaggcgaggcgcctggccnctgagaccggtgagggggagggggagcctctctccaggctctcggcacgtggtgcccagggtgccctgcccgagagagatgcttccaggggtggcctcgtgggccaggcgcccatgccagtcccggaggaaaaagagccagcctcttccccctgggcttcgggcgaaaagcccccagcggggtccgagcaggacggctggaaggcagagcctggggagggcacccgccccgccacggttggagacagctcggccaggcctgcccggagggtgctgctgcccacaccgccttgcggcgccctgcagcccggcttcccgctgcagcacgacggtgagagggaccctttcacctgcccggggttcgcgtcgcaggacaaggctctcggctcagcccagtatgaggacccaagaaatcttcattctgctggaaggagcagcagccctgcaggtgaaacagagggggacagagagccacaggccagacccggcgagggcaccgccccgctccccccaccaggacagaaagtggggggctctcagcccccgtttcagggtcagcgggaacctggacctcatgctttggggatgtcagggcttcacggccccaatttcccgggaccaagggggccagcccctccgtttccagaagagaatatcgcttctaacgatgggccacgagggcctccgccagccagattcggagcccagaaggggcccatcccttccttattctcggggcaacatgggccacctccttatggggacagcagaggcccctcaccctcttaccttggtggaccacgaggagtggcaccatcccaatttgaagaacgcaaggatccccatggggagaagagggagttccaggacgccccgtataacgaggtgacgggcgcccccgcccagtttgaagggacagagcaagccccatttctgggaagcagaggcggcgcgcctttccagttcggaggccagagaaggccactgctgtctcagctgaaaggcccccgaggcggcccccctccctctcagtttggaggtcagagaggaccaccccctggtcatttcgtgggcccaagagggccccatcctagtcagtttgaaactgcccggggccctcatcccaaccagtttgaaggacccagaggccaagcgcctaactttatgccaggtcccaggggcattcagcctcagcagttcgaagaccagagggtccattcaccaccaagattcacaaaccaaagggcgcctgcacccctgcagtttggtggactacgggggtccgcacccttttctgaaaaaaatgagcagaccccttcgcgatttcacttccagggccaggccccgcaggtgatgaagccgggccccaggcccctgctggagcttcccagccaccccccgcagcaccggaaggaccgctgggaggaggccgggccgccctccgcgctctcctccagtgcgcccggacagggccccgaggccgacggacagtgggcatcggccgacttccgagaggggaaaggccacgaatacagaaaccagactttcgaagggaggcagagagagcggtttgacgtggggcccaaagagaagccgctggaggagcccgacgcccagggccgggcgtccgaggacaggaggagagagcgcgagcgcggccgaaactggagccgagagcgggactgggaccggccccgggagtgggaccgacaccgggacaaggactccagccgggactgggacagaaaccgggagaggagcgccaaccgcgaccgagagcgcgaggccgaccggggcaaggagtgggaccgcagccgggagcggagcaggaaccgagagcgcgagcgagaccggaggcgcgaccgggaccggtcccggagcagagagcgggaccgagacaaggccagggacagggagcggggccgcgaccgcaaggaccggagcaagagcaaagagagcgctcgggacccgaagcccgaggcctcgagggcctccgacgctggcaccgcctcgcaggcctagacgccccggccgggcagagaccctttttaaagccacgttcgtaagatgcgttgaacaaatagcttttgaaatagccacgatcttagattcaggatagaatattctggacttaaacattactgtaattttgtgtaaatggtttcttacaagatttcacatctttacaattctgatgcttttttaaaaaaactaaactttaatatttccatttaaaattaaaagaaatgggaaattgcctacggagcatattgcttttcagatcatagttatcttttccaataactttattgtaaattttaagggagtttcgttggaccctagagccataccttcactgacatctcatccgtttgtgtttccaaaagctgcttttacaggtcttagccgccgccccggaggccggtgtgggcgtgacctgcaggcgtccaccctgcggctacgggagaagtcttagtagcttgtatctggagtcttgagaaacacaaaccttacaaatgcatctttcttttgtcataaaattggaattacaattttcaactgggaaacagaaacacatttcttagcgtgctcagattttatatatcaccttatcaattttttccaaaacatgatttaaagcaacatctgtcctagtataattgttgcattttaaataacaatttattgaaaaatgttaagttttaccagcctaaaaaaagtaacaaaccaattaagtgtactttgggggcagggaggagtccttgatttgaataatcaggagttttgttggtccagtttcgccttctgagcagttcttctgtatcccgggaaaagtacgctcggccccaaactggtatttgtcagacgatacatgtaaaagtttgtccttgaacgtggaacaagacttgtgtaaagtctgagacgggaactagtgatcactagctcaagaactgcaaatgagacaggaagctgttcactgtgaaacagtctcttgcttgtcgtgtatttttcgagtacttctgaagtgtgaagtaaaaaaatctggctaatttatttgtacaaatacactttgataattttttatattttcataaacttttacagatgtaaaattaaagaacttcacttgtt

SEQ ID NO: 419312 - DNA, 4570 bp, Homo sapiens
  misc_feature (789)..(789): n is a, c, g, or t
taatcattctaagaagagccggatgttaatcagacgaggtgcagactctctttggaaagaagaaatcattcgacccgtccgccagagagcctcccgggtccaccgcaggtctcccccaggagcccaaaaccacagcagaggacggggtgccggcacctccgttgttagatccgatcgtccagcagttcggtcagttctcaaaagataaggctctagaggaagaggaggacgacaggccatacgaccctgaggaggagtacgacccggagagggccttcgacactcagcttgtggagcgagggcggcgccacgaggtggaaagggctcctgaagcagctgcagccgagcgggaagaggtggcctatgaccccgaggatgagaccatcttagaagaagcgaaagtgactgttgatgacctgcccaacaggatgtgtgccgacgtgagaaggaactccgtggagaggcctgccgagccggtggccggggctgcgacgccctccctggtggagcaacagaagatgctagaagagctgaacaaacagatcgaggagcagaagagacagctggaggagcaagaagaagctctcaggcagcagagggccgccgtcggggtctccatggcccacttctcggtgtcggacgccttgatgtctccaccaccaaagtcgtccttgcccaaggcagagctgttccagcaagagcagcagtctgcagacaagcccgcctcactgccccccgccagccaggcgtcaaaccacagggacccccggcaggcgaggcgcctggccnctgagaccggtgagggggagggggagcctctctccaggctctcggcacgtggtgcccagggtgccctgcccgagagagatgcttccaggggtggcctcgtgggccaggcgcccatgccagtcccggaggaaaaagagccagcctcttccccctgggcttcgggcgaaaagcccccagcggggtccgagcaggacggctggaaggcagagcctggggagggcacccgccccgccacggttggagacagctcggccaggcctgcccggagggtgctgctgcccacaccgccttgcggcgccctgcagcccggcttcccgctgcagcacgacggtgagagggaccctttcacctgcccggggttcgcgtcgcaggacaaggctctcggctcagcccagtatgaggacccaagaaatcttcattctgctggaaggagcagcagccctgcaggtgaaacagagggggacagagagccacaggccagacccggcgagggcaccgccccgctccccccaccaggacagaaagtggggggctctcagcccccgtttcagggtcagcgggaacctggacctcatgctttggggatgtcagggcttcacggccccaatttcccgggaccaagggggccagcccctccgtttccagaagagaatatcgcttctaacgatgggccacgagggcctccgccagccagattcggagcccagaaggggcccatcccttccttattctcggggcaacatgggccacctccttatggggacagcagaggcccctcaccctcttaccttggtggaccacgaggagtggcaccatcccaatttgaagaacgcaaggatccccatggggagaagagggagttccaggacgccccgtataacgaggtgacgggcgcccccgcccagtttgaagggacagagcaagccccatttctgggaagcagaggcggcgcgcctttccagttcggaggccagagaaggccactgctgtctcagctgaaaggcccccgaggcggcccccctccctctcagtttggaggtcagagaggaccaccccctggtcatttcgtgggcccaagagggccccatcctagtcagtttgaaactgcccggggccctcatcccaaccagtttgaaggacccagaggccaagcgcctaactttatgccaggtcccaggggcattcagcctcagcagttcgaagaccagagggtccattcaccaccaagattcacaaaccaaagggcgcctgcacccctgcagtttggtggactacgggggtccgcacccttttctgaaaaaaatgagcagaccccttcgcgatttcacttccagggccaggccccgcaggtgatgaagccgggccccaggcccctgctggagcttcccagccaccccccgcagcaccggaaggaccgctgggaggaggccgggccgccctccgcgctctcctccagtgcgcccggacagggccccgaggccgacggacagtgggcatcggccgacttccgagaggggaaaggccacgaatacagaaaccagactttcgaagggaggcagagagagcggtttgacgtggggcccaaagagaagccgctggaggagcccgacgcccagggccgggcgtccgaggacaggaggagagagcgcgagcgcggccgaaactggagccgagagcgggactgggaccggccccgggagtgggaccgacaccgggacaaggactccagccgggactgggacagaaaccgggagaggagcgccaaccgcgaccgagagcgcgaggccgaccggggcaaggagtgggaccgcagccgggagcggagcaggaaccgagagcgcgagcgagaccggaggcgcgaccgggaccggtcccggagcagagagcgggaccgagacaaggccagggacagggagcggggccgcgaccgcaaggaccggagcaagagcaaagagagcgctcgggacccgaagcccgaggcctcgagggcctccgacgctggcaccgcctcgcaggcctagacgccccggccgggcagagaccctttttaaagccacgttcgtaagatgcgttgaacaaatagcttttgaaatagccacgatcttagattcaggatagaatattctggacttaaacattactgtaattttgtgtaaatggtttcttacaagatttcacatctttacaattctgatgcttttttaaaaaaactaaactttaatatttccatttaaaattaaaagaaatgggaaattgcctacggagcatattgcttttcagatcatagttatcttttccaataactttattgtaaattttaagggagtttcgttggaccctagagccataccttcactgacatctcatccgtttgtgtttccaaaagctgcttttacaggtcttagccgccgccccggaggccggtgtgggcgtgacctgcaggcgtccaccctgcggctacgggagaagtcttagtagcttgtatctggagtcttgagaaacacaaaccttacaaatgcatctttcttttgtcataaaattggaattacaattttcaactgggaaacagaaacacatttcttagcgtgctcagattttatatatcaccttatcaattttttccaaaacatgatttaaagcaacatctgtcctagtataattgttgcattttaaataacaatttattgaaaaatgttaagttttaccagcctaaaaaaagtaacaaaccaattaagtgtactttgggggcagggaggagtccttgatttgaataatcaggagttttgttggtccagtttcgccttctgagcagttcttctgtatcccgggaaaagtacgctcggccccaaactggtatttgtcagacgatacatgtaaaagtttgtccttgaacgtggaacaagacttgtgtaaagtctgagacgggaactagtgatcactagctcaagaactgcaaatgagacaggaagctgttcactgtgaaacagtctcttgcttgtcgtgtatttttcgagtacttctgaagtgtgaagtaaaaaaatctggctaatttatttgtacaaatacactttgataattttttatattttcataaacttttacagatgtaaaattaaagaacttcacttgttctttggagtctgttattccattgtacgtcactacagatttttcactttatagcacagattttttaagttaagaaaacattgagaatgtatcagtttgagatgtttggtgttgaaagccaagtgtccataggttaaattacattaaagtaggtgtcacgttccaacatctagtacgatgagaaggttttgtttgtttaacatataaagcaaatttttctaatttaaatacacaaatgtaaaaatcaagtgtgtttctttagtttacttgatagagattcctgtacattgtattttatattgcggaggcttatatcactgtacatgagaacatggaacgacctaggttttgttactcgcagtagaataaacagctacaggaaaaaaaaaaaaaaaaaaaaaaaaaaaaaaaaaacaagcaaacagcagcagcccacaacgaacaaaaccacaacagacgacacagaacagaaacgaccaaacaaaaaaaaaaaaagcagtgctgcgcggcgcaccgcagtacacagagaagagtagtacaaagaccgacgactggatgggcggcggccccgcacagaagagcaaaaacgagtagtagaggattatccagcagagagagagcgcagtgacagccgaggcgtgtggttacacac

SEQ ID NO: 419313 - DNA, 969 bp, Homo sapiens
  misc_feature (915)..(915): n is a, c, g, or t
aagagaggaaagggaagagctaaggctaggtacgaggcctggtgctgagagagagagggttcgaagatggcggcgcgcaagggtcggcgtcgcacgtgtgaaaccggggaacccatggaagccgagtccggcgacacaagttccgagggcccggcccaggtctacctgcccggccgggggccgccgctacgcgaaggggaggagctggtcatggacgaggaggcctatgtgctctaccaccgagcgcagactggcgccccctgtctcagctttgacatagtccgggatcacctgggagacaaccggacagagcttcctcttacactttacttgtgtccccagaacccagttttttgtttgtttgtttgagacggagtcttggtctgtcgcccaggctggagtgcagtagcacgatcttggctcactgcaacctccgcctcctgggttaaagtgattctctcagctcagtctcccaggtagctgggattacaggcatgtgccaccacaccccgttaatttttgtatttttagtagagacggggtttcaccatgttggccaggctggtctcaaattcttgatctcaagtgatctgtccgccccggcctcccagagtgctgggttgggattacaggcgtgagccaccgcgtccggctcaggacccagttttggctgctggttcccagcaggggactcgggggatatacagtggctgcaccaaattggaggtgtgggttcctccaacacaatttgcttctgcccgttgtcttcctgccagctgggtttggccaggatttctccgtgtgggggctacatgcgaccctctcccctcctccctgactttagaggctggtgctgtgtcgggaggaaggtcagggctcctgagcagcaataaaggaccaggaagaggcctgggnggggtaaaaaaaaaaaccgggcttttcggcgcaaagcagacagccgcgtgccgc

SEQ ID NO: 419314 - DNA, 368 bp, Homo sapiens
ttgagcccaggaggttgaggctgcagtgagccattatggcatcactgcactccgtcctgggcaacagagcgggaccctgtctcaaaaacaaaaaagtttgaacggtcaatgcagtaagagtctggagcccaggggagaggtcagggctaggggtattggaaacctcgtggctggactgggtctcctagtgaacaaacacaatttgcttctgcccgttgtcttcctgccagctgggtttggccaggatttctccgtgtgggggctacatgcgaccctctcccctcctccctgactttagaggctggtgctgtgtcgggaggaaggtcagggctcctgagcagcaataaaggaccaggaagaggcctggg

SEQ ID NO: 419315 - DNA, 1781 bp, Homo sapiens
cgcaggcttctttcgctggcgccattacctgagttctcctccagcgtttccgcaccctctccgattagcggtcccaggagtttccaaggtaaccgcgcagtagggcggatctcattaggcggaaagcgaaacccggaagtgacgctcttaccgggtgtcagcagcgagagggttcgaagatggcggcgcgcaagggtcggcgtcgcacgtgtgaaaccggggaacccatggaagccgagtccggcgacacaagttccgagggcccggcccaggtctacctgcccggccgggggccgccgctacgcgaaggggaggagctggtcatggacgaggaggcctatgtgctctaccaccgagcgcagactggcgccccctgtctcagctttgacatagtccgggatcacctgggagacaaccggacagagcttcctcttacactttacttgtgtgctgggacccaggctgagagcgcccagagcaacagactgatgatgcttcggatgcacaatctgcatgggacaaagcccccaccctcagagggcagtgatgaagaagaagaggaggaagatgaagaggatgaagaagagcggaaacctcagctggagctggccatggtgccccactatggtggcatcaaccgagttcgggtgtcatggctgggtgaagagcctgtggctggggtgtggtcagagaagggccaggtggaggtgtttgcgctgcggcggcttctgcaggtggtggaggagccccaggccctggcagccttcctccgggatgagcaggcccaaatgaagcccatcttctccttcgctggacacatgggcgagggctttgcccttgactggtccccccgggtgaccggtcgcctgctgaccggtgactgtcaaaagaacatccacctctggacacctacggacggcggctcctggcacgtggaccagcggccattcgtgggccacacacgctctgtggaggacctgcagtggtcaccgactgagaacacggtgtttgcctcctgctcagctgacgcctccatccgcatctgggacatccgggcagcccccagcaaggcctgcatgctcaccacagccaccgcccatgatggggacgtcaatgtcatcagctggagccgccgggagcccttcctgctcagtggcggggatgatggggccctcaagatctgggaccttcggcagttcaagtctggttccccagtggccaccttcaagcagcacgtggcccccgtgacctccgtcgagtggcacccccaggacagcggggtctttgcagcctcgggtgcagaccaccagatcacacagtgggacctggcagtggagcgggaccctgaggcgggcgacgtggaggccgaccccggactggccgacctcccgcagcagctgctgttcgtgcaccagggcgagaccgagctgaaggagctgcactggcacccgcagtgcccagggctcctggtcagcacggcgctgtcaggcttcaccatcttccgcaccatcagcgtctgaggcgtcccactggctctgatcttgcttcctgcttggaaactgaagtcgaattgggctcccctggaaggggttcattcaggtctgttgactgagactggccggcctgtgggctgccgtgatggattctgtttgacgtattgttctctagaaggcctggctctgatccagtgacccctcctccctgactttagaggctggtgctgtgtcgggaggaaggtcagggctcctgagcagcaataaaggaccaggaagaggcctggg

SEQ ID NO: 419316 - DNA, 1259 bp, Homo sapiens
cgcaggcttctttcgctggcgccattacctgagttctcctccagcgtttccgcaccctctccgattagcggtcccaggagtttccaaggtaaccgcgcagtagggcggatctcattaggcggaaagcgaaacccggaagtgacgctcttaccgggtgtcagcagcgagagggttcgaagatggcggcgcgcaagggtcggcgtcgcacgtgtgaaaccggggaacccatggaagccgagtccggcgacacaagttccgagggcccggcccaggtctacctgcccggccgggggccgccgctacgcgaaggggaggagctggtcatggacgaggaggcctatgtgctctaccaccgagcgcagactggcgccccctgtctcagctttgacatagtccgggatcacctgggagacaaccggacagagcttcctcttacactttacttgtgtgctgggacccaggctgagagcgcccagagcaacagactgatgatgcttcggatgcacaatctgcatgggacaaagcccccaccctcagagggcagtgatgaagaagaagaggaggaagatgaagaggatgaagaagagcggaaacctcagctggagctggccatggtgccccactatggtggcatcaaccgagttcgggtgtcatggctgggtgaagagcctgtggctggggtgtggtcagagaagggccaggtggaggtgtttgcgctgcggcggcttctgcaggtggtggaggagccccaggccctggcagccttcctccgggatgagcaggcccaaatgaagcccatcttctccttcgctggacacatgggcgagggctttgcccttgactggtccccccgggtgaccggtcgcctgctgaccggtgactgtcaaaagaacatccacctctggacacctacggacggcggctcctggcacgtggaccagcggccattcgtgggccacacacgctctgtggaggacctgcagtggtcaccgactgagaacacggtgtttgcctcctgctcagctgacgcctccatccgcatctgggacatccgggcagcccccagcaaggcctgcatgctcaccacagccaccgcccatgatggggacgtcaatgtcatcagctggagccgccgggagcccttcctgctcagtggcggggatgatggggccctcaagatctgggaccttcggcagttcaagtctgttcccagtgggcacttaagcggcgtggcccgtgacctccggagtggcccagag

SEQ ID NO: 419317 - DNA, 486 bp, Homo sapiens
agagtctggagcccaggggagaggtcagggctaggggtattggaaacctcgtggctggactgggtctcctagtgaacaaacacagaggcaaggagatccgaggactgagtcttgtggccttctagcatttagagggttaccgagaccaggagcctgaacaccctcccaagggctggtgggaattgcagcctcaactcccaggcatcctggggctctatcctcccacctcagctcccccacccactcccaccccctgtggagagctgtcccagttaccatgctggtttttgcaggttgtgattttcttcccacagaggtttcaaggagctgtagtcccaggcctgggagatctgaggaagcgcacttctggttctctgggatatggggagcgtggggtcagtgccttgatcctcctctcccctcgcttcacatcacccttcccccaccgctcttctgcaggtgtcatggctgggtgaagagcctgtg

SEQ ID NO: 419318 - DNA, 290 bp, Homo sapiens
cttgcttcctgcttggaaactgaagtcgaattgggctcccctggaaggggttcattcaggtctgttgactgagactggccggcctgtgggctgccgtgatggattctgtttgacgtattgttctctagaaggcctggctctgatccagtgacccctctcaccaaagaactcggtttaaccagggctctgtaagaccactcccacccagagacttgtgtggcctggtgtggcctgtgtgtcggattccttcctgtcagctgtgacccatttgacctgtgtccccagaaccc

SEQ ID NO: 419319 - DNA, 2397 bp, Homo sapiens
cgcaggcttctttcgctggcgccattacctgagttctcctccagcgtttccgcaccctctccgattagcggtcccaggagtttccaaggtaaccgcgcagtagggcggatctcattaggcggaaagcgaaacccggaagtgacgctcttaccgggtgtcagcagcgagagggttcgaagatggcggcgcgcaagggtcggcgtcgcacgtgtgaaaccggggaacccatggaagccgagtccggcgacacaagttccgagggcccggcccaggtctacctgcccggccgggggccgccgctacgcgaaggggaggagctggtcatggacgaggaggcctatgtgctctaccaccgagcgcagactggcgccccctgtctcagctttgacatagtccgggatcacctgggagacaaccggacagagcttcctcttacactttacttgtgtgctgggacccaggctgagagcgcccagagcaacagactgatgatgcttcggatgcacaatctgcatgggacaaagcccccaccctcagagggcagtgatgaagaagaagaggaggaagatgaagaggatgaagaagagcggaaacctcagctggagctggccatggtgccccactatggtggcatcaaccgagttcgggtgtcatggctgggtgaagagcctgtggctggggtgtggtcagagaagggccaggtggaggtgtttgcgctgcggcggcttctgcaggtggtggaggagccccaggccctggcagccttcctccgggatgagcaggcccaaatgaagcccatcttctccttcgctggacacatgggcgagggctttgcccttgactggtccccccgggtgaccggtcgcctgctgaccggtgactgtcaaaagaacatccacctctggacacctacggacggcggctcctggcacgtggaccagcggccattcgtgggccacacacgctctgtggaggacctgcagtggtcaccgactgagaacacggtgtttgcctcctgctcagctgacgcctccatccgcatctgggacatccgggcagcccccagcaaggcctgcatgctcaccacagccaccgcccatgatggggacgtcaatgtcatcagctggagccgccgggagcccttcctgctcagtggcggggatgatggggccctcaagatctgggaccttcggcagttcaagtctggttccccagtggccaccttcaagcagcacgtggcccccgtgacctccgtcgagtggcacccccaggacagcggggtctttgcagcctcgggtgcagaccaccagatcacacagtgggacctggcagtggagcgggaccctgaggcgggcgacgtggaggccgaccccggactggccgacctcccgcagcagctgctgttcgtgcaccagggcgagaccgagctgaaggagctgcactggcacccgcagtgcccagggctcctggtcagcacggcgctgtcaggcttcaccatcttccgcaccatcagcgtctgaggcgtcccactggctctgatcttgcttcctgcttggaaactgaagtcgaattgggctcccctggaaggggttcattcaggtctgttgactgagactggccggcctgtgggctgccgtgatggattctgtttgacgtattgttctctagaaggcctggctctgatccagtgacccctctcaccaaagaactcggtttaaccagggctctgtaagaccactcccacccagagacttgtgtggcctggtgtggcctgtgtgtcggattccttcctgtcagctgtgacccatttgacctgtgtccccagaacccagttttttgtttgtttgtttgagacggagtcttggtctgtcgcccaggctggagtgcagtagcacgatcttggctcactgcaacctccgcctcctgggttaaagtgattctctcagctcagtctcccaggtagctgggattacaggcatgtgccaccacaccccgttaatttttgtatttttagtagagacggggtttcaccatgttggccaggctggtctcaaattcttgatctcaagtgatctgtccgccccggcctcccagagtgctgggttgggattacaggcgtgagccaccgcgtccggctcaggacccagttttggctgctggttcccagcaggggactcgggggatatacagtggctgcaccaaattggaggtgtgggttcctccaacacaatttgcttctgcccgttgtcttcctgccagctgggtttggccaggatttctccgtgtgggggctacatgcgaccctctcccctcctccctgactttagaggctggtgctgtgtcgggaggaaggtcagggctcctgagcagcaataaaggaccaggaagaggcctggg

SEQ ID NO: 419320 - DNA, 1588 bp, Homo sapiens
  misc_feature (1588)..(1588): n is a, c, g, or t
cgcaggcttctttcgctggcgccattacctgagttctcctccagcgtttccgcaccctctccgattagcggtcccaggagtttccaaggtaaccgcgcagtagggcggatctcattaggcggaaagcgaaacccggaagtgacgctcttaccgggtgtcagcagcgagagggttcgaagatggcggcgcgcaagggtcggcgtcgcacgtgtgaaaccggggaacccatggaagccgagtccggcgacacaagttccgagggcccggcccaggtctacctgcccggccgggggccgccgctacgcgaaggggaggagctggtcatggacgaggaggcctatgtgctctaccaccgagcgcagactggcgccccctgtctcagctttgacatagtccgggatcacctgggagacaaccggacagagcttcctcttacactttacttgtgtgctgggacccaggctgagagcgcccagagcaacagactgatgatgcttcggatgcacaatctgcatgggacaaagcccccaccctcagagggcagtgatgaagaagaagaggaggaagatgaagaggatgaagaagagcggaaacctcagctggagctggccatggtgccccactatggtggcatcaaccgagttcgggtgtcatggctgggtgaagagcctgtggctggggtgtggtcagagaagggccaggtggaggtgtttgcgctgcggcggcttctgcaggtggtggaggagccccaggccctggcagccttcctccgggatgagcaggcccaaatgaagcccatcttctccttcgctggacacatgggcgagggctttgcccttgactggtccccccgggtgaccggtcgcctgctgaccggtgactgtcaaaagaacatccacctctggacacctacggacggcggctcctggcacgtggaccagcggccattcgtgggccacacacgctctgtggaggacctgcagtggtcaccgactgagaacacggtgtttgcctcctgctcagctgacgcctccatccgcatctgggacatccgggcagcccccagcaaggcctgcatgctcaccacagccaccgcccatgatggggacgtcaatgtcatcagctggagccgccgggagcccttcctgctcagtggcggggatgatggggccctcaagatctgggaccttcggcagttcaagtctggttccccagtggccaccttcaagcagcacgtggcccccgtgacctccgtcgagtggcacccccaggacagcggggtctttgcagcctcgggtgcagaccaccagatcacacagtgggacctggcagtggagcgggaccctgaggcgggcgacgtggaggccgaccggatggcgaactaccggagagtgtggttctgaacaggcgagaacgatgaagggttggctggaccgagtgcccaggtctgggacaagggctggaagtacacttccgcacacacgttggggccacggctattgtgccctcggaaggagaagggcccgggggccaagtggagaaagggcgggcgaatgtggaaaggggcttgactaacaagaagggaccn

SEQ ID NO: 419321 - DNA, 2000 bp, Homo sapiens
  misc_feature (6)..(7): n is a, c, g, or t
ggcacnngcttcgcagaaacagccagaacccatctacagcaagaagacggaaatccaaaggcagacagtacgggctcccttcgccaaactcttcattttctctgcacttcaggtggcaagacagctccttcttcagcagcaacagcagcagcaagttagtggattaaaatctcccaagaggaatgacaaacaaccagctcttcaggttcccgtgtcagtggctatgatgacacctcaagttatcactccccagcaaatgcagcagatcctccagcaacaagtgctgagccctcagcagctccaggttctcctccagcagcagcaggccctcatgcttcaacagcagcagcttcaagagttttataaaaaacaacaggaacagttgcagcttcaacttttacaacaacaacatgctggaaaacagcctaaagagcaacagcaggtggctacccagcagttggcttttcagcagcagcttttacagatgcagcagttacagcagcagcacctcctgtctttgcagcgccaaggccttctgacaattcagcccgggcagcctgcccttccccttcaacctcttgctcaaggcatgattccaacagaactgcagcagctctggaaagaagtgacaagtgctcatactgcagaagaaaccacaggcaacaatcacagcagtttggatctgaccacgacatgtgtctcctcctctgcaccttccaagacctccttaataatgaacccacatgcctctaccaatggacagctctcagtccacactcccaaaagggaaagtttgtcccatgaggagcacccccatagccatcctctctatggacatggtgtatgcaagtggccaggctgtgaagcagtgtgcgaagatttccaatcatttctaaaacatctcaacagtgagcatgcgctggacgatagaagtacagcccaatgtagagtacaaatgcaggttgtacagcagttagagctacagcttgcaaaagacaaagaacgcctgcaagccatgatgacccacctgcatgtgaagtctacagaacccaaagccgcccctcagcccttgaatctggtatcaagtgtcactctctccaagtccgcatcggaggcttctccacagagcttacctcatactccaacgaccccaaccgcccccctgactcccgtcacccaaggcccctctgtcatcacaaccaccagcatgcacacggtgggacccatccgcaggcggtactcagacaaatacaacgtgcccatttcgtcagcagatattgcgcagaaccaagaattttataagaacgcagaagttagaccaccatttacatatgcatctttaattaggcaggccattctcgaatctccagaaaagcagctaacactaaatgagatctataactggttcacacgaatgtttgcttacttccgacgcaacgcggccacgtggaagaatgcagtgcgtcataatcttagtcttcacaagtgttttgtgcgagtagaaaacgttaaaggggcagtatggacagtggatgaagtagaattccaaaaacgaaggccacaaaagatcagtggtaacccttcccttattaaaaacatgcagagcagccacgcctactgcacacctctcaatgcagctttacaggcttcaatggctgagaatagtatacctctatacactaccgcttccatgggaaatcccactctgggcaacttagccagcgcaatacgggaagagctgaacggggcaatggagcataccaacagcaacgagagtgacagcagtccaggcagatctcctatgcaagccgtgcatcctgtacacgtcaaagaagagcccctcgatccagaggaagctgaagggcccctgtccttagtgacaacagccaaccacagtccagattttgaccatgacagagattacgaagatgaaccagtaaacgaggacatggagtgactatcggggcgggccaaccccgagaatgaagattggaaaaagg

SEQ ID NO: 419322 - DNA, 1628 bp, Homo sapiens
  misc_feature (3)..(3): n is a, c, g, or t
  misc_feature (5)..(8): n is a, c, g, or t
ggnannnncacggggtactcccagctgaaccggctctgaatgtagctaactcaactgtcagaactgcatgaaggacggttcccgtgtcagtggctatgatgacacctcaagttatcactccccagcaaatgcagcagatcctccagcaacaagtgctgagccctcagcagctccaggttctcctccagcagcagcaggccctcatgcttcaacaggcatgattccaacagaactgcagcagctctggaaagaagtgacaagtgctcatactgcagaagaaaccacaggcaacaatcacagcagtttggatctgaccacgacatgtgtctcctcctctgcaccttccaagacctccttaataatgaacccacatgcctctaccaatggacagctctcagtccacactcccaaaagggaaagtttgtcccatgaggagcacccccatagccatcctctctatggacatggtgtatgcaagtggccaggctgtgaagcagtgtgcgaagatttccaatcatttctaaaacatctcaacagtgagcatgcgctggacgatagaagtacagcccaatgtagagtacaaatgcaggttgtacagcagttagagctacagcttgcaaaagacaaagaacgcctgcaagccatgatgacccacctgcatgtgaagtctacagaacccaaagccgcccctcagcccttgaatctggtatcaagtgtcactctctccaagtccgcatcggaggcttctccacagagcttacctcatactccaacgaccccaaccgcccccctgactcccgtcacccaaggcccctctgtcatcacaaccaccagcatgcacacggtgggacccatccgcaggcggtactcagacaaatacaacgtgcccatttcgtcagcagatattgcgcagaaccaagaattttataagaacgcagaagttagaccaccatttacatatgcatctttaattaggcaggccattctcgaatctccagaaaagcagctaacactaaatgagatctataactggttcacacgaatgtttgcttacttccgacgcaacgcggccacgtggaagaatgcagtgcgtcataatcttagtcttcacaagtgttttgtgcgagtagaaaacgttaaaggggcagtatggacagtggatgaagtagaattccaaaaacgaaggccacaaaagatcagtggtaacccttcccttattaaaaacatgcagagcagccacgcctactgcacacctctcaatgcagctttacaggcttcaatggctgagaatagtatacctctatacactaccgcttccatgggaaatcccactctgggcaacttagccagcgcaatacgggaagagctgaacggggcaatggagcataccaacagcaacgagagtgacagcagtccaggcagatctcctatgcaagccgtgcatcctgtacacgtcaaagaagagcccctcgatccagaggaagctgaagggcccctgtccttagtgacaacagccaaccacagtccagattttgaccatgacagagattacgaagatgaaccagtaaacgaggacatggagtgactatcggggcgggccaaccccgagaatgaagattggaaaaagg

SEQ ID NO: 419323 - DNA, 968 bp, Homo sapiens
gccattcgcaccaacctctcactgcataagtgctttatcagagtagaggatgagtttgggtccttttggacagttgatgatgaagagtttaaacgtggccgccatattcaacgaggccgtcctcgcaaatactgccccgatgaaaactttgacgagcttgtcgcacataacccttcccttattaaaaacatgcagagcagccacgcctactgcacacctctcaatgcagctttacaggcttcaatggctgagaatagtatacctctatacactaccgcttccatgggaaatcccactctgggcaacttagccagcgcaatacgggaagagctgaacggggcaatggagcataccaacagcaacgagagtgacagcagtccaggcagatctcctatgcaagccgtgcatcctgtacacgtcaaagaagagcccctcgatccagaggaagctgaagggcccctgtccttagtgacaacagccaaccacagtccagattttgaccatgacagagattacgaagatgaaccagtaaacgaggacatggagtgactatcggggcgggccaaccccgagaatgaagattggaaaaaggaaaaaaaaaaaaacacgtcaaaagttagcagtgaaattgttctccatttgttgtacagtctggaggattttcactacgttttgacaactctgaaatgtgttaactcttagtgccatcaagaaccccatttgggagtatttttgatttttctactttttgttgaaaaaaggaatttgtactctgtgcattggatggacttgtttggtacttgggattttcctctcttaaccgtcaacatcagtgttgtaaatttgctaaactgattcacttttagcagcagactttgaactgcagtcctgccaacgttggacactgaggacgcccgacagagcttgtgcacctaagctgcagaccaagcctttgcccagaatttaag

SEQ ID NO: 419324 - DNA, 692 bp, Homo sapiens
gtctagaggatcccttcgattggcgggcacttagccagcgcaatacgggaagagctgaacggggcaatggagcataccaacagcaacgagagtgacagcagtccaggcagatctcctatgcaagccgtgcatcctgtacacgtcaaagaagagcccctcgatccagaggaagctgaagggcccctgtccttagtgacaacagccaaccacagtccagattttgaccatgacagagattacgaagatgaaccagtaaacgaggacatggagtgactatcggggcgggccaaccccgagaatgaagattggaaaaaggaaaaaaaaaaaaacacgtcaaaagttagcagtgaaattgttctccatttgttgtacagtctggaggattttcactacgttttgacaactctgaaatgtgttaactcttagtgccatcaagaaccccatttgggagtatttttgatttttctactttttgttgaaaaaaggaatttgtactctgtgcattggatggacttgtttggtacttgggattttcctctcttaaccgtcaacatcagtgttgtaaatttgctaaactgattcacttttagcagcagactttgaactgcagtcctgccaacgttggacactgaggacgcccgacagagcttgtgcacctaagctgcagaccaagcctttgcccagaatttaag

SEQ ID NO: 419325 - DNA, 716 bp, Homo sapiens
ccactacgggacctgttatctggtactcagtgtggttctaggaccaccggcatcacttgggggcttgttagagatgcagagtctcaggccccaccccagacctgaatcacacactgcatttcaacaaggcccacaggtgactgcagcgtgtgttaaagtatgagaaatgccaccagggaggagaggcccacaccagtccagagactagtgattcagagcatcactacccaagagaactttacgcagtgatgcaaatgttccgtctgtctctgtgctggccagaattaaccgctagtcacatggggcctttgaacataaatgtggctagcacaactcagaaactgaatattaaatgtagtaagatttcgttcatttcaatttaaagagccacgtgtggctaatggtaacaatactggacagagttctagttctagagtgcggcttttctgttgccccaaacttttcagtgcacctgagctgcaatgggctgggaagtaccctcactgaacctctgcatattttttccaggcatcctgtacacgtcaaagaagagcccctcgatccagaggaagctgaagggcccctgtccttagtgacaacagccaaccacagtccagattttgaccatgacagagattacgaagatgaaccagtaaacgaggacatggagtgactatcggggcgggccaaccccgagaatgaagattggaaaaagg

SEQ ID NO: 419326 - DNA, 545 bp, Homo sapiens
ttaaaagccttcctgccatccctctagcagtcactgtaaagttcaaatctcaaagatgcttaggagccaagattctctctgctcgtgcccagcagcccctgctgtgagctcactgccttccccagcacgacctcctaggctgctgccttcctttctgttggagtctggagtcaggctaactcctaaaaatctgcagagaggtctctggagggaggacttcccaagcctgttactacctaagccagaattttacacctagtttccttgaatagagaagtccaaccccagaggtgtgcacacacacccgccctgcaaatcagtgacggggagaaagcctgacttttcttgggttttgctagtgggggaaattgctcatttggaagggcaccagcaagcttaaaacaaaacttagctaggaactcagcagtcgactgtgtttaactttgagtttttatgtttttcttacacagtaacccttcccttattaaaaacatgcagagcagccacgcctactgcacaccaagtggttccttgtcgggtaccga

SEQ ID NO: 419327 - DNA, 464 bp, Homo sapiens
tcgagctttgtaccctgtcgctgtgtctacgaggacatggagtgactatcggggcgggccaaccccgagaatgaagattggaaaaaggaaaaaaaaaaaaacacgtcaaaagttagcagtgaaattgttctccatttgttgtacagtctggaggattttcactacgttttgacaactctgaaatgtgttaactcttagtgccatcaagaaccccatttgggagtatttttgatttttctactttttgttgaaaaaaggaatttgtactctgtgcattggatggacttgtttggtacttgggattttcctctcttaaccgtcaacatcagtgttgtaaatttgctaaactgattcacttttagcagcagactttgaactgcagtcctgccaacgttggacactgaggacgcccgacagagcttgtgcacctaagctgcagaccaagcctttgcccagaatttaag

SEQ ID NO: 419328 - DNA, 582 bp, Homo sapiens
aggtaatgattgcattgtcttcccgggtaagtcgaggcggccgcgggcgcggggtccagggacaccggagagccccaggcggcactaggggttctccgtccccaaagagccagccggggtggcgcgagcctagcgataaggcaccgggagcgaggaatgtgcccatcctcaggccgtgtcccagaagcttttgttgacaattccagtttccgaacaaaacatttcggcaatggtgagggcttcgatcccttctctgatttgctgtcagccatgaacggatggatgtgatgcctgctagccaaaagggtgagtgaatgaatgtttgtgattattcatctgaaaattcacaagacaaaaagtccttcaagacagttgcccacccaggatgagagattcttatcttgaaagaagggacaaactctgtcattgttttctggtgtaatcttttcagataattcctgcggtgatctgaggatttataaaaggcataataggacataggataacttcctctgttggcttgtttgttttaatcatactctgaaggatggactatctcagttttggtccatgtgcaacgtt

SEQ ID NO: 419329 - DNA, 342 bp, Homo sapiens
aattttacacttaatcgcgatctcgcgatcagtgttttgtgttcacctgtctgtccatctgtctttctgtctgtcagtggcatctcataaaccatcagccctctaggagtcccagcagttggcttaagagactaatttcaagcccttgggagttggaagtcctgcaggtccccttgtggggagcagttgctgagacgaagatgagtggacctgtgtgtcagcctaacccttccccattttgaataaaattattctttggagaaatggttcccactgctttcatgcaaaaataaaaattaaacgaaaaacagcttaagcctgtgaagaaggaaataagagcta

SEQ ID NO: 419330 - DNA, 2607 bp, Homo sapiens
aggaggggggtgggcgccagcgccccggcgaacggcaaagagggagccgctcccgctcggggggccgctggagtgcccagcgggaacccgaaagtttgtaagaggaagagagcgcgcggcgagcgagcgagcgggccgggggcagcggcagcggcgccggggaccatggtgctgccggcgcctcctccgcgggcgtgaaggcggcgctcctactccctccccggactccgcggtgtcccagaagcttttgttgacaattccagtttccgaacaaaacatttcggcaatggtgagggcttcgatcccttctctgatttgctgtcagccatgaacggatggatgtgatgcctgctagccaaaaggcttccctctgtgtgttgcagtcctgtggcattatgcatgccccctcccagtgaccccaggctttttatggctgtgagacacgttaaaatttcaggggtaagacgtgaccttttgaggtgactataactgaagattgctttacagaagccaaaaaaggtttttgagtcatgatgcaagaatctgggactgagacaaaaagtaacggttcagccatccagaatgggtcgggcggcagcaaccacttactagagtgcggcggtcttcgggaggggcggtccaacggagagacgccggccgtggacatcggggcagctgacctcgcccacgcccagcagcagcagcaacaggcacttcaggtggcaagacagctccttcttcagcagcaacagcagcagcaagttagtggattaaaatctcccaagaggaatgacaaacaaccagctcttcaggttcccgtgtcagtggctatgatgacacctcaagttatcactccccagcaaatgcagcagatcctccagcaacaagtgctgagccctcagcagctccaggttctcctccagcagcagcaggccctcatgcttcaacagcagcagcttcaagagttttataaaaaacaacaggaacagttgcagcttcaacttttacaacaacaacatgctggaaaacagcctaaagagcaacagcaggtggctacccagcagttggcttttcagcagcagcttttacagatgcagcagttacagcagcagcacctcctgtctttgcagcgccaaggccttctgacaattcagcccgggcagcctgcccttccccttcaacctcttgctcaaggcatgattccaacagaactgcagcagctctggaaagaagtgacaagtgctcatactgcagaagaaaccacaggcaacaatcacagcagtttggatctgaccacgacatgtgtctcctcctctgcaccttccaagacctccttaataatgaacccacatgcctctaccaatggacagctctcagtccacactcccaaaagggaaagtttgtcccatgaggagcacccccatagccatcctctctatggacatggtgtatgcaagtggccaggctgtgaagcagtgtgcgaagatttccaatcatttctaaaacatctcaacagtgagcatgcgctggacgatagaagtacagcccaatgtagagtacaaatgcaggttgtacagcagttagagctacagcttgcaaaagacaaagaacgcctgcaagccatgatgacccacctgcatgtgaagtctacagaacccaaagccgcccctcagcccttgaatctggtatcaagtgtcactctctccaagtccgcatcggaggcttctccacagagcttacctcatactccaacgaccccaaccgcccccctgactcccgtcacccaaggcccctctgtcatcacaaccaccagcatgcacacggtgggacccatccgcaggcggtactcagacaaatacaacgtgcccatttcgtcagcagatattgcgcagaaccaagaattttataagaacgcagaagttagaccaccatttacatatgcatctttaattaggcaggccattctcgaatctccagaaaagcagctaacactaaatgagatctataactggttcacacgaatgtttgcttacttccgacgcaacgcggccacgtggaagaatgcagtgcgtcataatcttagtcttcacaagtgttttgtgcgagtagaaaacgttaaaggggcagtatggacagtggatgaagtagaattccaaaaacgaaggccacaaaagatcagtggtaacccttcccttattaaaaacatgcagagcagccacgcctactgcacacctctcaatgcagctttacaggcttcaatggctgagaatagtatacctctatacactaccgcttccatgggaaatcccactctgggcaacttagccagcgcaatacgggaagagctgaacggggcaatggagcataccaacagcaacgagagtgacagcagtccaggcagatctcctatgcaagccgtgcatcctgtacacgtcaaagaagagcccctcgatccagaggaagctgaagggcccctgtccttagtgacaacagccaaccacagtccagattttgaccatgacagagattacgaagatgaaccagtaaacgaggacatggagtgactatcggggcgggccaaccccgagaatgaagattggaaaaagg

SEQ ID NO: 419331 - DNA, 2255 bp, Homo sapiens
  misc_feature (6)..(6): n is a, c, g, or t
cccggncccggggaattccccgggagtctagagacttagaagcatttattaacagtgaggctgctgaaggtttttaataacaaaattacaaatactctatctaattggtaagacgtgaccttttgaggtgactataactgaagattgctttacagaagccaaaaaaggtttttgagtcatgatgcaagaatctgggactgagacaaaaagtaacggttcagccatccagaatgggtcgggcggcagcaaccacttactagagtgcggcggtcttcgggaggggcggtccaacggagagacgccggccgtggacatcggggcagctgacctcgcccacgcccagcagcagcagcaacaggcacttcaggtggcaagacagctccttcttcagcagcaacagcagcagcaagttagtggattaaaatctcccaagaggaatgacaaacaaccagctcttcaggttcccgtgtcagtggctatgatgacacctcaagttatcactccccagcaaatgcagcagatcctccagcaacaagtgctgagccctcagcagctccaggttctcctccagcagcagcaggccctcatgcttcaacagcagcagcttcaagagttttataaaaaacaacaggaacagttgcagcttcaacttttacaacaacaacatgctggaaaacagcctaaagagcaacagcaggtggctacccagcagttggcttttcagcagcagcttttacagatgcagcagttacagcagcagcacctcctgtctttgcagcgccaaggccttctgacaattcagcccgggcagcctgcccttccccttcaacctcttgctcaaggcatgattccaacagaactgcagcagctctggaaagaagtgacaagtgctcatactgcagaagaaaccacaggcaacaatcacagcagtttggatctgaccacgacatgtgtctcctcctctgcaccttccaagacctccttaataatgaacccacatgcctctaccaatggacagctctcagtccacactcccaaaagggaaagtttgtcccatgaggagcacccccatagccatcctctctatggacatggtgtatgcaagtggccaggctgtgaagcagtgtgcgaagatttccaatcatttctaaaacatctcaacagtgagcatgcgctggacgatagaagtacagcccaatgtagagtacaaatgcaggttgtacagcagttagagctacagcttgcaaaagacaaagaacgcctgcaagccatgatgacccacctgcatgtgaagtctacagaacccaaagccgcccctcagcccttgaatctggtatcaagtgtcactctctccaagtccgcatcggaggcttctccacagagcttacctcatactccaacgaccccaaccgcccccctgactcccgtcacccaaggcccctctgtcatcacaaccaccagcatgcacacggtgggacccatccgcaggcggtactcagacaaatacaacgtgcccatttcgtcagcagatattgcgcagaaccaagaattttataagaacgcagaagttagaccaccatttacatatgcatctttaattaggcaggccattctcgaatctccagaaaagcagctaacactaaatgagatctataactggttcacacgaatgtttgcttacttccgacgcaacgcggccacgtggaagaatgcagtgcgtcataatcttagtcttcacaagtgttttgtgcgagtagaaaacgttaaaggggcagtatggacagtggatgaagtagaattccaaaaacgaaggccacaaaagatcagtggtaacccttcccttattaaaaacatgcagagcagccacgcctactgcacacctctcaatgcagctttacaggcttcaatggctgagaatagtatacctctatacactaccgcttccatgggaaatcccactctgggcaacttagccagcgcaatacgggaagagctgaacggggcaatggagcataccaacagcaacgagagtgacagcagtccaggcagatctcctatgcaagccgtgcatcctgtacacgtcaaagaagagcccctcgatccagaggaagctgaagggcccctgtccttagtgacaacagccaaccacagtccagattttgaccatgacagagattacgaagatgaaccagtaaacgaggacatggagtgactatcggggcgggccaaccccgagaatgaagattggaaaaagg

SEQ ID NO: 419332 - DNA, 1884 bp, Homo sapiens
tcctctgcaccttccaagacctccttaataatgaacccacatgcctctaccaatggacagctctcagtccacactcccaaaagggaaaggttcccgtgtcagtggctatgatgacacctcaagttatcactccccagcaaatgcagcagatcctccagcaacaagtgctgagccctcagcagctccaggttctcctccagcagcagcaggccctcatgcttcaacagcagcagcttcaagagttttataaaaaacaacaggaacagttgcagcttcaacttttacaacaacaacatgctggaaaacagcctaaagagcaacagcaggtggctacccagcagttggcttttcagcagcagcttttacagatgcagcagttacagcagcagcacctcctgtctttgcagcgccaaggccttctgacaattcagcccgggcagcctgcccttccccttcaacctcttgctcaaggcatgattccaacagaactgcagcagctctggaaagaagtgacaagtgctcatactgcagaagaaaccacaggcaacaatcacagcagtttggatctgaccacgacatgtgtctcctcctctgcaccttccaagacctccttaataatgaacccacatgcctctaccaatggacagctctcagtccacactcccaaaagggaaagtttgtcccatgaggagcacccccatagccatcctctctatggacatggtgtatgcaagtggccaggctgtgaagcagtgtgcgaagatttccaatcatttctaaaacatctcaacagtgagcatgcgctggacgatagaagtacagcccaatgtagagtacaaatgcaggttgtacagcagttagagctacagcttgcaaaagacaaagaacgcctgcaagccatgatgacccacctgcatgtgaagtctacagaacccaaagccgcccctcagcccttgaatctggtatcaagtgtcactctctccaagtccgcatcggaggcttctccacagagcttacctcatactccaacgaccccaaccgcccccctgactcccgtcacccaaggcccctctgtcatcacaaccaccagcatgcacacggtgggacccatccgcaggcggtactcagacaaatacaacgtgcccatttcgtcagcagatattgcgcagaaccaagaattttataagaacgcagaagttagaccaccatttacatatgcatctttaattaggcaggccattctcgaatctccagaaaagcagctaacactaaatgagatctataactggttcacacgaatgtttgcttacttccgacgcaacgcggccacgtggaagaatgcagtgcgtcataatcttagtcttcacaagtgttttgtgcgagtagaaaacgttaaaggggcagtatggacagtggatgaagtagaattccaaaaacgaaggccacaaaagatcagtggtaacccttcccttattaaaaacatgcagagcagccacgcctactgcacacctctcaatgcagctttacaggcttcaatggctgagaatagtatacctctatacactaccgcttccatgggaaatcccactctgggcaacttagccagcgcaatacgggaagagctgaacggggcaatggagcataccaacagcaacgagagtgacagcagtccaggcagatctcctatgcaagccgtgcatcctgtacacgtcaaagaagagcccctcgatccagaggaagctgaagggcccctgtccttagtgacaacagccaaccacagtccagattttgaccatgacagagattacgaagatgaaccagtaaacgaggacatggagtgactatcggggcgggccaaccccgagaatgaagattggaaaaagg

SEQ ID NO: 419333 - DNA, 2983 bp, Homo sapiens
aggaggggggtgggcgccagcgccccggcgaacggcaaagagggagccgctcccgctcggggggccgctggagtgcccagcgggaacccgaaagtttgtaagaggaagagagcgcgcggcgagcgagcgagcgggccgggggcagcggcagcggcgccggggaccatggtgctgccggcgcctcctccgcgggcgtgaaggcggcgctcctactccctccccggactccgcggtgtcccagaagcttttgttgacaattccagtttccgaacaaaacatttcggcaatggtgagggcttcgatcccttctctgatttgctgtcagccatgaacggatggatgtgatgcctgctagccaaaaggcttccctctgtgtgttgcagtcctgtggcattatgcatgccccctcccagtgaccccaggctttttatggctgtgagacacgttaaaatttcaggggtaagacgtgaccttttgaggtgactataactgaagattgctttacagaagccaaaaaaggtttttgagtcatgatgcaagaatctgggactgagacaaaaagtaacggttcagccatccagaatgggtcgggcggcagcaaccacttactagagtgcggcggtcttcgggaggggcggtccaacggagagacgccggccgtggacatcggggcagctgacctcgcccacgcccagcagcagcagcaacaggcacttcaggtggcaagacagctccttcttcagcagcaacagcagcagcaagttagtggattaaaatctcccaagaggaatgacaaacaaccagctcttcaggttcccgtgtcagtggctatgatgacacctcaagttatcactccccagcaaatgcagcagatcctccagcaacaagtgctgagccctcagcagctccaggttctcctccagcagcagcaggccctcatgcttcaacagcagcagcttcaagagttttataaaaaacaacaggaacagttgcagcttcaacttttacaacaacaacatgctggaaaacagcctaaagagcaacagcaggtggctacccagcagttggcttttcagcagcagcttttacagatgcagcagttacagcagcagcacctcctgtctttgcagcgccaaggccttctgacaattcagcccgggcagcctgcccttccccttcaacctcttgctcaaggcatgattccaacagaactgcagcagctctggaaagaagtgacaagtgctcatactgcagaagaaaccacaggcaacaatcacagcagtttggatctgaccacgacatgtgtctcctcctctgcaccttccaagacctccttaataatgaacccacatgcctctaccaatggacagctctcagtccacactcccaaaagggaaagtttgtcccatgaggagcacccccatagccatcctctctatggacatggtgtatgcaagtggccaggctgtgaagcagtgtgcgaagatttccaatcatttctaaaacatctcaacagtgagcatgcgctggacgatagaagtacagcccaatgtagagtacaaatgcaggttgtacagcagttagagctacagcttgcaaaagacaaagaacgcctgcaagccatgatgacccacctgcatgtgaagtctacagaacccaaagccgcccctcagcccttgaatctggtatcaagtgtcactctctccaagtccgcatcggaggcttctccacagagcttacctcatactccaacgaccccaaccgcccccctgactcccgtcacccaaggcccctctgtcatcacaaccaccagcatgcacacggtgggacccatccgcaggcggtactcagacaaatacaacgtgcccatttcgtcagcagatattgcgcagaaccaagaattttataagaacgcagaagttagaccaccatttacatatgcatctttaattaggcaggccattctcgaatctccagaaaagcagctaacactaaatgagatctataactggttcacacgaatgtttgcttacttccgacgcaacgcggccacgtggaagaatgcagtgcgtcataatcttagtcttcacaagtgttttgtgcgagtagaaaacgttaaaggggcagtatggacagtggatgaagtagaattccaaaaacgaaggccacaaaagatcagtggtaacccttcccttattaaaaacatgcagagcagccacgcctactgcacacctctcaatgcagctttacaggcttcaatggctgagaatagtatacctctatacactaccgcttccatgggaaatcccactctgggcaacttagccagcgcaatacgggaagagctgaacggggcaatggagcataccaacagcaacgagagtgacagcagtccaggcagatctcctatgcaagccgtgcatcctgtacacgtcaaagaagagcccctcgatccagaggaagctgaagggcccctgtccttagtgacaacagccaaccacagtccagattttgaccatgacagagattacgaagatgaaccagtaaacgaggacatggagtgactatcggggcgggccaaccccgagaatgaagattggaaaaaggaaaaaaaaaaaaacacgtcaaaagttagcagtgaaattgttctccatttgttgtacagtctggaggattttcactacgttttgacaactctgaaatgtgttaactcttagtgccatcaagaaccccatttgggagtatttttgatttttctactttttgttgaaaaaaggaatttgtactctgtgcattggatggacttgtttggtacttgggattttcctctcttaaccgtcaacatcagtgttgtaaatttgctaaactgattcacttttagcagcagactttgaactgcagtcctgccaacgttggacactgaggacgcccgacagagcttgtgcacctaagctgcagaccaagcctttgcccagaatttaag

SEQ ID NO: 419334 - DNA, 2814 bp, Homo sapiens
  misc_feature (2421)..(2421): n is a, c, g, or t
aggaggggggtgggcgccagcgccccggcgaacggcaaagagggagccgctcccgctcggggggccgctggagtgcccagcgggaacccgaaagtttgtaagaggaagagagcgcgcggcgagcgagcgagcgggccgggggcagcggcagcggcgccggggaccatggtgctgccggcgcctcctccgcgggcgtgaaggcggcgctcctactccctccccggactccgcggtgtcccagaagcttttgttgacaattccagtttccgaacaaaacatttcggcaatggtgagggcttcgatcccttctctgatttgctgtcagccatgaacggatggatgtgatgcctgctagccaaaaggcttccctctgtgtgttgcagtcctgtggcattatgcatgccccctcccagtgaccccaggctttttatggctgtgagacacgttaaaatttcaggggtaagacgtgaccttttgaggtgactataactgaagattgctttacagaagccaaaaaaggtttttgagtcatgatgcaagaatctgggactgagacaaaaagtaacggttcagccatccagaatgggtcgggcggcagcaaccacttactagagtgcggcggtcttcgggaggggcggtccaacggagagacgccggccgtggacatcggggcagctgacctcgcccacgcccagcagcagcagcaacaggcacttcaggtggcaagacagctccttcttcagcagcaacagcagcagcaagttagtggattaaaatctcccaagaggaatgacaaacaaccagctcttcaggttcccgtgtcagtggctatgatgacacctcaagttatcactccccagcaaatgcagcagatcctccagcaacaagtgctgagccctcagcagctccaggttctcctccagcagcagcaggccctcatgcttcaacagcagcagcttcaagagttttataaaaaacaacaggaacagttgcagcttcaacttttacaacaacaacatgctggaaaacagcctaaagagcaacagcaggtggctacccagcagttggcttttcagcagcagcttttacagatgcagcagttacagcagcagcacctcctgtctttgcagcgccaaggccttctgacaattcagcccgggcagcctgcccttccccttcaacctcttgctcaaggcatgattccaacagaactgcagcagctctggaaagaagtgacaagtgctcatactgcagaagaaaccacaggcaacaatcacagcagtttggatctgaccacgacatgtgtctcctcctctgcaccttccaagacctccttaataatgaacccacatgcctctaccaatggacagctctcagtccacactcccaaaagggaaagtttgtcccatgaggagcacccccatagccatcctctctatggacatggtgtatgcaagtggccaggctgtgaagcagtgtgcgaagatttccaatcatttctaaaacatctcaacagtgagcatgcgctggacgatagaagtacagcccaatgtagagtacaaatgcaggttgtacagcagttagagctacagcttgcaaaagacaaagaacgcctgcaagccatgatgacccacctgcatgtgaagtctacagaacccaaagccgcccctcagcccttgaatctggtatcaagtgtcactctctccaagtccgcatcggaggcttctccacagagcttacctcatactccaacgaccccaaccgcccccctgactcccgtcacccaaggcccctctgtcatcacaaccaccagcatgcacacggtgggacccatccgcaggcggtactcagacaaatacaacgtgcccatttcgtcagcagatattgcgcagaaccaagaattttataagaacgcagaagttagaccaccatttacatatgcatctttaattaggcaggccattctcgaatctccagaaaagcagctaacactaaatgagatctataactggttcacacgaatgtttgcttacttccgacgcaacgcggccacgtggaagaatgcagtgcgtcataatcttagtcttcacaagtgttttgtgcgagtagaaaacgttaaaggggcagtatggacagtggatgaagtagaattccaaaaacgaaggccacaaaagatcagtggtaacccttcccttattaaaaacatgcagagcagccacgcctactgcacacctctcaatgcagctttacaggcttcaatggctgagaatagtatacctctatacactaccgcttccatgggaaatcccactctgggcaacttagccagcgcaatacgggaagagctgaacggggcaatggagcataccaacagcaacgagagtgacagcagtccaggcagatctcctatgcaagccgtgnatcctgtacacgtccggaagagacccgccaggttctgataagaaccccggggaggagaaagccgaggaagagggagttgctgaagaggagggagttaaccagttctcttatccaccatcacaccgggagtgttgtcccgccgtggaggaggaggacgatgaagaagctgtaaagaaagaagctcacagaacctctacttctgccttgtctccaggatccaagcccagcacttgggtgtcttgccccggggaggaagagaatcaagccacggaggataaaagaacagaaagaagtaaaggagcccggaagacctccgtgtccccccgatcttcaggctccgaccccaggtcctgggagtatcggtcgaagagacccgcaggggatcctctaggt

SEQ ID NO: 419335 - DNA, 1412 bp, Homo sapiens
aggaggggggtgggcgccagcgccccggcgaacggcaaagagggagccgctcccgctcggggggccgctggagtgcccagcgggaacccgaaagtttgtaagaggaagagagcgcgcggcgagcgagcgagcgggccgggggcagcggcagcggcgccggggaccatggtgctgccggcgcctcctccgcgggcgtgaaggcggcgctcctactccctccccggactccgcggtgtcccagaagcttttgttgacaattccagtttccgaacaaaacatttcggcaatggtgagggcttcgatcccttctctgatttgctgtcagccatgaacggatggatgtgatgcctgctagccaaaaggcttccctctgtgtgttgcagtcctgtggcattatgcatgccccctcccagtgaccccaggctttttatggctgtgagacacgttaaaatttcaggggtaagacgtgaccttttgaggtgactataactgaagattgctttacagaagccaaaaaaggtttttgagtcatgatgcaagaatctgggactgagacaaaaagtaacggttcagccatccagaatgggtcgggcggcagcaaccacttactagagtgcggcggtcttcgggaggggcggtccaacggagagacgccggccgtggacatcggggcagctgacctcgcccacgcccagcagcagcagcaacaggcacttcaggtggcaagacagctccttcttcagcagcaacagcagcagcaagttagtggattaaaatctcccaagaggaatgacaaacaaccagctcttcaggttcccgtgtcagtggctatgatgacacctcaagttatcactccccagcaaatgcagcagatcctccagcaacaagtgctgagccctcagcagctccaggttctcctccagcagcagcaggccctcatgcttcaacagcagcagcttcaagagttttataaaaaacaacaggaacagttgcagcttcaacttttacaacaacaacatgctggaaaacagcctaaagagcaacagcaggtggctacccagcagttggcttttcagcagcagcttttacagatgcagcagttacagcagcagcacctcctgtctttgcagcgccaaggccttctgacaattcagcccgggcagcctgcccttccccttcaacctcttgctcaagactttgcatttcctagaatttctgtttgtcagttctcaatttcctgtgtttgcaatgttgaaattttttggtgaagtactgaacttgctttttttccggtttttacatgcaaaaatgaatttaaactgccatcttacgactattttttctttttaaaacacttaactcaggccattttttaagttggttacttcaaagtaaataaactttaaaattca

SEQ ID NO: 419336 - DNA, 1045 bp, Homo sapiens
aggaggggggtgggcgccagcgccccggcgaacggcaaagagggagccgctcccgctcggggggccgctggagtgcccagcgggaacccgaaagtttgtaagaggaagagagcgcgcggcgagcgagcgagcgggccgggggcagcggcagcggcgccggggaccatggtgctgccggcgcctcctccgcgggcgtgaaggcggcgctcctactccctccccggactccgcggtgtcccagaagcttttgttgacaattccagtttccgaacaaaacatttcggcaatggtgagggcttcgatcccttctctgatttgctgtcagccatgaacggatggatgtgatgcctgctagccaaaaggcttccctctgtgtgttgcagtcctgtggcattatgcatgccccctcccagtgaccccaggctttttatggctgtgagacacgttaaaatttcaggggtaagacgtgaccttttgaggtgactataactgaagattgctttacagaagccaaaaaaggtttttgagtcatgatgcaagaatctgggactgagacaaaaagtaacggttcagccatccagaatgggtcgggcggcagcaaccacttactagagtgcggcggtcttcgggaggggcggtccaacggagagacgccggccgtggacatcggggcagctgacctcgcccacgcccagcagcagcagcaacaggcacttcaggtggcaagacagctccttcttcagcagcaacagcagcagcaagttagtggattaaaatctcccaagaggaatgacaaacaaccagctcttcaggtaacaattctttttctttttaaattgacattataccctttgggataagtgacaagcagttcaggagtggattgtgttgagcattgcaaatcatgtaagaaaatcttctgtggaaagtgcatttttggtttaccagcaagttgtaacattttggggaaaatgtgtatttgaccaaaagttttattgtcaggagtaagatctgctgattagtgaatataatagaaggataagga

SEQ ID NO: 419337 - DNA, 1092 bp, Homo sapiens
ccactacgggacctgttatctggtactcagtgtggttctaggaccaccggcatcacttgggggcttgttagagatgcagagtctcaggccccaccccagacctgaatcacacactgcatttcaacaaggcccacaggtgactgcagcgtgtgttaaagtatgagaaatgccaccagggaggagaggcccacaccagtccagagactagtgattcagagcatcactacccaagagaactttacgcagtgatgcaaatgttccgtctgtctctgtgctggccagaattaaccgctagtcacatggggcctttgaacataaatgtggctagcacaactcagaaactgaatattaaatgtagtaagatttcgttcatttcaatttaaagagccacgtgtggctaatggtaacaatactggacagagttctagttctagagtgcggcttttctgttgccccaaacttttcagtgcacctgagctgcaatgggctgggaagtaccctcactgaacctctgcatattttttccaggcatcctgtacacgtcaaagaagagcccctcgatccagaggaagctgaagggcccctgtccttagtgacaacagccaaccacagtccagattttgaccatgacagagattacgaagatgaaccagtaaacgaggacatggagtgactatcggggcgggccaaccccgagaatgaagattggaaaaaggaaaaaaaaaaaaacacgtcaaaagttagcagtgaaattgttctccatttgttgtacagtctggaggattttcactacgttttgacaactctgaaatgtgttaactcttagtgccatcaagaaccccatttgggagtatttttgatttttctactttttgttgaaaaaaggaatttgtactctgtgcattggatggacttgtttggtacttgggattttcctctcttaaccgtcaacatcagtgttgtaaatttgctaaactgattcacttttagcagcagactttgaactgcagtcctgccaacgttggacactgaggacgcccgacagagcttgtgcacctaagctgcagaccaagcctttgcccagaatttaag

SEQ ID NO: 419338 - DNA, 436 bp, Homo sapiens
  misc_feature (144)..(144): n is a, c, g, or t
cgagattatgccactgcactccagcctgggcgccagagcgagactctgtctcaaaaaaaaaaagaaaaaagaaaaatttaatcttgaattctaggtttacttacaaatactagtttttctaagggtaaaaaagtaatatatttnaaacaatactactgaaacttgaattgggaatgacagtttcagacccgaaactaggggcatggccactaatgaggggataagttgagtgaaagaaaatgacaactgtttacagattttggcaacatttaaaccaaggcccttctccttatgcacaacaactgctttaacagctgctttttttttctccccccctccctccccccatcttggaaatccttgtatcaggtttttgagtcatgatgcaagaatctgggactgagacaaaaagtaacggttcagccatccagaatgg

SEQ ID NO: 419339 - DNA, 502 bp, Homo sapiens
acggagagacgccggccgtggacatcggggcagctgacctcgcccacgcccagcagcagcagcaacaggtactgggctttggagtcttgggaggtggaggtggtgggtgcgaattttactgctgaattttacacttaatcgcgatctcgcgatcagtgttttgtgttcacctgtctgtccatctgtctttctgtctgtcagtggcatctcataaaccatcagccctctaggagtcccagcagttggcttaagagactaatttcaagcccttgggagttggaagtcctgcaggtccccttgtggggagcagttgctgagacgaagatgagtggacctgtgtgtcagcctaacccttccccattttgaataaaattattctttggagaaatggttcccactgctttcatgcaaaaataaaaattaaacgaaaaacagcttaagcctgtgaagaaggaaataagagctaaggaataaaagagagaaaaagagtagatgagtaagg

SEQ ID NO: 419340 - DNA, 1772 bp, Homo sapiens
  misc_feature (6)..(7): n is a, c, g, or t
ggcacnngcttcgcagaaacagccagaacccatctacagcaagaagacggaaatccaaaggcagacagtacgggctcccttcgccaaactcttcattttctctgcacttcaggtggcaagacagctccttcttcagcagcaacagcagcagcaagttagtggattaaaatctcccaagaggaatgacaaacaaccagctcttcagcaacagcaggtggctacccagcagttggcttttcagcagcagcttttacagatgcagcagttacagcagcagcacctcctgtctttgcagcgccaaggccttctgacaattcagcccgggcagcctgcccttccccttcaacctcttgctcaaggcatgattccaacagaactgcagcagctctggaaagaagtgacaagtgctcatactgcagaagaaaccacaggcaacaatcacagcagtttggatctgaccacgacatgtgtctcctcctctgcaccttccaagacctccttaataatgaacccacatgcctctaccaatggacagctctcagtccacactcccaaaagggaaagtttgtcccatgaggagcacccccatagccatcctctctatggacatggtgtatgcaagtggccaggctgtgaagcagtgtgcgaagatttccaatcatttctaaaacatctcaacagtgagcatgcgctggacgatagaagtacagcccaatgtagagtacaaatgcaggttgtacagcagttagagctacagcttgcaaaagacaaagaacgcctgcaagccatgatgacccacctgcatgtgaagtctacagaacccaaagccgcccctcagcccttgaatctggtatcaagtgtcactctctccaagtccgcatcggaggcttctccacagagcttacctcatactccaacgaccccaaccgcccccctgactcccgtcacccaaggcccctctgtcatcacaaccaccagcatgcacacggtgggacccatccgcaggcggtactcagacaaatacaacgtgcccatttcgtcagcagatattgcgcagaaccaagaattttataagaacgcagaagttagaccaccatttacatatgcatctttaattaggcaggccattctcgaatctccagaaaagcagctaacactaaatgagatctataactggttcacacgaatgtttgcttacttccgacgcaacgcggccacgtggaagaatgcagtgcgtcataatcttagtcttcacaagtgttttgtgcgagtagaaaacgttaaaggggcagtatggacagtggatgaagtagaattccaaaaacgaaggccacaaaagatcagtggtaacccttcccttattaaaaacatgcagagcagccacgcctactgcacacctctcaatgcagctttacaggcttcaatggctgagaatagtatacctctatacactaccgcttccatgggaaatcccactctgggcaacttagccagcgcaatacgggaagagctgaacggggcaatggagcataccaacagcaacgagagtgacagcagtccaggcagatctcctatgcaagccgtgcatcctgtacacgtcaaagaagagcccctcgatccagaggaagctgaagggcccctgtccttagtgacaacagccaaccacagtccagattttgaccatgacagagattacgaagatgaaccagtaaacgaggacatggagtgactatcggggcgggccaaccccgagaatgaagattggaaaaagg

SEQ ID NO: 419341 - DNA, 893 bp, Homo sapiens
aggaggggggtgggcgccagcgccccggcgaacggcaaagagggagccgctcccgctcggggggccgctggagtgcccagcgggaacccgaaagtttgtaagaggaagagagcgcgcggcgagcgagcgagcgggccgggggcagcggcagcggcgccggggaccatggtgctgccggcgcctcctccgcgggcgtgaaggcggcgctcctactccctccccggactccgcggtgtcccagaagcttttgttgacaattccagtttccgaacaaaacatttcggcaatggtgagggcttcgatcccttctctgatttgctgtcagccatgaacggatggatgtgatgcctgctagccaaaaggcttccctctgtgtgttgcagtcctgtggcattatgcatgccccctcccagtgaccccaggctttttatggctgtgagacacgttaaaatttcaggggtaagacgtgaccttttgaggtgactataactgaagattgctttacagaagccaaaaaaggtttttgagtcatgatgcaagaatctgggactgagacaaaaagtaacggttcagccatccagaatgggtcgggcggcagcaaccacttactagagtgcggcggtcttcgggaggggcggtccaacggagagacgccggccgtggacatcggggcagctgacctcgcccacgcccagcagcagcagcaacagtggcatctcataaaccatcagccctctaggagtcccagcagttggcttaagagactaatttcaagcccttgggagttggaagtcctgcaggtccccttgtggggagcagttgctgagacgaagatgagtggacctgtgtgtcagcctaacccttccccattttgaataaaattattctttgga

SEQ ID NO: 419342 - DNA, 422 bp, Homo sapiens
cataattagtagtttccttgtcttacataccctgtgtcttcataaattttctcttggttgatgacaggcttcaatggctgagaatagtatacctctatacactaccgcttccatgggaaatcccactctgggcaacttagccagcgcaatacgggaagagctgaacggggcaatggagcataccaacagcaacgagagtgacagcagtccaggcagatctcctatgcaagccgtgcatcctgtacacgtcaaagaagagcccctcgatccagaggaagctgaagggcccctgtccttagtgacaacagccaaccacagtccagattttgaccatgacagagattacgaagatgaaccagtaaacgaggacatggagtgactatcggggcgggccaaccccgagaatgaagattggaaaaagg

SEQ ID NO: 419343 - DNA, 511 bp, Homo sapiens
tgaacattttcaagatttcttggccagtcgcaaatcctcaagcatccaggaaatggtttttgagtcatgatgcaagaatctgggactgagacaaaaagtaacggttcagccatccagaatgggtcgggcggcagcaaccacttactagagtgcggcggtcttcgggaggggcggtccaacggagagacgccggccgtggacatcggggcagctgacctcgcccacgcccagcagcagcagcaacagtggcatctcataaaccatcagccctctaggagtcccagcagttggcttaagagactaatttcaagcccttgggagttggaagtcctgcaggtccccttgtggggagcagttgctgagacgaagatgagtggacctgtgtgtcagcctaacccttccccattttgaataaaattattctttggagaaatggttcccactgctttcatgcaaaaataaaaattaaacgaaaaacagcttaagcctgtgaagaaggaaataagagcta

SEQ ID NO: 419344 - DNA, 1899 bp, Homo sapiens
agcggagtccgcctgcacgccgaggccgccggaccccacgcccggcccgcgcgggcgccccgagcccggctccgcgcgcctggcggctacatggagagtgtcaggttcccgtgtcagtggctatgatgacacctcaagttatcactccccagcaaatgcagcagatcctccagcaacaagtgctgagccctcagcagctccaggttctcctccagcagcagcaggccctcatgcttcaacagcagcagcttcaagagttttataaaaaacaacaggaacagttgcagcttcaacttttacaacaacaacatgctggaaaacagcctaaagagcaacagcaggtggctacccagcagttggcttttcagcagcagcttttacagatgcagcagttacagcagcagcacctcctgtctttgcagcgccaaggccttctgacaattcagcccgggcagcctgcccttccccttcaacctcttgctcaaggcatgattccaacagaactgcagcagctctggaaagaagtgacaagtgctcatactgcagaagaaaccacaggcaacaatcacagcagtttggatctgaccacgacatgtgtctcctcctctgcaccttccaagacctccttaataatgaacccacatgcctctaccaatggacagctctcagtccacactcccaaaagggaaagtttgtcccatgaggagcacccccatagccatcctctctatggacatggtgtatgcaagtggccaggctgtgaagcagtgtgcgaagatttccaatcatttctaaaacatctcaacagtgagcatgcgctggacgatagaagtacagcccaatgtagagtacaaatgcaggttgtacagcagttagagctacagcttgcaaaagacaaagaacgcctgcaagccatgatgacccacctgcatgtgaagtctacagaacccaaagccgcccctcagcccttgaatctggtatcaagtgtcactctctccaagtccgcatcggaggcttctccacagagcttacctcatactccaacgaccccaaccgcccccctgactcccgtcacccaaggcccctctgtcatcacaaccaccagcatgcacacggtgggacccatccgcaggcggtactcagacaaatacaacgtgcccatttcgtcagcagatattgcgcagaaccaagaattttataagaacgcagaagttagaccaccatttacatatgcatctttaattaggcaggccattctcgaatctccagaaaagcagctaacactaaatgagatctataactggttcacacgaatgtttgcttacttccgacgcaacgcggccacgtggaagaatgcagtgcgtcataatcttagtcttcacaagtgttttgtgcgagtagaaaacgttaaaggggcagtatggacagtggatgaagtagaattccaaaaacgaaggccacaaaagatcagtggtaacccttcccttattaaaaacatgcagagcagccacgcctactgcacacctctcaatgcagctttacaggcttcaatggctgagaatagtatacctctatacactaccgcttccatgggaaatcccactctgggcaacttagccagcgcaatacgggaagagctgaacggggcaatggagcataccaacagcaacgagagtgacagcagtccaggcagatctcctatgcaagccgtgcatcctgtacacgtcaaagaagagcccctcgatccagaggaagctgaagggcccctgtccttagtgacaacagccaaccacagtccagattttgaccatgacagagattacgaagatgaaccagtaaacgaggacatggagtgactatcggggcgggccaaccccgagaatgaagattggaaaaagg

SEQ ID NO: 419345 - DNA, 2012 bp, Homo sapiens
tggttttcctgaccgcccactttcatggcgcccaggctgtgtgccttttgatactgcaacgcagagcagctgcaggggatgctaataaaatgcaggattttggacactgagcaaggcacttcaggtggcaagacagctccttcttcagcagcaacagcagcagcaagttagtggattaaaatctcccaagaggaatgacaaacaaccagctcttcaggttcccgtgtcagtggctatgatgacacctcaagttatcactccccagcaaatgcagcagatcctccagcaacaagtgctgagccctcagcagctccaggttctcctccagcagcagcaggccctcatgcttcaacagcagcagcttcaagagttttataaaaaacaacaggaacagttgcagcttcaacttttacaacaacaacatgctggaaaacagcctaaagagcaacagcaggtggctacccagcagttggcttttcagcagcagcttttacagatgcagcagttacagcagcagcacctcctgtctttgcagcgccaaggccttctgacaattcagcccgggcagcctgcccttccccttcaacctcttgctcaaggcatgattccaacagaactgcagcagctctggaaagaagtgacaagtgctcatactgcagaagaaaccacaggcaacaatcacagcagtttggatctgaccacgacatgtgtctcctcctctgcaccttccaagacctccttaataatgaacccacatgcctctaccaatggacagctctcagtccacactcccaaaagggaaagtttgtcccatgaggagcacccccatagccatcctctctatggacatggtgtatgcaagtggccaggctgtgaagcagtgtgcgaagatttccaatcatttctaaaacatctcaacagtgagcatgcgctggacgatagaagtacagcccaatgtagagtacaaatgcaggttgtacagcagttagagctacagcttgcaaaagacaaagaacgcctgcaagccatgatgacccacctgcatgtgaagtctacagaacccaaagccgcccctcagcccttgaatctggtatcaagtgtcactctctccaagtccgcatcggaggcttctccacagagcttacctcatactccaacgaccccaaccgcccccctgactcccgtcacccaaggcccctctgtcatcacaaccaccagcatgcacacggtgggacccatccgcaggcggtactcagacaaatacaacgtgcccatttcgtcagcagatattgcgcagaaccaagaattttataagaacgcagaagttagaccaccatttacatatgcatctttaattaggcaggccattctcgaatctccagaaaagcagctaacactaaatgagatctataactggttcacacgaatgtttgcttacttccgacgcaacgcggccacgtggaagaatgcagtgcgtcataatcttagtcttcacaagtgttttgtgcgagtagaaaacgttaaaggggcagtatggacagtggatgaagtagaattccaaaaacgaaggccacaaaagatcagtggtaacccttcccttattaaaaacatgcagagcagccacgcctactgcacacctctcaatgcagctttacaggcttcaatggctgagaatagtatacctctatacactaccgcttccatgggaaatcccactctgggcaacttagccagcgcaatacgggaagagctgaacggggcaatggagcataccaacagcaacgagagtgacagcagtccaggcagatctcctatgcaagccgtgcatcctgtacacgtcaaagaagagcccctcgatccagaggaagctgaagggcccctgtccttagtgacaacagccaaccacagtccagattttgaccatgacagagattacgaagatgaaccagtaaacgaggacatggagtgactatcggggcgggccaaccccgagaatgaagattggaaaaagg

SEQ ID NO: 419346 - DNA, 1335 bp, Homo sapiens
cttaggaatggccagaaaggacttttaaccataagcaagatatgtctgcagaaaccatcaactgtaggaatatagtcattttgccattgagagttccactcgtgttcctttggcatttactcagttaaaatacttgccgatagttagggccaactctcatattctggaaggtgagacataacatgatagctactgatctcttgaccggggcggggcggggcgggggcggggggtccgttcaccaccccccgatcctttgactatacaaggcgatactctcaacggtaaaatccactttagaattcttcataggacctctggaagttttaaaagccagaagccatcaagaacaaaactgtatttagcagtattaaccaagtgttcctctttcgtggtttgaaaaaaataccccctttttatgggaggtaggtgggcttaaaaagggcagtttcatactttgcatgtgttgttttgaagtcacagtaacattttcagatttgtactctggaacctattttgggcttgtatgcatattaaaaaatatttctgctggtcagttattaccagagactagacgaaaatgccaaagtacgattaatttataattttggtttatttttgcttttggaaaagacatccttaaccatgagaaggtcctccacgggggtggtagctacagctcttggggatggttttacaaatgtggactgttaggctgaatttactgctgtttttggagtcttttcttatagaaaatgtaaatgttctctcttttatacttgctgcagaatgcagtgcgtcataatcttagtcttcacaagtgttttgtgcgagtagaaaacgttaaaggggcagtatggacagtggatgaagtagaattccaaaaacgaaggccacaaaagatcagtggtaacccttcccttattaaaaacatgcagagcagccacgcctactgcacacctctcaatgcagctttacaggcttcaatggctgagaatagtatacctctatacactaccgcttccatgggaaatcccactctgggcaacttagccagcgcaatacgggaagagctgaacggggcaatggagcataccaacagcaacgagagtgacagcagtccaggcagatctcctatgcaagccgtgcatcctgtacacgtcaaagaagagcccctcgatccagaggaagctgaagggcccctgtccttagtgacaacagccaaccacagtccagattttgaccatgacagagattacgaagatgaaccagtaaacgaggacatggagtgactatcggggcgggccaaccccgagaatgaagattggaaaaagg

SEQ ID NO: 419347 - DNA, 895 bp, Homo sapiens
ttaaaagccttcctgccatccctctagcagtcactgtaaagttcaaatctcaaagatgcttaggagccaagattctctctgctcgtgcccagcagcccctgctgtgagctcactgccttccccagcacgacctcctaggctgctgccttcctttctgttggagtctggagtcaggctaactcctaaaaatctgcagagaggtctctggagggaggacttcccaagcctgttactacctaagccagaattttacacctagtttccttgaatagagaagtccaaccccagaggtgtgcacacacacccgccctgcaaatcagtgacggggagaaagcctgacttttcttgggttttgctagtgggggaaattgctcatttggaagggcaccagcaagcttaaaacaaaacttagctaggaactcagcagtcgactgtgtttaactttgagtttttatgtttttcttacacagtaacccttcccttattaaaaacatgcagagcagccacgcctactgcacacctctcaatgcagctttacaggcttcaatggctgagaatagtatacctctatacactaccgcttccatgggaaatcccactctgggcaacttagccagcgcaatacgggaagagctgaacggggcaatggagcataccaacagcaacgagagtgacagcagtccaggcagatctcctatgcaagccgtgcatcctgtacacgtcaaagaagagcccctcgatccagaggaagctgaagggcccctgtccttagtgacaacagccaaccacagtccagattttgaccatgacagagattacgaagatgaaccagtaaacgaggacatggagtgactatcggggcgggccaaccccgagaatgaagattggaaaaagg

SEQ ID NO: 419348 - DNA, 975 bp, Homo sapiens
aggaggggggtgggcgccagcgccccggcgaacggcaaagagggagccgctcccgctcggggggccgctggagtgcccagcgggaacccgaaagtttgtaagaggaagagagcgcgcggcgagcgagcgagcgggccgggggcagcggcagcggcgccggggaccatggtgctgccggcgcctcctccgcgggcgtgaaggcggcgctcctactccctccccggactccgcggtgtcccagaagcttttgttgacaattccagtttccgaacaaaacatttcggcaatggtgagggcttcgatcccttctctgatttgctgtcagccatgaacggatggatgtgatgcctgctagccaaaaggcttccctctgtgtgttgcagtcctgtggcattatgcatgccccctcccagtgaccccaggctttttatggctgtgagacacgttaaaatttcaggggtaagacgtgaccttttgaggtgactataactgaagattgctttacagaagccaaaaaaggtttttgagtcatgatgcaagaatctgggactgagacaaaaagtaacggttcagccatccagaatgggtcgggcggcagcaaccacttactagagtgcggcggtcttcgggaggggcggtccaacggagagacgccggccgtggacatcggggcagctgacctcgcccacgcccagcagcagcagcaacagtggcatctcataaaccatcagccctctaggagtcccagcagttggcttaagagactaatttcaagcccttgggagttggaagtcctgcaggtccccttgtggggagcagttgctgagacgaagatgagtggacctgtgtgtcagcctaacccttccccattttgaataaaattattctttggagaaatggttcccactgctttcatgcaaaaataaaaattaaacgaaaaacagcttaagcctgtgaagaaggaaataagagcta

SEQ ID NO: 419349 - DNA, 464 bp, Homo sapiens
gagccccaggcggcactaggggttctccgtccccaaagagccagccggggtggcgcgagcctagcgataaggcaccgggagcgaggaatgtgcccatcctcaggccggtaggtgcttcgaaatactggacttcctcccctccacccttttcccctctttctttcctaaatctgaaaatctggagatcaaagtttagcgtggagtgtaaagtgctccgataaaatatggtgacatcctcgccccccttctcaccccactcccctcttataactattaattatttccaagtcattgtatccaaatacccttgctgggctgattacaaagtgtattgatttagtctgggctcatcctatgctttcgtcttaattcattttctttttgctctaccagaagacccaaaatgaaacttatttcttcctcttccctacctccccaccccacaagccctcatctgtgaggct

SEQ ID NO: 419350 - DNA, 1397 bp, Homo sapiens
tcgcctgtgtacctttgtactttctacagtgaaagttgctacaggatctccctttctcaataaattcatctgcggtggagaaaatcagcatgagtactacaggccaagtcatcagatgcaaagcagccatactctggaagcctggtgcaccattttctattgaagaggtagaagtggccccaccaaaggcaaaggaagttcgcataaaggttgtggccaccggactgtgtggtacagagatgaaagtgttggggagtaaacacttggacctcttgtatcccaccatcttgggccatgaaggggctggaatcgttgagagtattggagaaggagtaagcacagtgaaaccaggtgacaaagttatcacactctttctgccacagtgtggagaatgtacctcttgcctgaattctgagggcaatttttgtatacaattcaaacagtcaaaaacccaactgatgtctgatggtaccagcaggtttacctgcaagggaaaatcaatatatcactttggtaataccagcaccttctgtgaatacacagtgataaaggaaatctcagttgccaagattgatgcagtcgctcctctagagaaagtatgcctaattagctgtggcttttccactgggtttggtgctgcaatcaatactgccaaggtgactccaggttctacctgtgctgtgtttggcctgggaggagtcggcttgtctgttgtcatgggttgtaaagcagcaggagcagccaggatcattggagtggatgtcaacaaggagaaatttaagaaggcacaggaattgggtgctactgagtgcctcaaccctcaggacttaaagaaacccattcaagaagttttatttgatatgacagatgctggtatagacttctgctttgaggccattggaaatctggacgttctggcagctgccctcgcctcctgcaatgagagctatggggtctgtgtggttgttggggtgttgcctgccagtgttcaactcaaaatcagtggccagttgttcttctcaggacgttctttgaagggttctgtttttggaggctggaagagcagacagcacatccctaaactggttgctgattatatggcagagaagttgaatctagatccactaattactcatactctgaatcttgataaaatcaatgaagcagttgaattaatgaaaactggaaaatgtggtaaactgcccacataaattttatgtctgtgtgtttgagaccaagagaaagggtgtattggcttgggagtagaagaagggtcgtccctgctgcagaagctgtatactgataattgaagaggctttcaggaatttgtaaagcatctccttcccctctgcattttgttttatttctagctaataaaatacataatcctgaaagta

SEQ ID NO: 419351 - DNA, 2754 bp, Homo sapiens
tcgcctgtgtacctttgtactttctacagtgaaagttgctacaggatctccctttctcaataaattcatctgcggtggagaaaatcagcatgagtactacaggccaagtcatcagatgcaaagcagccatactctggaagcctggtgcaccattttctattgaagaggtagaagtggccccaccaaaggcaaaggaagttcgcataaaggttgtggccaccggactgtgtggtacagagatgaaagtgttggggagtaaacacttggacctcttgtatcccaccatcttgggccatgaaggggctggaatcgttgagagtattggagaaggagtaagcacagtgaaaccaggtgacaaagttatcacactctttctgccacagtgtggagaatgtacctcttgcctgaattctgagggcaatttttgtatacaattcaaacagtcaaaaacccaactgatgtctgatggtaccagcaggtttacctgcaagggaaaagaaatctcagttgccaagattgatgcagtcgctcctctagagaaagtatgcctaattagctgtggcttttccactgggtttggtgctgcaatcaatactgccaaggtgactccaggttctacctgtgctgtgtttggcctgggaggagtcggcttgtctgttgtcatgggttgtaaagcagcaggagcagccaggatcattggagtggatgtcaacaaggagaaatttaagaaggcacaggaattgggtgctactgagtgcctcaaccctcaggacttaaagaaacccattcaagaagttttatttgatatgacagatgctggtatagacttctgctttgaggccattggaaatctggacgttctggcagctgccctcgcctcctgcaatgagagctatggggtctgtgtggttgttggggtgttgcctgccagtgttcaactcaaaatcagtggccagttgttcttctcaggacgttctttgaagggttctgtttttggaggctggaagagcagacagcacatccctaaactggttgctgattatatggcagagaagttgaatctagatccactaattactcatactctgaatcttgataaaatcaatgaagcagttgaattaatgaaaactggaaaatgtatccgctgtatcctgttactttaagtacaatgtaatacatgcaagacccaaaggatatttcaccaactcaatggcatttgatgtaattttcatgatttagaagaattattcacccaatcccatttctatattctgacttctgattcactccgcagtggacctatatctggcttctgacctaaccatttcatcaaaattgttcttacgtaacccagtgtcaccaaggatcagcctccttttcagagctagattaaggttggcttgaatcactcaactccacatccttcagacataaaaggtcaatgcaagatgctcccattttcatagttcctctacctgtggacctttatattcttgtacactatatgtctctctcacaggcctagacatgaaactctgccattttactctaaagaaacaaaactccgcattaatgagtttattgaagattcaggttaacctgaatcaagttaacccagtctcaaatgctcacttatcctatctccttggcacaaatctctcctctcctggattgccaaagaaaattcaaattattcttcaattagtcaggatgatttgactatcagcagttcatagtacccatcttcataactaagccacctagggatccagcagaaaaaaaagggatgaggggagtcatcatacaggaggtggatcatttaccaggatccacacttcctacaaagcggttgtaatattaaataacaaaactgttttttattccaatcttcacataaaacaggaataattgtatactttcttactaatgtgttccatggagtttttcctccaagaagtggcttaggggaaaatgagccccagtaatgctttgtggcatccaatccttctaccccgaccctttgactttctgccccagcccctcttagttctcctagaattaggactaaggttaagtgccctcttgggatatgacttccttcccttcctcttgatacaaaaagagcctattaccaaccctcatacacacaagagttcccttcctagttgcagactcttctgctccagctggactcccctagctctggactcccactagatcacacaggggtccctgcatgtcagtaaactttggatgaccttgggagaccaaaaaatggaatatcattttttgatctaaacaaaatagtttcctgatttaacactggccaggaaggtgggctgcaccctcagtctctctctcccatcatggttttcacatgatatcaaaggactctcataacagtctgattcttatgagttgggcatcctgtgtttccctttaggggcctgcttccttcaaatagaggagatgggtgctatgaaacctattcactctggacttgggatggctcttctccatcttcccaagtctgagctggagcctccatgcccaactctgctctgctcttctatttcctgacagcagctaaggcatgttcctgttctgcccccaaattgaccttactaacagtgagaacttggaggagtcttcgggtcttgggaaatccaagttttcccggaaacgttttgttgtaaacagtgtccacactctttgctccaataaagctcggttccttaagccactttgaatgtc

SEQ ID NO: 419352 - DNA, 2808 bp, Homo sapiens
tcgcctgtgtacctttgtactttctacagtgaaagttgctacaggatctccctttctcaataaattcatctgcggtggagaaaatcagcatgagtactacaggccaagtcatcagatgcaaagcagccatactctggaagcctggtgcaccattttctattgaagaggtagaagtggccccaccaaaggcaaaggaagttcgcataaaggttgtggccaccggactgtgtggtacagagatgaaagtgttggggagtaaacacttggacctcttgtatcccaccatcttgggccatgaaggggctggaatcgttgagagtattggagaaggagtaagcacagtgaaaccaggtgacaaagttatcacactctttctgccacagtgtggagaatgtacctcttgcctgaattctgagggcaatttttgtatacaattcaaacagtcaaaaacccaactgatgtctgatggtaccagcaggtttacctgcaagggaaaatcaatatatcactttggtaataccagcaccttctgtgaatacacagtgataaaggaaatctcagttgccaagattgatgcagtcgctcctctagagaaagtatgcctaattagctgtggcttttccactgggtttggtgctgcaatcaatactgccaaggtgactccaggttctacctgtgctgtgtttggcctgggaggagtcggcttgtctgttgtcatgggttgtaaagcagcaggagcagccaggatcattggagtggatgtcaacaaggagaaatttaagaaggcacaggaattgggtgctactgagtgcctcaaccctcaggacttaaagaaacccattcaagaagttttatttgatatgacagatgctggtatagacttctgctttgaggccattggaaatctggacgttctggcagctgccctcgcctcctgcaatgagagctatggggtctgtgtggttgttggggtgttgcctgccagtgttcaactcaaaatcagtggccagttgttcttctcaggacgttctttgaagggttctgtttttggaggctggaagagcagacagcacatccctaaactggttgctgattatatggcagagaagttgaatctagatccactaattactcatactctgaatcttgataaaatcaatgaagcagttgaattaatgaaaactggaaaatgtatccgctgtatcctgttactttaagtacaatgtaatacatgcaagacccaaaggatatttcaccaactcaatggcatttgatgtaattttcatgatttagaagaattattcacccaatcccatttctatattctgacttctgattcactccgcagtggacctatatctggcttctgacctaaccatttcatcaaaattgttcttacgtaacccagtgtcaccaaggatcagcctccttttcagagctagattaaggttggcttgaatcactcaactccacatccttcagacataaaaggtcaatgcaagatgctcccattttcatagttcctctacctgtggacctttatattcttgtacactatatgtctctctcacaggcctagacatgaaactctgccattttactctaaagaaacaaaactccgcattaatgagtttattgaagattcaggttaacctgaatcaagttaacccagtctcaaatgctcacttatcctatctccttggcacaaatctctcctctcctggattgccaaagaaaattcaaattattcttcaattagtcaggatgatttgactatcagcagttcatagtacccatcttcataactaagccacctagggatccagcagaaaaaaaagggatgaggggagtcatcatacaggaggtggatcatttaccaggatccacacttcctacaaagcggttgtaatattaaataacaaaactgttttttattccaatcttcacataaaacaggaataattgtatactttcttactaatgtgttccatggagtttttcctccaagaagtggcttaggggaaaatgagccccagtaatgctttgtggcatccaatccttctaccccgaccctttgactttctgccccagcccctcttagttctcctagaattaggactaaggttaagtgccctcttgggatatgacttccttcccttcctcttgatacaaaaagagcctattaccaaccctcatacacacaagagttcccttcctagttgcagactcttctgctccagctggactcccctagctctggactcccactagatcacacaggggtccctgcatgtcagtaaactttggatgaccttgggagaccaaaaaatggaatatcattttttgatctaaacaaaatagtttcctgatttaacactggccaggaaggtgggctgcaccctcagtctctctctcccatcatggttttcacatgatatcaaaggactctcataacagtctgattcttatgagttgggcatcctgtgtttccctttaggggcctgcttccttcaaatagaggagatgggtgctatgaaacctattcactctggacttgggatggctcttctccatcttcccaagtctgagctggagcctccatgcccaactctgctctgctcttctatttcctgacagcagctaaggcatgttcctgttctgcccccaaattgaccttactaacagtgagaacttggaggagtcttcgggtcttgggaaatccaagttttcccggaaacgttttgttgtaaacagtgtccacactctttgctccaataaagctcggttccttaagccactttgaatgtc

SEQ ID NO: 419353 - DNA, 2700 bp, Homo sapiens
tcgcctgtgtacctttgtactttctacagtgaaagttgctacaggatctccctttctcaataaattcatctgcggtggagaaaatcagcatgagtactacaggccaagtcatcagatgcaaagcagccatactctggaagcctggtgcaccattttctattgaagaggtagaagtggccccaccaaaggcaaaggaagttcgcataaaggttgtggccaccggactgtgtggtacagagatgaaagtgttggggagtaaacacttggacctcttgtatcccaccatcttgggccatgaaggggctggaatcgttgagagtattggagaaggagtaagcacagtgaaaccaggtgacaaagttatcacactctttctgccacagtgtggagaatgtacctcttgcctgaattctgagggcaatttttgtatacaattcaaacagtcaaaaacccaactgatgtctgatggtaccagcaggtttacctgcaagggaaaagaaatctcagttgccaagattgatgcagtcgctcctctagagaaagtatgcctaattagctgtggcttttccactgggtttggtgctgcaatcaatactgccaaggtgactccaggttctacctgtgctgtgtttggcctgggaggagtcggcttgtctgttgtcatgggttgtaaagcagcaggagcagccaggatcattggagtggatgtcaacaaggagaaatttaagaaggcacaggaattgggtgctactgagtgcctcaaccctcaggacttaaagaaacccattcaagaagttttatttgatatgacagatgctggtatagacttctgctttgaggccattggaaatctggacgttctggcagctgccctcgcctcctgcaatgagagctatggggtctgtgtggttgttggggtgttgcctgccagtgttcaactcaaaatcagtggccagttgttcttctcaggacgttctttgaagggttctgtttttggaggctggaagagcagacagcacatccctaaactggttgctgattatatggcagagaagttgaatctagatccactaattactcatactctgaatcttgataaaatcaatgaagcagttgaattaatgaaaactggaaaatgtatccgctgtatcctgttactttaagtacaatgtaatacatgcaagacccaaaggatatttcaccaactcaatggcatttgatgtaattttcatgatttagaagaattattcacccaatcccatttctatattctgacttctgattcactccgcagtggacctatatctggcttctgacctaaccatttcatctagattaaggttggcttgaatcactcaactccacatccttcagacataaaaggtcaatgcaagatgctcccattttcatagttcctctacctgtggacctttatattcttgtacactatatgtctctctcacaggcctagacatgaaactctgccattttactctaaagaaacaaaactccgcattaatgagtttattgaagattcaggttaacctgaatcaagttaacccagtctcaaatgctcacttatcctatctccttggcacaaatctctcctctcctggattgccaaagaaaattcaaattattcttcaattagtcaggatgatttgactatcagcagttcatagtacccatcttcataactaagccacctagggatccagcagaaaaaaaagggatgaggggagtcatcatacaggaggtggatcatttaccaggatccacacttcctacaaagcggttgtaatattaaataacaaaactgttttttattccaatcttcacataaaacaggaataattgtatactttcttactaatgtgttccatggagtttttcctccaagaagtggcttaggggaaaatgagccccagtaatgctttgtggcatccaatccttctaccccgaccctttgactttctgccccagcccctcttagttctcctagaattaggactaaggttaagtgccctcttgggatatgacttccttcccttcctcttgatacaaaaagagcctattaccaaccctcatacacacaagagttcccttcctagttgcagactcttctgctccagctggactcccctagctctggactcccactagatcacacaggggtccctgcatgtcagtaaactttggatgaccttgggagaccaaaaaatggaatatcattttttgatctaaacaaaatagtttcctgatttaacactggccaggaaggtgggctgcaccctcagtctctctctcccatcatggttttcacatgatatcaaaggactctcataacagtctgattcttatgagttgggcatcctgtgtttccctttaggggcctgcttccttcaaatagaggagatgggtgctatgaaacctattcactctggacttgggatggctcttctccatcttcccaagtctgagctggagcctccatgcccaactctgctctgctcttctatttcctgacagcagctaaggcatgttcctgttctgcccccaaattgaccttactaacagtgagaacttggaggagtcttcgggtcttgggaaatccaagttttcccggaaacgttttgttgtaaacagtgtccacactctttgctccaataaagctcggttccttaagccactttgaatgtc

SEQ ID NO: 419354 - DNA, 2700 bp, Homo sapiens
tcgcctgtgtacctttgtactttctacagtgaaagttgctacaggatctccctttctcaataaattcatctgcggtggagaaaatcagcatgagtactacaggccaagtcatcagatgcaaagcagccatactctggaagcctggtgcaccattttctattgaagaggtagaagtggccccaccaaaggcaaaggaagttcgcataaaggttgtggccaccggactgtgtggtacagagatgaaagtgttggggagtaaacacttggacctcttgtatcccaccatcttgggccatgaaggggctggaatcgttgagagtattggagaaggagtaagcacagtgaaaccaggtgacaaagttatcacactctttctgccacagtgtggagaatgtacctcttgcctgaattctgagggcaatttttgtatacaattcaaacagtcaaaaacccaactgatgtctgatggtaccagcaggtttacctgcaagggaaaagaaatctcagttgccaagattgatgcagtcgctcctctagagaaagtatgcctaattagctgtggcttttccactgggtttggtgctgcaatcaatactgccaaggtgactccaggttctacctgtgctgtgtttggcctgggaggagtcggcttgtctgttgtcatgggttgtaaagcagcaggagcagccaggatcattggagtggatgtcaacaaggagaaatttaagaaggcacaggaattgggtgctactgagtgcctcaaccctcaggacttaaagaaacccattcaagaagttttatttgatatgacagatgctggtatagacttctgctttgaggccattggaaatctggacgttctggcagctgccctcgcctcctgcaatgagagctatggggtctgtgtggttgttggggtgttgcctgccagtgttcaactcaaaatcagtggccagttgttcttctcaggacgttctttgaagggttctgtttttggaggctggaagagcagacagcacatccctaaactggttgctgattatatggcagagaagttgaatctagatccactaattactcatactctgaatcttgataaaatcaatgaagcagttgaattaatgaaaactggaaaatgtatccgctgtatcctgttactttaagtacaatgtaatacatgcaagacccaaaggatatttcaccaactcaatggcatttgatgtaattttcatgatttagaagaattattcacccaatcccatttctatattctgacttctgattcactccgcagtggacctatatctggcttctgacctaaccatttcatcaaaattgttcttacgtaacccagtgtcaccaaggatcagcctccttttcagagctagattaaggttggcttgaatcactcaactccacatccttcagacataaaaggtcaatgcaagatgctcccattttcatagttcctctacctgtggacctttatattcttgtacactatatgtctctctcacaggcctagacatgaaactctgccattttactctaaagaaacaaaactccgcattaatgagtttattgaagattcaggttaacctgaatcaagttaacccagtctcaaatgctcacttatcctatctccttggcacaaatctctcctctcctggattgccaaagaaaattcaaattattcttcaattagtcaggatgatttgactatcagcagttcatagtacccatcttcataactaagccacctagggatccagcagaaaaaaaagggatgaggggagtcatcatacaggaggtggatcatttaccaggatccacacttcctacaaagcggttgtaatattaaataacaaaactgttttttattccaatcttcacataaaacaggaataattgtatactttcttactaatgtgttccatggagtttttcctccaagaagtggcttaggggaaaatgagccccagtaatgctttgtggcatccaatccttctaccccgaccctttgactttctgccccagcccctcttagttctcctagaattaggactaaggttaagtgccctcttgggatatgacttccttcccttcctcttgatacaaaaagagcctattaccaaccctcatacacacaagagttcccttcctagttgcagactcttctgctccagctggactcccctagctctggactcccactagatcacacaggggtccctgcatgtcagtaaactttggatgaccttgggagaccaaaaaatggaatatcattttttgatctaaacctctctcccatcatggttttcacatgatatcaaaggactctcataacagtctgattcttatgagttgggcatcctgtgtttccctttaggggcctgcttccttcaaatagaggagatgggtgctatgaaacctattcactctggacttgggatggctcttctccatcttcccaagtctgagctggagcctccatgcccaactctgctctgctcttctatttcctgacagcagctaaggcatgttcctgttctgcccccaaattgaccttactaacagtgagaacttggaggagtcttcgggtcttgggaaatccaagttttcccggaaacgttttgttgtaaacagtgtccacactctttgctccaataaagctcggttccttaagccactttgaatgtc

SEQ ID NO: 419355 - DNA, 407 bp, Homo sapiens
aggagaaatttaagaaggcacaggaattgggtgctactgagtgcctcaaccctcaggacttaaagaaacccattcaagaagttttatttgatatgacagatgctggtatagacttctgctttgaggccattggaaatctggacgttctggtatgtaatcctctggagtgaaaattaccaatacttttaccagtcatcgtttagattatagttgaatgagctttctaaaattccctccactttgctctatttaattttccttgtgttccatgacatctcagctggtgccgtctgtgtactcttacaaatttgttcactatcccagatactaaatctagaactttcatataatttcaaagccagaagttttaagcaagataagattaaaatttgattaatgaccttata

SEQ ID NO: 419356 - DNA, 538 bp, Homo sapiens
tcgcctgtgtacctttgtactttctacagtgaaagttgctacaggatctccctttctcaataaattcatctgcggtggagaaaatcagcatgagtactacaggccaagtcatcagatgcaaagcagccatactctggaagcctggtgcaccattttctattgaagaggtagaagtggccccaccaaaggcaaaggaagttcgcataaaggttgtggccaccggactgtgtggtacagagatgaaagtgttggggagtaaacacttggacctcttgtatcccaccatcttgggccatgaaggggctggaatcgttgagagtattggagaaggagtaagcacagtgaaaccaggtgacaaagttatcacactctttctgccacagtgtggagaatgtacctcttgcctgaattctgagggcaatttttgtatacaattcaacagtacccaactggtgtttgatgtaccagcagggttaacttgcagggaaactagttgcaagatcgtgcagtcgctccttagagggaaccttggcgggcg

SEQ ID NO: 419357 - DNA, 2672 bp, Homo sapiens
tcgcctgtgtacctttgtactttctacagtgaaagttgctacaggatctccctttctcaataaattcatctgcggtggagaaaatcagcatgagtactacaggccaagtcatcagatgcaaagcagccatactctggaagcctggtgcaccattttctattgaagaggtagaagtggccccaccaaaggcaaaggaagttcgcataaaggttgtggccaccggactgtgtggtacagagatgaaagtgttggggagtaaacacttggacctcttgtatcccaccatcttgggccatgaaggggctggaatcgttgagagtattggagaaggagtaagcacagtgaaaccaggtgacaaagttatcacactctttctgccacagtgtggagaatgtacctcttgcctgaattctgagggcaatttttgtatacaattcaaacagtcaaaaacccaactgatgtctgatggtaccagcaggtttacctgcaagggaaaatcaatatatcactttggtaataccagcaccttctgtgaatacacagtgataaaggaaatctcagttgccaagattgatgcagtcgctcctctagagaaagtatgcctaattagctgtggcttttccactgggtttggtgctgcaatcaatactgccaaggtgactccaggttctacctgtgctgtgtttggcctgggaggagtcggcttgtctgttgtcatgggttgtaaagcagcaggagcagccaggatcattggagtggatgtcaacaaggagaaatttaagaaggcacaggaattgggtgctactgagtgcctcaaccctcaggacttaaagaaacccattcaagaagttttatttgatatgacagatgctggtatagacttctgctttgaggccattggaaatctggacgttctggctggaagagcagacagcacatccctaaactggttgctgattatatggcagagaagttgaatctagatccactaattactcatactctgaatcttgataaaatcaatgaagcagttgaattaatgaaaactggaaaatgtatccgctgtatcctgttactttaagtacaatgtaatacatgcaagacccaaaggatatttcaccaactcaatggcatttgatgtaattttcatgatttagaagaattattcacccaatcccatttctatattctgacttctgattcactccgcagtggacctatatctggcttctgacctaaccatttcatcaaaattgttcttacgtaacccagtgtcaccaaggatcagcctccttttcagagctagattaaggttggcttgaatcactcaactccacatccttcagacataaaaggtcaatgcaagatgctcccattttcatagttcctctacctgtggacctttatattcttgtacactatatgtctctctcacaggcctagacatgaaactctgccattttactctaaagaaacaaaactccgcattaatgagtttattgaagattcaggttaacctgaatcaagttaacccagtctcaaatgctcacttatcctatctccttggcacaaatctctcctctcctggattgccaaagaaaattcaaattattcttcaattagtcaggatgatttgactatcagcagttcatagtacccatcttcataactaagccacctagggatccagcagaaaaaaaagggatgaggggagtcatcatacaggaggtggatcatttaccaggatccacacttcctacaaagcggttgtaatattaaataacaaaactgttttttattccaatcttcacataaaacaggaataattgtatactttcttactaatgtgttccatggagtttttcctccaagaagtggcttaggggaaaatgagccccagtaatgctttgtggcatccaatccttctaccccgaccctttgactttctgccccagcccctcttagttctcctagaattaggactaaggttaagtgccctcttgggatatgacttccttcccttcctcttgatacaaaaagagcctattaccaaccctcatacacacaagagttcccttcctagttgcagactcttctgctccagctggactcccctagctctggactcccactagatcacacaggggtccctgcatgtcagtaaactttggatgaccttgggagaccaaaaaatggaatatcattttttgatctaaacaaaatagtttcctgatttaacactggccaggaaggtgggctgcaccctcagtctctctctcccatcatggttttcacatgatatcaaaggactctcataacagtctgattcttatgagttgggcatcctgtgtttccctttaggggcctgcttccttcaaatagaggagatgggtgctatgaaacctattcactctggacttgggatggctcttctccatcttcccaagtctgagctggagcctccatgcccaactctgctctgctcttctatttcctgacagcagctaaggcatgttcctgttctgcccccaaattgaccttactaacagtgagaacttggaggagtcttcgggtcttgggaaatccaagttttcccggaaacgttttgttgtaaacagtgtccacactctttgctccaataaagctcggttccttaagccactttgaatgtc

SEQ ID NO: 419358 - DNA, 2706 bp, Homo sapiens
tcgcctgtgtacctttgtactttctacagtgaaagttgctacaggatctccctttctcaataaattcatctgcggtggagaaaatcagcatgagtactacaggccaagtcatcagatgcaaagcagccatactctggaagcctggtgcaccattttctattgaagaggtagaagtggccccaccaaaggcaaaggaagttcgcataaaggttgtggccaccggactgtgtggtacagagatgaaagtgttggggagtaaacacttggacctcttgtatcccaccatcttgggccatgaaggggctggaatcgttgagagtattggagaaggagtaagcacagtgaaaccaggtgacaaagttatcacactctttctgccacagtgtggagaatgtacctcttgcctgaattctgagggcaatttttgtatacaattcaaacagtcaaaaacccaactgatgtctgatggtaccagcaggtttacctgcaagggaaaagaaatctcagttgccaagattgatgcagtcgctcctctagagaaagtatgcctaattagctgtggcttttccactgggtttggtgctgcaatcaatactgccaaggtgactccaggttctacctgtgctgtgtttggcctgggaggagtcggcttgtctgttgtcatgggttgtaaagcagcaggagcagccaggatcattggagtggatgtcaacaaggagaaatttaagaaggcacaggaattgggtgctactgagtgcctcaaccctcaggacttaaagaaacccattcaagaagttttatttgatatgacagatgctggtatagacttctgctttgaggccattggaaatctggacgttctggcagctgccctcgcctcctgcaatgagagctatggggtctgtgtggttgttggggtgttgcctgccagtgttcaactcaaaatcagtggccagttgttcttctcaggacgttctttgaagggttctgtttttggaggctggaagagcagacagcacatccctaaactggttgctgattatatggcagagaagttgaatctagatccactaattactcatactctgaatcttgataaaatcaatgaagcagttgaattaatgaaaactggaaaatgccaaaggatatttcaccaactcaatggcatttgatgtaattttcatgatttagaagaattattcacccaatcccatttctatattctgacttctgattcactccgcagtggacctatatctggcttctgacctaaccatttcatcaaaattgttcttacgtaacccagtgtcaccaaggatcagcctccttttcagagctagattaaggttggcttgaatcactcaactccacatccttcagacataaaaggtcaatgcaagatgctcccattttcatagttcctctacctgtggacctttatattcttgtacactatatgtctctctcacaggcctagacatgaaactctgccattttactctaaagaaacaaaactccgcattaatgagtttattgaagattcaggttaacctgaatcaagttaacccagtctcaaatgctcacttatcctatctccttggcacaaatctctcctctcctggattgccaaagaaaattcaaattattcttcaattagtcaggatgatttgactatcagcagttcatagtacccatcttcataactaagccacctagggatccagcagaaaaaaaagggatgaggggagtcatcatacaggaggtggatcatttaccaggatccacacttcctacaaagcggttgtaatattaaataacaaaactgttttttattccaatcttcacataaaacaggaataattgtatactttcttactaatgtgttccatggagtttttcctccaagaagtggcttaggggaaaatgagccccagtaatgctttgtggcatccaatccttctaccccgaccctttgactttctgccccagcccctcttagttctcctagaattaggactaaggttaagtgccctcttgggatatgacttccttcccttcctcttgatacaaaaagagcctattaccaaccctcatacacacaagagttcccttcctagttgcagactcttctgctccagctggactcccctagctctggactcccactagatcacacaggggtccctgcatgtcagtaaactttggatgaccttgggagaccaaaaaatggaatatcattttttgatctaaacaaaatagtttcctgatttaacactggccaggaaggtgggctgcaccctcagtctctctctcccatcatggttttcacatgatatcaaaggactctcataacagtctgattcttatgagttgggcatcctgtgtttccctttaggggcctgcttccttcaaatagaggagatgggtgctatgaaacctattcactctggacttgggatggctcttctccatcttcccaagtctgagctggagcctccatgcccaactctgctctgctcttctatttcctgacagcagctaaggcatgttcctgttctgcccccaaattgaccttactaacagtgagaacttggaggagtcttcgggtcttgggaaatccaagttttcccggaaacgttttgttgtaaacagtgtccacactctttgctccaataaagctcggttccttaagccactttgaatgtc

SEQ ID NO: 419359 - DNA, 2154 bp, Homo sapiens
tcgcctgtgtacctttgtactttctacagtgaaagttgctacaggatctccctttctcaataaattcatctgcggtggagaaaatcagcatgagtactacaggccaagtcatcagatgcaaagcagccatactctggaagcctggtgcaccattttctattgaagaggtagaagtggccccaccaaaggcaaaggaagttcgcataaaggttgtggccaccggactgtgtggtacagagatgaaagtgttggggagtaaacacttggacctcttgtatcccaccatcttgggccatgaaggggctggaatcgttgagagtattggagaaggagtaagcacagtgaaaccaggtgacaaagttatcacactctttctgccacagtgtggagaatgtacctcttgcctgaattctgagggcaatttttgtatacaattcaaacagtcaaaaacccaactgatgtctgatggtaccagcaggtttacctgcaagggaaaagaaatctcagttgccaagattgatgcagtcgctcctctagagaaagtatgcctaattagctgtggcttttccactgggtttggtgctgcaatcaatactgccaaggtgactccaggttctacctgtgctgtgtttggcctgggaggagtcggcttgtctgttgtcatgggttgtaaagcagcaggagcagccaggatcattggagtggatgtcaacaaggagaaatttaagaaggcacaggaattgggtgctactgagtgcctcaaccctcaggacttaaagaaacccattcaagaagttttatttgatatgacagatgctggtatagacttctgctttgaggccattggaaatctggacgttctggcagctgccctcgcctcctgcaatgagagctatggggtctgtgtggttgttggggtgttgcctgccagtgttcaactcaaaatcagtggccagttgttcttctcaggacgttctttgaagggttctgtttttggaggctggaagagcagacagcacatccctaaactggttgctgattatatggcagagaagttgaatctagatccactaattactcatactctgaatcttgataaaatcaatgaagcagttgaattaatgaaaactggaaaatgtatccgctgtatcctgttactttaagtacaatgtaatacatgcaagacccaaaggatatttcaccaactcaatggcatttgatgtaattttcatgatttagaagaattattcacccaatcccatttctatattctgacttctgattcactccgcagtggacctatatctggcttctgacctaaccatttcatcaaaattgttcttacgtaacccagtgtcaccaaggatcagcctccttttcagagctagattaaggttggcttgaatcactcaactccacatccttcagacataaaaggtcaatgcaagatgctcccattttcatagttcctctacctgtggacctttatattcttgtacactatatgtctctctcacaggcctagacatgaaactctgccattttactctaaagaaacaaaactccgcattaatgagtttattgaagattcaggttaacctgaatcaagttaacccagtctcaaatgctcacttatcctatctccttggcacaaatctctcctctcctggattgccaaagaaaattcaaattattcttcaattagtcaggatgatttgactatcagcagttcatagtacccatcttcataactaagccacctagggatccagcagaaaaaaaagggatgaggggagtcatcatacaggaggtggatcatttaccaggatccacacttcctacaaagcggttgtaatattaaataacaaaactgttttttattccaatcttcactctggacttgggatggctcttctccatcttcccaagtctgagctggagcctccatgcccaactctgctctgctcttctatttcctgacagcagctaaggcatgttcctgttctgcccccaaattgaccttactaacagtgagaacttggaggagtcttcgggtcttgggaaatccaagttttcccggaaacgttttgttgtaaacagtgtccacactctttgctccaataaagctcggttccttaagccactttgaatgtc

SEQ ID NO: 419360 - DNA, 1432 bp, Homo sapiens
ggaaaagctcgataattacccagcctaaccatttctcaggtgcttgcgaggtgatcagaaggcaaagatgtcggagcgaaaagtattaaacaaatactacccgccggactttgacccatcaaagatccccaaactcaagctccccaaagaccggcagtacgtggtgcggctgatggcccccttcaacatgaggtgtaagacgtgcggagaatacatctacaaggggaagaaattcaatgctcggaaggagacggtgcagaacgaggtctacctgggcctgcccatcttccgcttttacatcaagtgcacgcgctgcctggcagagatcaccttcaagacagaccctgaaaacacagactacaccatggagcatggagccacgcggaatttccaggctgagaagctcctggaggaggaggagaagagggtgcagaaggagcgggaggacgaggagctgaacaaccccatgaaggtgctggagaaccggaccaaggactccaagctggagatggaggtgctggagaacctccaggagctgaaagacctgaaccagcggcaggcgcacgtggacttcgaggctatgctgaggcagcaccgcctgtcggaggaggagcggcggaggcagcagcaggaggaggacgagcaggagaccgcggccctgttggaggaagccagaaagcgaagactgctggaggactccgactcagaggatgaggctgctccctcgcccctgcagccagcccttcggcccaaccccaccgccatcctggatgaggccccaaagcccaagaggaaggtggaggtctgggagcagagcgttggcagcctgggcagccggcccccgctgtcgaggctggtcgtggtgaagaaggcaaaggccgacccggactgcagcaacgggcagcctcaggcggcccccaccccaggagccccgcagaacaggaaggaggccaaccctacacccctgacgcctggcgcgtcctccctgagccaactgggtgcatacctggacagtgacgacagcaacggcagcaactgagccctcccaggaccccctcacggggtcaaagtcacacgtccagcttcagccacattgaggccagcattgctggtggtcagggcaggaggccttggcgtgactggaggccggacagacaagcgccagcgtgctccaacacatagggccaccaggggcctcagccccaggaggtcccttctctgtgccctcaccagcctctcaacacctcggggacccctgctgctcctgcccccacctgtcactgtgcttagggctgcaacatccctggagcagcttccaacactacttcagggtggcagtgtttggggcactgggcgagcctgccggcctctagatggcctcatctcttccttccacaaactgtctagaaccaataaaaggaaacctgccaac

SEQ ID NO: 419361 - DNA, 1436 bp, Homo sapiens
catagctagtagaggccgtgttaatcggcgaggcatttctcaggtgcttgcgaggtgatcagaaggcaaagatgtcggagcgaaaagtattaaacaaatactacccgccggactttgacccatcaaagatccccaaactcaagctccccaaagaccggcagtacgtggtgcggctgatggcccccttcaacatgaggtgtaagacgtgcggagaatacatctacaaggggaagaaattcaatgctcggaaggagacggtgcagaacgaggtctacctgggcctgcccatcttccgcttttacatcaagtgcacgcgctgcctggcagagatcaccttcaagacagaccctgaaaacacagactacaccatggagcatggagccacgcggaatttccaggctgagaagctcctggaggaggaggagaagagggtgcagaaggagcgggaggacgaggagctgaacaaccccatgaaggtgctggagaaccggaccaaggactccaagctggagatggaggtgctggagaacctccaggagctgaaagacctgaaccagcggcaggcgcacgtggacttcgaggctatgctgaggcagcaccgcctgtcggaggaggagcggcggaggcagcagcaggaggaggacgagcaggagaccgcggccctgttggaggaagccagaaagcgaagactgctggaggactccgactcagaggatgaggctgctccctcgcccctgcagccagcccttcggcccaaccccaccgccatcctggatgaggccccaaagcccaagaggaaggtggaggtctgggagcagagcgttggcagcctgggcagccggcccccgctgtcgaggctggtcgtggtgaagaaggcaaaggccgacccggactgcagcaacgggcagcctcaggcggcccccaccccaggagccccgcagaacaggaaggaggccaaccctacacccctgacgcctggcgcgtcctccctgagccaactgggtgcatacctggacagtgacgacagcaacggcagcaactgagccctcccaggaccccctcacggggtcaaagtcacacgtccagcttcagccacattgaggccagcattgctggtggtcagggcaggaggccttggcgtgactggaggccggacagacaagcgccagcgtgctccaacacatagggccaccaggggcctcagccccaggaggtcccttctctgtgccctcaccagcctctcaacacctcggggacccctgctgctcctgcccccacctgtcactgtgcttagggctgcaacatccctggagcagcttccaacactacttcagggtggcagtgtttggggcactgggcgagcctgccggcctctagatggcctcatctcttccttccacaaactgtctagaaccaataaaaggaaacctgccaac

SEQ ID NO: 419362 - DNA, 1579 bp, Homo sapiens
ccgccaccatgcctggttaattttttttgtattttagtagagatgagatttcaccatgttgcccagggtggttttgaactcttgatctcaggcattccacccacctcatactcccaaagtgctggaattacaggcgtgagccaccgcgcccggccccacgcaggtctttctaggagagcagtctcaggcttgctgtaggaactcctgggaaacaggagccctgggatacaaagggagtaaatactacccgccggactttgacccatcaaagatccccaaactcaagctccccaaagaccggcagtacgtggtgcggctgatggcccccttcaacatgaggtgtaagacgtgcggagaatacatctacaaggggaagaaattcaatgctcggaaggagacggtgcagaacgaggtctacctgggcctgcccatcttccgcttttacatcaagtgcacgcgctgcctggcagagatcaccttcaagacagaccctgaaaacacagactacaccatggagcatggagccacgcggaatttccaggctgagaagctcctggaggaggaggagaagagggtgcagaaggagcgggaggacgaggagctgaacaaccccatgaaggtgctggagaaccggaccaaggactccaagctggagatggaggtgctggagaacctccaggagctgaaagacctgaaccagcggcaggcgcacgtggacttcgaggctatgctgaggcagcaccgcctgtcggaggaggagcggcggaggcagcagcaggaggaggacgagcaggagaccgcggccctgttggaggaagccagaaagcgaagactgctggaggactccgactcagaggatgaggctgctccctcgcccctgcagccagcccttcggcccaaccccaccgccatcctggatgaggccccaaagcccaagaggaaggtggaggtctgggagcagagcgttggcagcctgggcagccggcccccgctgtcgaggctggtcgtggtgaagaaggcaaaggccgacccggactgcagcaacgggcagcctcaggcggcccccaccccaggagccccgcagaacaggaaggaggccaaccctacacccctgacgcctggcgcgtcctccctgagccaactgggtgcatacctggacagtgacgacagcaacggcagcaactgagccctcccaggaccccctcacggggtcaaagtcacacgtccagcttcagccacattgaggccagcattgctggtggtcagggcaggaggccttggcgtgactggaggccggacagacaagcgccagcgtgctccaacacatagggccaccaggggcctcagccccaggaggtcccttctctgtgccctcaccagcctctcaacacctcggggacccctgctgctcctgcccccacctgtcactgtgcttagggctgcaacatccctggagcagcttccaacactacttcagggtggcagtgtttggggcactgggcgagcctgccggcctctagatggcctcatctcttccttccacaaactgtctagaaccaataaaaggaaacctgccaac

SEQ ID NO: 419363 - DNA, 1309 bp, Homo sapiens
ggaaaagctcgataattacccagcctaaccatttctcaggtgcttgcgaggtgatcagaaggcaaagatgtcggagcgaaaagtattaaacaaatactacccgccggactttgacccatcaaagatccccaaactcaagctccccaaagaccggcagtacgtggtgcggctgatggcccccttcaacatgaggtgtaagacgtgcggagaatacatctacaaggggaagaaattcaatgctcggaaggagacggtgcagaacgaggtctacctgggcctgcccatcttccgcttttacatcaagtgcacgcgctgcctggcagagatcaccttcaagacagaccctgaaaacacagactacaccatggagcatggagccacgcggaatttccaggctgagaagctcctggaggaggaggagaagagggtgcagaaggagcgggaggacgaggagctgaacaaccccatgaaggtgctggagaaccggaccaaggactccaagctggagatggaggtgctggagaacctccaggagctgaaagacctgaaccagcggcaggcgcacgtggacttcgaggctatgctgaggcagcaccgcctgtcggaggaggagcggcggaggcagcagcaggaggaggacgagcaggagaccgcggccctgttggaggaagccagaaagcgaagactgctggaggactccgactcagaggatgaggctgctccctcgcccctgcagccagcccttcggcccaaccccaccgccatcctggatgaggccccaaagcccaagaggaaggtggaggtctgggagcagagcgttggcagcctgggcagccggcccccgctgtcgaggctggtcgtggtgaagaaggcaaaggcatacctggacagtgacgacagcaacggcagcaactgagccctcccaggaccccctcacggggtcaaagtcacacgtccagcttcagccacattgaggccagcattgctggtggtcagggcaggaggccttggcgtgactggaggccggacagacaagcgccagcgtgctccaacacatagggccaccaggggcctcagccccaggaggtcccttctctgtgccctcaccagcctctcaacacctcggggacccctgctgctcctgcccccacctgtcactgtgcttagggctgcaacatccctggagcagcttccaacactacttcagggtggcagtgtttggggcactgggcgagcctgccggcctctagatggcctcatctcttccttccacaaactgtctagaaccaataaaaggaaacctgccaac

SEQ ID NO: 419364 - DNA, 1875 bp, Homo sapiens
ggtgggcgggagcgcccttccaggagatgggttggctgcagtagtgagaggctgggggtgcggctctttccctgcagtcctgccgaggaagcgtgcgtccctggcgcttccttcttctcttccggcggagagcttgggatgtggtaatgccagccacactcctcagagccgtggccagatctcatcatatattatcaaaagcacatcagtgccgaagaatcggtcatctaatgttaaaaccacttaaggaatttgaaaatacaacatgcagcacactgacaatacgtcaaagcttggatttgttccttcctgataaaacagctagtggtttgaataagtctcagatcctggaaatgaaccaaaaaaagtcagataccagcatgctgtctccattaaatgctgctcgttgccaagatgaaaaggcacaccttccaaccatgaaatcctttggtactcacaggagagtgacccacaaaccaaatctgttgggttctaaatggtttataaaaatattaaagaggcatttctcatctgtatcaacggaaacatttgttccaaaacaagacttcccacaggtgaagagaccactaaaagcatccaggaccagacagccatccaggaccaaccttccagttctgtctgtgaacgaggacctaatgcactgcacagcatttgcaacggcagatgagtatcatctgggaaatctgtctcaagatctggcctcccacggatatgttgaagtaacaagcttgcctagagatgcagcaaatattttggtgatgggtgtggaaaattctgcaaaagaaggtgatcctggaacaatattcttcttcagggaaggagctgctgtgttttggaatgtgaaagacaaaactatgaagcatgtgatgaaagttctagaaaaacatgaaattcagccctatgaaatcgcactggtacactgggaaaatgaagaacttaactacataaaaatagagggacagtcaaaacttcacaggggggaaatcaagttaaattcagagctggatttagatgatgccattctagagaagtttgctttctccaatgctctatgcctttctgtaaaactggcaatttgggaagcatcactggataaatttattgaatctattcagtcaattcctgaggctttaaaagctgggaagaaagtgaaactatctcatgaagaagttatgcagaaaatcggtgaactctttgctctaaggcaccgtataaacttgagttcagacttcctgattactcctgatttctactgggacagagaaaacctggaaggactttacgataaaacgtgtcaattccttagcattggccgaagagttaaggtcatgaatgaaaaacttcagcactgcatggaactaacagatctaatgcggaatcacctgaatgagaagagggcactccgcttggagtggatgattgtcatcctcattaccatagaggtaatgtttgagctgggacgagtatttttctgatcaagtgataaccaaagtgtcactgcaagagatattcaagttctacaatcaaaaattaaatgttcggcccggcgcggtgcctcatgcctgtaatcccagcactttcggaggccaagaagggtggcttgagatgagatcaggagctcaagacaagcctggccaacatggtgaaaccccatctctactaaaaataccaaaattagccaggtgtgttggcacacgcccgtcatctcagctactcaggaggctgaggcaggagaatctcttgaacttgggaggcggaggttgcagtgagctaagatcacaccactgcactccagccagggcaacagtgagactcagtctcaaaaataaacaataaaataaataaataaatgtt

SEQ ID NO: 419365 - DNA, 968 bp, Homo sapiens
ggtgggcgggagcgcccttccaggagatgggttggctgcagtagtgagaggctgggggtgcggctctttccctgcagtcctgccgaggaagcgtgcgtccctggcgcttccttcttctcttccggcggagagcttgggatgtggtaatgccagccacactcctcagagccgtggccagatctcatcatatattatcaaaagcacatcagtgccgaagaatcggtcatctaatgttaaaaccacttaaggaatttgaaaatacaacatgcagcacactgacaatacgtcaaagcttggatttgttccttcctgataaaacagctagtggtttgaataagtctcagatcctggaaatgaaccaaaaaaagtcagataccagcatgctgtctccattaaatgctgctcgttgccaagatgaaaaggcacaccttccaaccatgaaatcctttggtactcacaggagagtgacccacaaaccaaatctgttgggttctaaatggtttataaaaatattaaagaggcatttctcatctgtatcaacggaaacatttgttccaaaacaagacttcccacaggtgaagagaccactaaaagcatccaggaccagacagccatccaggaccaaccttccagttctgtctgtgaacgaggacctaatgcactgcacagcatttgcaacggcagatgagtatcatctgggaaatctgtctcaagatctggcctcccacggatatgttgaagtaacaagcttgcctagaggtacttcttcttgaacctggggccaagtatgttaaaatgtattggataattttcctatgatactatcttaagtatgtatttgtttgcaattcattttcttttgaaaggattgtatcataaaagtggatgttgaatctctttataaagatgacaaagttaagaattaaaatgtatttacagagaactcattaaaatcagtatgatttatt

SEQ ID NO: 419366 - DNA, 1968 bp, Homo sapiens
ggtgggcgggagcgcccttccaggagatgggttggctgcagtagtgagaggctgggggtgcggctctttccctgcagtcctgccgaggaagcgtgcgtccctggcgcttccttcttctcttccggcggagagcttgggatgtggtaatgccagccacactcctcagagccgtggccagatctcatcatatattatcaaaagcacatcagtgccgaagaatcggtcatctaatgttaaaaccacttaaggaatttgaaaatacaacatgcagcacactgacaatacgtcaaagcttggatttgttccttcctgataaaacagctagtggtttgaataagtctcagatcctggaaatgaaccaaaaaaagtcagataccagcatgctgtctccattaaatgctgctcgttgccaagatgaaaaggcacaccttccaaccatgaaatcctttggtactcacaggagagtgacccacaaaccaaatctgttgggttctaaatggtttataaaaatattaaagaggcatttctcatctgtatcaacggaaacatttgttccaaaacaagacttcccacaggtgaagagaccactaaaagcatccaggaccagacagccatccaggaccaaccttccagttctgtctgtgaacgaggacctaatgcactgcacagcatttgcaacggcagatgagtatcatctgggaaatctgtctcaagatctggcctcccacggatatgttgaagtaacaagcttgcctagagatgcagcaaatattttggtgatgggtgtggaaaattctgcaaaagaaggtgatcctggaacaatattcttcttcagggaaggagctgctgtgttttggaatgtgaaagacaaaactatgaagcatgtgatgaaagttctagaaaaacatgaaattcagccctatgaaatcgcactggtacactgggaaaatgaagaacttaactacataaaaatagagggacagtcaaaacttcacaggggggaaatcaagttaaattcagagctggatttagatgatgccattctagagaagtttgctttctccaatgctctatgcctttctgtaaaactggcaatttgggaagcatcactggataaatttattgaatctattcagtcaattcctgaggctttaaaagctgggaagaaagtgaaactatctcatgaagaagttatgcagaaaatcggtgaactctttgctctaaggcaccgtataaacttgagttcagacttcctgattactcctgatttctactgggacagagaaaacctggaaggactttacgataaaacgtgtcaattccttagcattggccgaagagttaaggtcatgaatgaaaaacttcagcactgcatggaactaacagatctaatgcggaatcacctgaatgagaagagggcactccgcttggagtggatgattgtcatcctcattaccatagaggtaatgtttgagctgggacgagtatttttctgatcaagtgataaccaaagtgtcactgcaagagatattcaagttctacaatcaaaaattaaatgttcggcccggcgcggtgcctcatgcctgtaatcccagcactttcggaggccaagaagggtggcttgagatgagatcaggagctcaagacaagcctggccaacatggtgaaaccccatctctactaaaaataccaaaattagccaggtgtgttggcacacgcccgtcatctcagctactcaggaggctgaggcaggagaatctcttgaacttgggaggcggaggttgcagtgagctaagatcacaccactgcactccagccagggcaacagtgagactcagtctcaaaaataaacaataaaataaataaataaatgttcactactgggtgatcatttaataggtgtttttttaatcaagaaattatctttttcagcccagtatatcgtgtgaataaaattatgaagaatct

SEQ ID NO: 419367 - DNA, 1503 bp, Homo sapiens
ggtgggcgggagcgcccttccaggagatgggttggctgcagtagtgagaggctgggggtgcggctctttccctgcagtcctgccgaggaagcgtgcgtccctggcgcttccttcttctcttccggcggagagcttgggatgtggtaatgccagccacactcctcagagccgtggccagatctcatcatatattatcaaaagcacatcagtgccgaagaatcggtcatctaatgttaaaaccacttaaggaatttgaaaatacaacatgcagcacactgacaatacgtcaaagcttggatttgttccttcctgataaaacagctagtggtttgaataagtctcagatcctggaaatgaaccaaaaaaagtcagataccagcatgctgtctccattaaatgctgctcgttgccaagatgaaaaggcacaccttccaaccatgaaatcctttggtactcacaggagagtgacccacaaaccaaatctgttgggttctaaatggtttataaaaatattaaagaggcatttctcatctgtatcaacggaaacatttgttccaaaacaagacttcccacaggtgaagagaccactaaaagcatccaggaccagacagccatccaggaccaaccttccagttctgtctgtgaacgaggacctaatgcactgcacagcatttgcaacggcagatgagtatcatctgggaaatctgtctcaagatctggcctcccacggatatgttgaagtaacaagcttgcctagagatgcagcaaatattttggtgatgggtgtggaaaattctgcaaaagaaggtgatcctggaacaatattcttcttcagggaaggagctgctgtgttttggaatgtgaaagacaaaactatgaagcatgtgatgaaagttctagaaaaacatgaaattcagccctatgaaatcgcactggtacactgggaaaatgaagaacttaactacataaaaatagagggacagtcaaaacttcacaggggggaaatcaagttaaattcagagctggatttagatgatgccattctagagaagtttgctttctccaatgctctatgcctttctgtaaaactggcaatttgggaagcatcactggataaatttattgaatctattcagtcaattcctgaggctttaaaagctgggaagaaagtgaaactatctcatgaagaagttatgcagaaaatcggtgaactctttgctctaaggcaccgtataaacttgagttcagacttcctgattactcctgatttctactgggacagagaaaacctggaaggactttacgataaaacgtgtcaattccttagcattggccgaagagttaaggtacgtattttgcacttctaatgagagaaaaagacacgttgtcgcctataagttgaatatgtttaactgcttgcagagaaatatcttgtttgacttccattcaaatctctttatatttccccttcttgtcctctgtacagtcacttcaattttttgt

SEQ ID NO: 419368 - DNA, 1151 bp, Homo sapiens
aacgatggtcctcagctcaggacgagctgctgtgttttggaatgtgaaagacaaaactatgaagcatgtgatgaaagttctagaaaaacatgaaattcagccctatgaaatcgcactggtacactgggaaaatgaagaacttaactacataaaaatagagggacagtcaaaacttcacaggggggaaatcaagttaaattcagagctggatttagatgatgccattctagagaagtttgctttctccaatgctctatgcctttctgtaaaactggcaatttgggaagcatcactggataaatttattgaatctattcagtcaattcctgaggctttaaaagctgggaagaaagtgaaactatctcatgaagaagttatgcagaaaatcggtgaactctttgctctaaggcaccgtataaacttgagttcagacttcctgattactcctgatttctactgggacagagaaaacctggaaggactttacgataaaacgtgtcaattccttagcattggccgaagagttaaggtcatgaatgaaaaacttcagcactgcatggaactaacagatctaatgcggaatcacctgaatgagaagagggcactccgcttggagtggatgattgtcatcctcattaccatagaggtaatgtttgagctgggacgagtatttttctgatcaagtgataaccaaagtgtcactgcaagagatattcaagttctacaatcaaaaattaaatgttcggcccggcgcggtgcctcatgcctgtaatcccagcactttcggaggccaagaagggtggcttgagatgagatcaggagctcaagacaagcctggccaacatggtgaaaccccatctctactaaaaataccaaaattagccaggtgtgttggcacacgcccgtcatctcagctactcaggaggctgaggcaggagaatctcttgaacttgggaggcggaggttgcagtgagctaagatcacaccactgcactccagccagggcaacagtgagactcagtctcaaaaataaacaataaaataaataaataaatgttcactactgggtgatcatttaataggtgtttttttaatcaagaaattatctttttcagcccagtatatcgtgtgaataaaattatgaagaatct

SEQ ID NO: 419369 - DNA, 1085 bp, Homo sapiens
agcaagaccctctctcttaccaaaaaaaaaaaagttttcataaagcactatgtaaatattaaatacaatagaaacaatgatttttaattcaagataaataaaaagttataattttcctttttaaaggcaccgtataaacttgagttcagacttcctgattactcctgatttctactgggacagagaaaacctggaaggactttacgataaaacgtgtcaattccttagcattggccgaagagttaaggtacgtattttgcacttctaatgagagaaaaagacacgttgtcgcctataagttgaatatgtttaactgcttgcagagaaatatcttgtttgacttccattcaaatctctttatatttccccttcttgtcctctgtacagtcacttcaattttttgtgtcaaaggatcttctgatattagctctacagactagataaggttggtgaataagatgagagtttggaagcctaatggtccatcagtaagttcttgtcaagtttcaagcaagagttcatgactgcttctgatctgtcatggtgacagtgagaatagaaataaatttaagaaagaatcatgtaagacaaatcaagtgatgggtaataagaggccatggagaagaaagaataaaggatgactgatgtttgcctggaggtgacaagtagaaaggtggaaaaacaataatgagaggtcagagaggggaggtgacagactaaatctaagatatgctgagattagagtagcaacaagatatccaattagctccgtcatgcaggcatttagaagggcagaagcaaagtcgggaaaagagacgtgtattaagaaatcccagcactttgggaggctgaggcggatggatcacctgaggttgggagtttgagaccagcctggccaacatggcgaaaccctgtctctactaaaaatacaaaaattagccaggcatggtggcattctcctatagtccgagctactcgagaggctgaggcaggagaatcacttgaacccaggaggtggaggttgcagtgagccaaggtcgagccagtgcactccagcctggatgacagagtgagactccgtctca

SEQ ID NO: 419370 - DNA, 366 bp, Homo sapiens
caaattagtaagtaccatcatattttgaaaaatcgcatcctgtatacattctagaagttacatggttttatatacgaccctaaagaatgtattccatctgtatcttagttgtttcttttatttttttaaatcagggaaggagctgctgtgttttggaatgtgaaagacaaaactgtaagtgtaaataaaaatgtgaaaatataaaaatttagttttgtgagaatgaattgttaattagcacatactgaaacattagaagggaaattaatagattatgcacaacttatttgctctgcattacatgatacttatcagtttcatcttccaaaatatattgtattttgggttaagatttcctgctttttc

SEQ ID NO: 419371 - DNA, 1411 bp, Homo sapiens
atcaactttaaagatattttaaacttgatgaagacttctgaatctatcagaaaacaggttagaatgtctgtcttcaagtcttgattctgaaaagtagcccctgagcctgtttcattttggctgtgtttttattactgtgcagctgacaccccttggaaaggacctaatgcactgcacagcatttgcaacggcagatgagtatcatctgggaaatctgtctcaagatctggcctcccacggatatgttgaagtaacaagcttgcctagaggtacttcttcttgaacctggggccaaatgcagcaaatattttggtgatgggtgtggaaaattctgcaaaagaaggtgatcctggaacaatattcttcttcagggaaggagctgctgtgttttggaatgtgaaagacaaaactatgaagcatgtgatgaaagttctagaaaaacatgaaattcagccctatgaaatcgcactggtacactgggaaaatgaagaacttaactacataaaaatagagggacagtcaaaacttcacaggggggaaatcaagttaaattcagagctggatttagatgatgccattctagagaagtttgctttctccaatgctctatgcctttctgtaaaactggcaatttgggaagcatcactggataaatttattgaatctattcagtcaattcctgaggctttaaaagctgggaagaaagtgaaactatctcatgaagaagttatgcagaaaatcggtgaactctttgctctaaggcaccgtataaacttgagttcagacttcctgattactcctgatttctactgggacagagaaaacctggaaggactttacgataaaacgtgtcaattccttagcattggccgaagagttaaggtcatgaatgaaaaacttcagcactgcatggaactaacagatctaatgcggaatcacctgaatgagaagagggcactccgcttggagtggatgattgtcatcctcattaccatagaggtaatgtttgagctgggacgagtatttttctgatcaagtgataaccaaagtgtcactgcaagagatattcaagttctacaatcaaaaattaaatgttcggcccggcgcggtgcctcatgcctgtaatcccagcactttcggaggccaagaagggtggcttgagatgagatcaggagctcaagacaagcctggccaacatggtgaaaccccatctctactaaaaataccaaaattagccaggtgtgttggcacacgcccgtcatctcagctactcaggaggctgaggcaggagaatctcttgaacttgggaggcggaggttgcagtgagctaagatcacaccactgcactccagccagggcaacagtgagactcagtctcaaaaataaacaataaaataaataaataaatgtt

SEQ ID NO: 419372 - DNA, 1912 bp, Homo sapiens
ggtgggcgggagcgcccttccaggagatgggttggctgcagtagtgagaggctgggggtgcggctctttccctgcagtcctgccgaggaagcgtgcgtccctggcgcttccttcttctcttccggcggagagcttgggatgtggtaatgccagccacactcctcagagccgtggccagatctcatcatatattatcaaaagcacatcagtgccgaagaatcggtcatctaatgttaaaaccacttaaggaatttgaaaatacaacatgcagcacactgacaatacgtcaaagcttggatttgttccttcctgataaaacagctagtggtttgaataagtctcagatcctggaaatgaaccaaaaaaagtcagataccagcatgctgtctccattaaatgctgctcgttgccaagatgaaaaggcacaccttccaaccatgaaatcctttggtactcacaggagagtgacccacaaaccaaatctgttgggttctaaatggtttataaaaatattaaagaggcatttctcatctgtatcaacggaaacatttgttccaaaacaagacttcccacaggtgaagagaccactaaaagcatccaggaccagacagccatccaggaccaaccttccagttctgtctgtgaacgaggacctaatgcactgcacagcatttgcaacggcagatgagtatcatctgggaaatctgtctcaagatctggcctcccacggatatgttgaagtaacaagcttgcctagagatgcagcaaatattttggtgatgggtgtggaaaattctgcaaaagaaggtgatcctggaacaatattcttcttcagggaaggagctgctgtgttttggaatgtgaaagacaaaactatgaagcatgtgatgaaagttctagaaaaacatgaaattcagccctatgaaatcgcactggtacactgggaaaatgaagaacttaactacataaaaatagaatgatgccattctagagaagtttgctttctccaatgctctatgcctttctgtaaaactggcaatttgggaagcatcactggataaatttattgaatctattcagtcaattcctgaggctttaaaagctgggaagaaagtgaaactatctcatgaagaagttatgcagaaaatcggtgaactctttgctctaaggcaccgtataaacttgagttcagacttcctgattactcctgatttctactgggacagagaaaacctggaaggactttacgataaaacgtgtcaattccttagcattggccgaagagttaaggtcatgaatgaaaaacttcagcactgcatggaactaacagatctaatgcggaatcacctgaatgagaagagggcactccgcttggagtggatgattgtcatcctcattaccatagaggtaatgtttgagctgggacgagtatttttctgatcaagtgataaccaaagtgtcactgcaagagatattcaagttctacaatcaaaaattaaatgttcggcccggcgcggtgcctcatgcctgtaatcccagcactttcggaggccaagaagggtggcttgagatgagatcaggagctcaagacaagcctggccaacatggtgaaaccccatctctactaaaaataccaaaattagccaggtgtgttggcacacgcccgtcatctcagctactcaggaggctgaggcaggagaatctcttgaacttgggaggcggaggttgcagtgagctaagatcacaccactgcactccagccagggcaacagtgagactcagtctcaaaaataaacaataaaataaataaataaatgttcactactgggtgatcatttaataggtgtttttttaatcaagaaattatctttttcagcccagtatatcgtgtgaataaaattatgaagaatct

SEQ ID NO: 419373 - DNA, 1450 bp, Homo sapiens
ggtgggcgggagcgcccttccaggagatgggttggctgcagtagtgagaggctgggggtgcggctctttccctgcagtcctgccgaggaagcgtgcgtccctggcgcttccttcttctcttccggcggagaggacctaatgcactgcacagcatttgcaacggcagatgagtatcatctgggaaatctgtctcaagatctggcctcccacggatatgttgaagtaacaagcttgcctagagatgcagcaaatattttggtgatgggtgtggaaaattctgcaaaagaaggtgatcctggaacaatattcttcttcagggaaggagctgctgtgttttggaatgtgaaagacaaaactatgaagcatgtgatgaaagttctagaaaaacatgaaattcagccctatgaaatcgcactggtacactgggaaaatgaagaacttaactacataaaaatagagggacagtcaaaacttcacaggggggaaatcaagttaaattcagagctggatttagatgatgccattctagagaagtttgctttctccaatgctctatgcctttctgtaaaactggcaatttgggaagcatcactggataaatttattgaatctattcagtcaattcctgaggctttaaaagctgggaagaaagtgaaactatctcatgaagaagttatgcagaaaatcggtgaactctttgctctaaggcaccgtataaacttgagttcagacttcctgattactcctgatttctactgggacagagaaaacctggaaggactttacgataaaacgtgtcaattccttagcattggccgaagagttaaggtcatgaatgaaaaacttcagcactgcatggaactaacagatctaatgcggaatcacctgaatgagaagagggcactccgcttggagtggatgattgtcatcctcattaccatagaggtaatgtttgagctgggacgagtatttttctgatcaagtgataaccaaagtgtcactgcaagagatattcaagttctacaatcaaaaattaaatgttcggcccggcgcggtgcctcatgcctgtaatcccagcactttcggaggccaagaagggtggcttgagatgagatcaggagctcaagacaagcctggccaacatggtgaaaccccatctctactaaaaataccaaaattagccaggtgtgttggcacacgcccgtcatctcagctactcaggaggctgaggcaggagaatctcttgaacttgggaggcggaggttgcagtgagctaagatcacaccactgcactccagccagggcaacagtgagactcagtctcaaaaataaacaataaaataaataaataaatgttcactactgggtgatcatttaataggtgtttttttaatcaagaaattatctttttcagcccagtatatcgtgtgaataaaattatgaagaatct

SEQ ID NO: 419374 - DNA, 674 bp, Homo sapiens
gcggagggcgactagaggagcggatatggaagcgagcgaaagccggaagcaggcaagggaccgggaggtcccagggcctagggagcggaagaggtcgcggcgacgcggctcacgtggtcagacagtcacgtggcccgagtttctcccgctaagtgggaccagagttcagtgcggctgcgcagtagcgggggtgggcgggagcgcccttccaggagatgggttggctgcagtagtgagaggctgggggtgcggctctttccctgcagtcctgccgaggaagcgtgcgtccctggcgcttccttcttctcttccggcggagaggttagtgtattgccttttctttagcagctcgagtggtccggcttggaggtctgcgccctggctcctggccgcccggaacgtgtacagttacgggttacgccagtgcggctgtgaccctttgcctcttaccgtgatctttggtcagcttagctgggagtaaaaagcactcaattaatgaaccctttttttgagccagtgcaccgcggtaactgtagaaatcgataaaataattttgagtttgaggaattgaacggcatactcccaaagatgagcgccacttagctctcgaatcgtagcctagctgtaatcgattttcttaattggtgtaattgttctctaaaagttgaaatgtg

SEQ ID NO: 419375 - DNA, 6331 bp, Homo sapiens
cgaacaattaattaaaaaggaggttaattcacagtttacagacttagcatctgcttgtttagcatatgcaataaaaggcgaagttgtggtagatttgcaaaaatgtcagttagataattgattatatatataggaatcattttttgcataatccaaatcctctttttcttttgatgatcctaagatatcattttagaacggaatgtggtatttgtaccctatgtattttatgacttaattattctaagttgaaagaatttatatatttttttgtataccacattcgtcactggatttctggaacttttttaaaaaatcggtgaattgggccgttggtggcggctgtgatgaaggaccctgcaggcatctggctgtaattggcgcctgcggcggccagggcccctacgggtgcggcgctgaaggccgccccgtaccccggaggtgtagcgtagggacccggcgggtaggccggtgtggggtgaggctccgtgcccttgctggccagccggctgaggatgctgcgctcggacatctgaaggcgggctgcgatggggggtattcgggacagcgtggctggcaggcgggtcacgtccgccttcatgtcgctcagcaactcctccagctggttcagaaccttgtgcaggacggcgttggccggcttgttccccgccagcgactccttggagaggtgctggtggctctcggccaggcactcggcctcggcgaagcgggcgtggagggccatggcggggtgcgccggctcctgcgacaggttcaggtaggccgcccgccgcagctgctcctcaatcaccagcgcctgctccaggagcttgaacctccgggccaggaacttatttttcatctccagaaagttccccttattggcttcagttttaaatggctcgttgataatggcaaattgagcatcattctggatgtcctgccaccgtgcatagccatggaggacaatcccagccagaagccaatagtcatgtcttctgtgccagatctcattgagtttccccgaggaaatagctgcccgttcctcattctgccacagtgtgtgaagctctgtgaagccaccatcggcgatattgaacatgaaccggggcttctctgtcttttcctctcgtcgcccattggaccgtggctcatctcgaggccctggtcgaagctcccggtcaccttttacatcttctgacttctctctgtccccacggtacccaggttcaggctccatctctccaggcacccctggcacctcatcctctagaggaatcttccttggctccagccgctccccaagtgatggggctgggctgggggcatcagcctctgtctccatcttctccccaattctgctgttcttctctggcttttcctcctggttttcagcttcctccttctcaagaggtgtccttatgccttctcctttctcacttggagctggagtagcaggtttagaggtgcagggactgttggtagcagaagcctcaggagtggtgggagacgttttggtaggagaggaggctctggaggagcgcttagaatcggcgctggggtcaggcatcagttccggcattgaccaacgcccattgatgtgctcaaactcctgcaccttctttttgacgagagacatgactccaatgcgggtcaacacctgctggcgactcagtccctcccgagggaccccatcggcaaaggtttcagagccgtctgccccaggctcacacagatggcgcatgaacaaagacacataggccttaaactccttctcagtcttgcccctcaggtcccgcaccagccactgtgtggtgaaggcatcctgtggtggcatcccccagcgcatcacagcattgaggaaagccttccgctgacgggtgttgaagcccagcacctcaatgttgcccccgactcgggccagcagtggaggcagtggcttatctttctcattccggagctgcctctttgactgtctacgcccttcaggacgttcatcgaagtcttcatcctcctcctctgaacccaccgagtactctgactggttgtcttggtcttcctgagcagcatcattgtagttaacttgcttgcgaacccgcttgcccttgcctagattccgggctaggtcttcctgctgttgctcatagtgatgcctcagcagcttctcccagtagtcagggtccacattctcctcctgcttgatgatctctcgctcaatttcctcaatcttgtcttcttcccgcacgacgtactgtgccaccttgaaggagctgagatactcattcatgttctgcacgtcagtgtcctcagttgcatcctggttccggtccaacagccgagcgatggcctcattgtcataatgaatcacactgctgtcctcctccttgttctccccctcgttttcatccttgaatagctcttcagtgccaaatttgagaatgtcgtcaagctcctgcttggacatggagcctgccttggagcccagcccaggccgcacaaccaggtgtgtcagcatcatctttctcttggccacttgtgtgattcgctcttccactgacgcgcgagtcacaaaccggtaaatcatcactttgttggcctggccaatccgatgagcccggctaaaggcctggatgtcattatgggggttccagtcagaatcaaagatgatgacagtgtcagcagtggccagattgatgcccaggcccccagctcgggtggacaggaggaagcagaattgttgggccccaggagcattaaaccgatcgatggcctcctgcctcagggcacccgtgataccaccatcgatgcgctcatacttgtagccttcatagtctaagaagtcctcaagcaagtctaacattttggtcatctgcgagaagatgagcactcggtgtccttgctccttcagctttcgcagcatcttctggagcagcatgagcttcccagacgacttaataagtgccccaccctcataagccccactggggagtttgggggactccatagcagccacgggaaaaaggtatggatggttgcagcacttcttaagatccatcatgatattaagcagcgacacctggttcccaccacctcgtgaattcaaggcctcaaaatttcgagtcaggatgtatttgtagtatttcttctgcatggggcttagctccacccgaacgatgagctctgtcttggctggcatgttcttaaagacatctgccttgagtctccgcagcatgtgtggccccagcaaatcatgcagtttcttgatctggtcctctttggatatgtcagcaaactcctccaggaagccctccaagttgttaaatctctctggggtgaggaagttcaggagatggaagagctcctccagattattctgcaatggggttcctgtcagcagcaacttatgatctatcttgtaaccattgagaaccctgaaaaacttggactggttgttcttgagtcgatgggcctcatctaccacaagacaggcccagcggatggaaccaagtgctgcctgatcaatggtgatcagctcatacgatgtcaggagaacatggaacttcacctgtgcctcccttttcatcttaaaagctttcttgccccctttgatggcattgtcctcaaaggagaattcattctcacgaatgatggcccggctgtccttgtcacccgtgtatgtcaccacatagaatttgggtgcccacatctggaactcccgctcccagttaatgatggtagagagtggggcactcaccaggaagggaccttttgtgtggccctccttgtagagtgagtagaggaagacgatggtttgtatggtcttgcctagccccatctcatcagctagaatggtgtcagtgccctgggcccaggagaagcgtagccagttcagcccttccaactgatacatgtgcagggtgcctccagtggctgtgataaaccgtggctgagtctcatatttcacggtaggatcattagtgggagaactgggaggcccatcaccctgtagctccttcttcttcttcttatacttgcggggctgggcagggtcttcccccataattagttctcggtgtctccagtagctttgcttatgttcttcgtattcagggatattcatttcatcttcctcccacgtggactggtcatatggtaagtccctccattttactagatagtggtaattcccctttttatccacactgtggttgatgatgcggtggacggtcatccactctggcttgatgccaaaacgatagtacttctcctccatctcagcatagtgcgggtctttcactttacgcttgtcgctcttcccatcatcctcgccggagccatagtccaggggtgggggctcatccatgtcattcttccgctggtagtttcgatacataaccaaatggaagatttccagctgaagctccttggcccaggagcagtgccagtaggatagtcctacccacttgacaaagaactctcgctctgatctgccttgaagaggacgggggggtgggacatctggatttccatctgcctgttgaggggctggcactgctacaggtggctccccccaccgccaatgtaggatcttctgcactcgacccttcagcacggggcatgtgcatcggggacacagccattcaccattgggaatgtcaggcaggggagggtttagacaatgaatgtggtaggaggagatgcacgcgtcacagcacaggagctccccgccgtccttgcatacgcggcagtactccatgtgatcatcctcctcctccttctccccttcttcctctccctcctcttcgtattcttcttcttcctccttggcctcccactggaccccctccttctcacagtgagggcagctccatttgccctctggagcccggtcaagctcaggatcaaggcagacgaggtggtaggcacgagggcaggtgtcacacagaataatttccccaccctgctggcacacctcacagtaatcctggtgatccgtctcgtagccatcaacctcctcctccccggccactgcaggacagcccaggaccttcttcttcttccttcctggccggcctctctttagtttcttggtgcggacagggccatcaggccggcctgaggcactgtggacactgccactgtccaggtctgattcctcagcctctggttcaggaccttcgtcgctctgaaaaacatacgagcctcctttcttcctcttgccacccagaagccctagttttattttgagtggtgccattttctttccccgaagcttcttgcgtccatcaggcactcgggggctcttactccgcctcttatggcctggacctttgccctctttggttttggctcttcggatgggtgggggctggatatcagcagcagggggtggtggaagggcggggggtccggagggtgctatgggggtggccgacgagacagcagctgacacctgctcagctacagctgctgctgctgctgccgctgccgccgccacagcagctgctgaccccttgaaggggttgttggcactgaactctctccatttggccccaaggatggtcatcatcttagacattgggatcttaggattcttcttagcaattaggggcctcatgaactggctgaaggctttgtagttggtgagcgtgtggtaatcctcctcagagaacacatgctccacatcctccaggccccaggtcagaagcagagttgctgatgacttctgttccacttgcttttgccccccatctccctccccctttttccgccgctttgtcttcttctcctttttttctcggtgcttccttcttcgtttccgacccggtccggttccatattcactgcccccactctctgacttctcccggtactcatctcgctcagaaccaaattcctcctcactgtcacgcttcttgcgttttcggggttttcctggcttgttctccttctgcttcttgggtcctcgttttctcttcttcacacccaatgctgacggcagcagccgaatgtcatccttatcaggcatcctgtcaccccaacacagtcctggaggaaaagaaatcctcagctggtcatttttacttcttgcccacaggatcacagtgtctgccgccttcatcacacaggagaaagtctccacaattacctaaatattcctcctcccaagtagcctaaaacctaccttcaattctattcccatctccctgctccctttgggaactagggggccataccctttgtttcccgatctcacccttcacctccatattttgttccagatatcctgacccattcatctatacgcagtatgggagacccaaacaaagat

SEQ ID NO: 419376 - DNA, 6831 bp, Homo sapiens
aactgagccagtgaacggcacctttattctgaggctgaacagcagttgacttcctccctcataactgctccaccctccacgtggggagaggtaggggacggtaacatgcagccacccctcctcgtcccttcctccctcccagggctcattttcatccctctctaaagtccccctcctctcttcaaagctctcttccccacaaaagttcctaaaggccaggcaaggctgattctccacttccacatgagacagagctgattctgcagggaaacggctggggaggctccacctctttcctccccacaaccatttactgggaagttgtgtatacttggcagtgtgggaggaaggtacttggaagaccctgccagccatctcccacccagacttcttctcaccagcacagtcttcaaggcttggtgggaaaggtgtgtgggagtggagaaagacaaagggcccttcttgaagagaggagctgcagagaggggcaaaggggttcctagcccagtgatggcccaaggggtggggaaggtggagggctggcagcaggccccagcgcttgagctgggggtcggcctcggggacggggcctgggtgaagggcaggcctgggatccagtcagtcgtctatacagatcacctccccggctcggggctccttccgatccagcccgtctgacaccaatgcccccaccatttccttctccttcttcacaagcactggagggccgttggtggcggctgtgatgaaggaccctgcaggcatctggctgtaattggcgcctgcggcggccagggcccctacgggtgcggcgctgaaggccgccccgtaccccggaggtgtagcgtagggacccggcgggtaggccggtgtggggtgaggctccgtgcccttgctggccagccggctgaggatgctgcgctcggacatctgaaggcgggctgcgatggggggtattcgggacagcgtggctggcaggcgggtcacgtccgccttcatgtcgctcagcaactcctccagctggttcagaaccttgtgcaggacggcgttggccggcttgttccccgccagcgactccttggagaggtgctggtggctctcggccaggcactcggcctcggcgaagcgggcgtggagggccatggcggggtgcgccggctcctgcgacaggttcaggtaggccgcccgccgcagctgctcctcaatcaccagcgcctgctccaggagcttgaacctccgggccaggaacttatttttcatctccagaaagttccccttattggcttcagttttaaatggctcgttgataatggcaaattgagcatcattctggatgtcctgccaccgtgcatagccatggaggacaatcccagccagaagccaatagtcatgtcttctgtgccagatctcattgagtttccccgaggaaatagctgcccgttcctcattctgccacagtgtgtgaagctctgtgaagccaccatcggcgatattgaacatgaaccggggcttctctgtcttttcctctcgtcgcccattggaccgtggctcatctcgaggccctggtcgaagctcccggtcaccttttacatcttctctcttgcccaaatcccctgtttccccctccggcctctccctgtgttcctgtccatccaacggcttctcctcccccctttctcctggcgtcgactctgtggctgacttctctctgtccccacggtacccaggttcaggctccatctctccaggcacccctggcacctcatcctctagaggaatcttccttggctccagccgctccccaagtgatggggctgggctgggggcatcagcctctgtctccatcttctccccaattctgctgttcttctctggcttttcctcctggttttcagcttcctccttctcaagaggtgtccttatgccttctcctttctcacttggagctggagtagcaggtttagaggtgcagggactgttggtagcagaagcctcaggagtggtgggagacgttttggtaggagaggaggctctggaggagcgcttagaatcggcgctggggtcaggcatcagttccggcattgaccaacgcccattgatgtgctcaaactcctgcaccttctttttgacgagagacatgactccaatgcgggtcaacacctgctggcgactcagtccctcccgagggaccccatcggcaaaggtttcagagccgtctgccccaggctcacacagatggcgcatgaacaaagacacataggccttaaactccttctcagtcttgcccctcaggtcccgcaccagccactgtgtggtgaaggcatcctgtggtggcatcccccagcgcatcacagcattgaggaaagccttccgctgacgggtgttgaagcccagcacctcaatgttgcccccgactcgggccagcagtggaggcagtggcttatctttctcattccggagctgcctctttgactgtctacgcccttcaggacgttcatcgaagtcttcatcctcctcctctgaacccaccgagtactctgactggttgtcttggtcttcctgagcagcatcattgtagttaacttgcttgcgaacccgcttgcccttgcctagattccgggctaggtcttcctgctgttgctcatagtgatgcctcagcagcttctcccagtagtcagggtccacattctcctcctgcttgatgatctctcgctcaatttcctcaatcttgtcttcttcccgcacgacgtactgtgccaccttgaaggagctgagatactcattcatgttctgcacgtcagtgtcctcagttgcatcctggttccggtccaacagccgagcgatggcctcattgtcataatgaatcacactgctgtcctcctccttgttctccccctcgttttcatccttgaatagctcttcagtgccaaatttgagaatgtcgtcaagctcctgcttggacatggagcctgccttggagcccagcccaggccgcacaaccaggtgtgtcagcatcatctttctcttggccacttgtgtgattcgctcttccactgacgcgcgagtcacaaaccggtaaatcatcactttgttggcctggccaatccgatgagcccggctaaaggcctggatgtcattatgggggttccagtcagaatcaaagatgatgacagtgtcagcagtggccagattgatgcccaggcccccagctcgggtggacaggaggaagcagaattgttgggccccaggagcattaaaccgatcgatggcctcctgcctcagggcacccgtgataccaccatcgatgcgctcatacttgtagccttcatagtctaagaagtcctcaagcaagtctaacattttggtcatctgcgagaagatgagcactcggtgtccttgctccttcagctttcgcagcatcttctggagcagcatgagcttcccagacgacttaataagtgccccaccctcataagccccactggggagtttgggggactccatagcagccacgggaaaaaggtatggatggttgcagcacttcttaagatccatcatgatattaagcagcgacacctggttcccaccacctcgtgaattcaaggcctcaaaatttcgagtcaggatgtatttgtagtatttcttctgcatggggcttagctccacccgaacgatgagctctgtcttggctggcatgttcttaaagacatctgccttgagtctccgcagcatgtgtggccccagcaaatcatgcagtttcttgatctggtcctctttggatatgtcagcaaactcctccaggaagccctccaagttgttaaatctctctggggtgaggaagttcaggagatggaagagctcctccagattattctgcaatggggttcctgtcagcagcaacttatgatctatcttgtaaccattgagaaccctgaaaaacttggactggttgttcttgagtcgatgggcctcatctaccacaagacaggcccagcggatggaaccaagtgctgcctgatcaatggtgatcagctcatacgatgtcaggagaacatggaacttcacctgtgcctcccttttcatcttaaaagctttcttgccccctttgatggcattgtcctcaaaggagaattcattctcacgaatgatggcccggctgtccttgtcacccgtgtatgtcaccacatagaatttgggtgcccacatctggaactcccgctcccagttaatgatggtagagagtggggcactcaccaggaagggaccttttgtgtggccctccttgtagagtgagtagaggaagacgatggtttgtatggtcttgcctagccccatctcatcagctagaatggtgtcagtgccctgggcccaggagaagcgtagccagttcagcccttccaactgatacatgtgcagggtgcctccagtggctgtgataaaccgtggctgagtctcatatttcacggtaggatcattagtgggagaactgggaggcccatcaccctgtagctccttcttcttcttcttatacttgcggggctgggcagggtcttcccccataattagttctcggtgtctccagtagctttgcttatgttcttcgtattcagggatattcatttcatcttcctcccacgtggactggtcatatggtaagtccctccattttactagatagtggtaattcccctttttatccacactgtggttgatgatgcggtggacggtcatccactctggcttgatgccaaaacgatagtacttctcctccatctcagcatagtgcgggtctttcactttacgcttgtcgctcttcccatcatcctcgccggagccatagtccaggggtgggggctcatccatgtcattcttccgctggtagtttcgatacataaccaaatggaagatttccagctgaagctccttggcccaggagcagtgccagtaggatagtcctacccacttgacaaagaactctcgctctgatctgccttgaagaggacgggggggtgggacatctggatttccatctgcctgttgaggggctggcactgctacaggtggctccccccaccgccaatgtaggatcttctgcactcgacccttcagcacggggcatgtgcatcggggacacagccattcaccattgggaatgtcaggcaggggagggtttagacaatgaatgtggtaggaggagatgcacgcgtcacagcacaggagctccccgccgtccttgcatacgcggcagtactccatgtgatcatcctcctcctccttctccccttcttcctctccctcctcttcgtattcttcttcttcctccttggcctcccactggaccccctccttctcacagtgagggcagctccatttgccctctggagcccggtcaagctcaggatcaaggcagacgaggtggtaggcacgagggcaggtgtcacacagaataatttccccaccctgctggcacacctcacagtaatcctggtgatccgtctcgtagccatcaacctcctcctccccggccactgcaggacagcccaggaccttcttcttcttccttcctggccggcctctctttagtttcttggtgcggacagggccatcaggccggcctgaggcactgtggacactgccactgtccaggtctgattcctcagcctctggttcaggaccttcgtcgctctgaaaaacatacgagcctcctttcttcctcttgccacccagaagccctagttttattttgagtggtgccattttctttccccgaagcttcttgcgtccatcaggcactcgggggctcttactccgcctcttatggcctggacctttgccctctttggttttggctcttcggatgggtgggggctggatatcagcagcagggggtggtggaagggcggggggtccggagggtgctatgggggtggccgacgagacagcagctgacacctgctcagctacagctgctgctgctgctgccgctgccgccgccacagcagctgctgaccccttgaaggggttgttggcactgaactctctccatttggccccaaggatggtcatcatcttagacattgggatcttaggattcttcttagcaattaggggcctcatgaactggctgaaggctttgtagttggtgagcgtgtggtaatcctcctcagagaacacatgctccacatcctccaggccccaggtcagaagcagagttgctgatgacttctgttccacttgcttttgccccccatctccctccccctttttccgccgctttgtcttcttctcctttttttctcggtgcttccttcttcgtttccgacccggtccggttccatattcactgcccccactctctgacttctcccggtactcatctcgctcagaaccaaattcctcctcactgtcacgcttcttgcgttttcggggttttcctggcttgttctccttctgcttcttgggtcctcgttttctcttcttcacacccaatgctgacggcagcagccgaatgtcatccttatcaggcatcctgtcaccccaacacagtcctggaggaaaagaaatcctcagctggtcatttttacttcttgcccacaggatcacagtgtctgccgccttcatcacacaggagaaagtctccacaattacctaaatattcctcctcccaagtagcctaaaacctaccttcaattctattcccatctccctgctccctttgggaactagggggccataccctttgtttcccgatctcacccttcacctccatattttgttccagatatcctgacccattcatctatacgcagtatgggagacccaaacaaagat

SEQ ID NO: 419377 - DNA, 1900 bp, Homo sapiens
ttgggtgaaagttccagggctcaatccaggaccacactcttattggccaggcaggggctcccacagagctttgagtaacttcttggttgtgcagtctgcaggcaatgttggcattgtaaattcctcccttgcagcctccttcatgtggtgaggggatcacttcagctgcctgctgtggacaaagaacatcaaattacagcatcacgagtgctattgttgcctgtggtggtctccctgtccaagcgggaccgctttgcagagaccagaggcatatcgcggcttgagctgaaaatgcatttgttgcagcttaggttgaattatttttcgttttctcttcttcacacccaatgctgacggcagcagccgaatgtcatccttatctggcggcgggggcggcggcggcgggggcagcggtggcggcggcggcggcggcggcgggaagaggtggcagccgggggggctgtggcggtcgcggccccggtcgtggcccggcccgcgcccgagtactccctcgtcgtcgtcctcctcatcgtcctcgtcggccgcctccacctcctcctcctcctccaaccaatatgactggtgttctcataagaggaagaaattttgacacagacatatatacagggaaatccatgtgaagacacatggagaaaacagccatctacaagatgaggagagagggctcagaagaaaccaaccctgctgacaccctgatcttggacttctggcctttagaatcataacaaaatccatttttattgttgaagccacccactctgtgatacactgctatggcagccctagcaaactaaaacagtgagtaaagagtatatgggtatactctatagcctatattgcaacttatttaaaatcctgaaattatttccaaacaaaaaagtgaattcctactgaacacattttgcacaccaggcattgtacaggaattcttgggtgaaagttccagggctcaatccaggaccacactcttattggccaggcaggggctcccacagagctttgagtaacttcttggttgtgcagtctgcaggcaatgttggcattgtaaattcctcccttgcagcctccttcatgtggtgaggggatcacttcagctgcctgctgtggacaaagaacatcaaattacagcatcacgagtgctattgttgcctgtggtggtctccctgtccaagcgggaccgctttgcagagaccagaggcatatcgcggcttgagctgaaaatgcatttgttgcagcttaggttgaattatttttcgttttctcttcttcacacccaatgctgacggcagcagccgaatgtcatccttatctggcggcgggggcggcggcggcgggggcagcggtggcggcggcggcggcggcggcgggaagaggtggcagccgggggggctgtggcggtcgcggccccggtcgtggcccggcccgcgcccgagtactccctcgtcgtcgtcctcctcatcgtcctcgtcggccgcctccacctcctcctcctcctccaaccaatatgactggtgttctcataagaggaagaaattttgacacagacatatatacagggaaatccatgtgaagacacatggagaaaacagccatctacaagatgaggagagagggctcagaagaaaccaaccctgctgacaccctgatcttggacttctggcctttagaatcataacaaaatccatttttattgttgaagccacccactctgtgatacactgctatggcagccctagcaaactaaaacagtgagtaaagagtatatgggtatactctatagcctatattgcaacttatttaaaatcctgaaattatttccaaacaaaaaagtgaattcctactgaacacattttgcacaccaggcattgtacaggaattc

SEQ ID NO: 419378 - DNA, 1860 bp, Homo sapiens
caatcccttttcagaataaacttgctttataatcaatataatctctgtgcctttgaatctaacaggacacctgggtcccagacgcctgggaattgggtctctcaattccctttggttttggagggaggagtttaaaactgtgcatgggagcaggagggactcaagggtggcagtggtgagtgggaggaaatacactttgggatgactcgttcagccctgagagaggggtgtgagttacccagggaatgggtagggaaggtttaaagcaacacccaaggaaagaagggaaactcatctcttgtagtgattcaaccctgagaacagatggggagtggggttggctgtcccccatggatggatgaaaggtcacctaatcagtagtcaccaggacatagtggtggaggcacaagtggccaaggagtgctcatttggtggagactgggaaagcggctgttatttagtgtctgtgtagtagagggagcgcagctggtcccagaagaagagggagaggatggtgtgggggccgaggcggaagtaggaggcacctatacccttgtacatgccaaaaatgccctcggtccgagctgtctgcagcagagcgtccagtatcccccggtacatgaggcccttgccctgtgcatctgtgggctggttgtagagccttgtgcaggccacatcaaagggtgccatggccaagacaactgcaatgccactcatcatggcagccaccagcgccaacttccagctctggggaggaaagatctgatgcttatactggtgccctacagcaatttctgaggctgcctgtgcctgcaggtgtgtcttcaccatgtagatggggctccccaagtaggctcccatgaccccagccatggccccagctgctgcgctgcgggcaggactgtggggtgccttcggctgtgtgcaggtagcccccagcctcagccagcccataggtgcccagtcggatgccattcatcaggaactggtacaagagggcgggggccaggcctttctgcagggcagcaaggccatccaccttgccgatggtgatgaaggcatggaagacatttcggtagtgccgctggtatgtgccaggggcctgcagttctccttgcaactgcatcctggtcttcaccacctccaggggattggtgaatacacaggccccgcaggctgccaggccactcatcaagaagtccatggtgggatagctgtagcaggaactgacccaagagtaagaaagtaaaaatgggtgtcagaaagcggggttggaagacagggggaaggcctgtttcagcagtacaggttgcagaagataagaatttagatttgcagtcaagggtgtcagggtcaaatgtcaagtggtcaaacgtcagctggaatttgggagtcaagagctggcaagcagggaagagatagaaatctaggagattctggtgagaagcttaaggcaggaccctctgaggtcaaggaggggcaaaagacagaaggttgcaggtgggatggctcaggatggcgggcgacgggagcacgggagtagaggagggaatcgcggggttgggagatggaagccagggaggcaggaagaagaaagccagcaagtgagagaagaaaaggatccgggagaagagccggtgatttcctcgagccagcaacgagatctcgatccgagaaagaagtcaggactctggccaggaatgagcgtccctgagcgtccccaggcagccaccggagctcgcagtagcttcaaccccgggtagcctgcggaggccgggccgccacactcctgccactggagcgcggggccaatggggagccttcaagagccacaaccgaggccctcagccaatcagcgcc

SEQ ID NO: 419379 - DNA, 2001 bp, Homo sapiens
caatcccttttcagaataaacttgctttataatcaatataatctctgtgcctttgaatctaacaggacacctgggtcccagacgcctgggaattgggtctctcaattccctttggttttggagggaggagtttaaaactgtgcatgggagcaggagggactcaagggtggcagtggtgagtgggaggaaatacactttgggatgactcgttcagccctgagagaggggtgtgagttacccagggaatgggtagggaaggtttaaagcaacacccaaggaaagaagggaaactcatctcttgtagtgattcaaccctgagaacagatggggagtggggttggctgtcccccatggatggatgaaaggtcacgcttcttgcgttttcggggttttcctggcttgttctccttctgcttcttgggtcctcgttttctcttcttcacacccaatgctgacggcagcagccgaatgtcatccttatctggcggcgggggcggcggcggcgggggcagcggtggcggcggcggcggcggcggcgggaagaggtggcagccgggggggctgtggcggtcgcggccccggtcgtggcccggcccgcgcccgagtactccctcgtcgtcgtcctcctcatcgtcctcgtcggccgcctccacctcctcctcctcctccaaccaatatgactggtgttctcataagaggaagaaattttgacacagacatatatacagggaaatccatgtgaagacacatggagaaaacagccatctacaagatgaggagagagggctcagaagaaaccaaccctgctgacaccctgatcttggacttctggcctttagaatcataacaaaatccatttttattgttgaagccacccactctgtgatacactgctatggcagccctagcaaactaaaacagtgagtaaagagtatatgggtatactctatagcctatattgcaacttatttaaaatcctgaaattatttccaaacaaaaaagtgaattcctactgaacacattttgcacaccaggcattgtacaggaattcttgggtgaaagttccagggctcaatccaggaccacactcttattggccaggcaggggctcccacagagctttgagtaacttcttggttgtgcagtctgcaggcaatgttggcattgtaaattcctcccttgcagcctccttcatgtggtgaggggatcacttcagctgcctgctgtggacaaagaacatcaaattacagcatcacgagtgctattgttgcctgtggtggtctccctgtccaagcgggaccgctttgcagagaccagaggcatatcgcggcttgagctgaaaatgcatttgttgcagcttaggttgaattatttttcgttttctcttcttcacacccaatgctgacggcagcagccgaatgtcatccttatctggcggcgggggcggcggcggcgggggcagcggtggcggcggcggcggcggcggcgggaagaggtggcagccgggggggctgtggcggtcgcggccccggtcgtggcccggcccgcgcccgagtactccctcgtcgtcgtcctcctcatcgtcctcgtcggccgcctccacctcctcctcctcctccaaccaatatgactggtgttctcataagaggaagaaattttgacacagacatatatacagggaaatccatgtgaagacacatggagaaaacagccatctacaagatgaggagagagggctcagaagaaaccaaccctgctgacaccctgatcttggacttctggcctttagaatcataacaaaatccatttttattgttgaagccacccactctgtgatacactgctatggcagccctagcaaactaaaacagtgagtaaagagtatatgggtatactctatagcctatattgcaacttatttaaaatcctgaaattatttccaaacaaaaaagtgaattcctactgaacacattttgcacaccaggcattgtacaggaattc

SEQ ID NO: 419380 - DNA, 7541 bp, Homo sapiens
cgaacaattaattaaaaaggaggttaattcacagtttacagacttagcatctgcttgtttagcatatgcaataaaaggcgaagttgtggtagatttgcaaaaatgtcagttagataattgattatatatataggaatcattttttgcataatccaaatcctctttttcttttgatgatcctaagatatcattttagaacggaatgtggtatttgtaccctatgtattttatgacttaattattctaagttgaaagaatttatatatttttttgtataccacattcgtcactggatttctggaacttttttaaaaaatcggtgaattgggccgttggtggcggctgtgatgaaggaccctgcaggcatctggctgtaattggcgcctgcggcggccagggcccctacgggtgcggcgctgaaggccgccccgtaccccggaggtgtagcgtagggacccggcgggtaggccggtgtggggtgaggctccgtgcccttgctggccagccggctgaggatgctgcgctcggacatctgaaggcgggctgcgatggggggtattcgggacagcgtggctggcaggcgggtcacgtccgccttcatgtcgctcagcaactcctccagctggttcagaaccttgtgcaggacggcgttggccggcttgttccccgccagcgactccttggagaggtgctggtggctctcggccaggcactcggcctcggcgaagcgggcgtggagggccatggcggggtgcgccggctcctgcgacaggttcaggtaggccgcccgccgcagctgctcctcaatcaccagcgcctgctccaggagcttgaacctccgggccaggaacttatttttcatctccagaaagttccccttattggcttcagttttaaatggctcgttgataatggcaaattgagcatcattctggatgtcctgccaccgtgcatagccatggaggacaatcccagccagaagccaatagtcatgtcttctgtgccagatctcattgagtttccccgaggaaatagctgcccgttcctcattctgccacagtgtgtgaagctctgtgaagccaccatcggcgatattgaacatgaaccggggcttctctgtcttttcctctcgtcgcccattggaccgtggctcatctcgaggccctggtcgaagctcccggtcaccttttacatcttctgacttctctctgtccccacggtacccaggttcaggctccatctctccaggcacccctggcacctcatcctctagaggaatcttccttggctccagccgctccccaagtgatggggctgggctgggggcatcagcctctgtctccatcttctccccaattctgctgttcttctctggcttttcctcctggttttcagcttcctccttctcaagaggtgtccttatgccttctcctttctcacttggagctggagtagcaggtttagaggtgcagggactgttggtagcagaagcctcaggagtggtgggagacgttttggtaggagaggaggctctggaggagcgcttagaatcggcgctggggtcaggcatcagttccggcattgaccaacgcccattgatgtgctcaaactcctgcaccttctttttgacgagagacatgactccaatgcgggtcaacacctgctggcgactcagtccctcccgagggaccccatcggcaaaggtttcagagccgtctgccccaggctcacacagatggcgcatgaacaaagacacataggccttaaactccttctcagtcttgcccctcaggtcccgcaccagccactgtgtggtgaaggcatcctgtggtggcatcccccagcgcatcacagcattgaggaaagccttccgctgacgggtgttgaagcccagcacctcaatgttgcccccgactcgggccagcagtggaggcagtggcttatctttctcattccggagctgcctctttgactgtctacgcccttcaggacgttcatcgaagtcttcatcctcctcctctgaacccaccgagtactctgactggttgtcttggtcttcctgagcagcatcattgtagttaacttgcttgcgaacccgcttgcccttgcctagattccgggctaggtcttcctgctgttgctcatagtgatgcctcagcagcttctcccagtagtcagggtccacattctcctcctgcttgatgatctctcgctcaatttcctcaatcttgtcttcttcccgcacgacgtactgtgccaccttgaaggagctgagatactcattcatgttctgcacgtcagtgtcctcagttgcatcctggttccggtccaacagccgagcgatggcctcattgtcataatgaatcacactgctgtcctcctccttgttctccccctcgttttcatccttgaatagctcttcagtgccaaatttgagaatgtcgtcaagctcctgcttggacatggagcctgccttggagcccagcccaggccgcacaaccaggtgtgtcagcatcatctttctcttggccacttgtgtgattcgctcttccactgacgcgcgagtcacaaaccggtaaatcatcactttgttggcctggccaatccgatgagcccggctaaaggcctggatgtcattatgggggttccagtcagaatcaaagatgatgacagtgtcagcagtggccagattgatgcccaggcccccagctcgggtggacaggaggaagcagaattgttgggccccaggagcattaaaccgatcgatggcctcctgcctcagggcacccgtgataccaccatcgatgcgctcatacttgtagccttcatagtctaagaagtcctcaagcaagtctaacattttggtcatctgcgagaagatgagcactcggtgtccttgctccttcagctttcgcagcatcttctggagcagcatgagcttcccagacgacttaataagtgccccaccctcataagccccactggggagtttgggggactccatagcagccacgggaaaaaggtatggatggttgcagcacttcttaagatccatcatgatattaagcagcgacacctggttcccaccacctcgtgaattcaaggcctcaaaatttcgagtcaggatgtatttgtagtatttcttctgcatggggcttagctccacccgaacgatgagctctgtcttggctggcatgttcttaaagacatctgccttgagtctccgcagcatgtgtggccccagcaaatcatgcagtttcttgatctggtcctctttggatatgtcagcaaactcctccaggaagccctccaagttgttaaatctctctggggtgaggaagttcaggagatggaagagctcctccagattattctgcaatggggttcctgtcagcagcaacttatgatctatcttgtaaccattgagaaccctgaaaaacttggactggttgttcttgagtcgatgggcctcatctaccacaagacaggcccagcggatggaaccaagtgctgcctgatcaatggtgatcagctcatacgatgtcaggagaacatggaacttcacctgtgcctcccttttcatcttaaaagctttcttgccccctttgatggcattgtcctcaaaggagaattcattctcacgaatgatggcccggctgtccttgtcacccgtgtatgtcaccacatagaatttgggtgcccacatctggaactcccgctcccagttaatgatggtagagagtggggcactcaccaggaagggaccttttgtgtggccctccttgtagagtgagtagaggaagacgatggtttgtatggtcttgcctagccccatctcatcagctagaatggtgtcagtgccctgggcccaggagaagcgtagccagttcagcccttccaactgatacatgtgcagggtgcctccagtggctgtgataaaccgtggctgagtctcatatttcacggtaggatcattagtgggagaactgggaggcccatcaccctgtagctccttcttcttcttcttatacttgcggggctgggcagggtcttcccccataattagttctcggtgtctccagtagctttgcttatgttcttcgtattcagggatattcatttcatcttcctcccacgtggactggtcatatggtaagtccctccattttactagatagtggtaattcccctttttatccacactgtggttgatgatgcggtggacggtcatccactctggcttgatgccaaaacgatagtacttctcctccatctcagcatagtgcgggtctttcactttacgcttgtcgctcttcccatcatcctcgccggagccatagtccaggggtgggggctcatccatgtcattcttccgctggtagtttcgatacataaccaaatggaagatttccagctgaagctccttggcccaggagcagtgccagtaggatagtcctacccacttgacaaagaactctcgctctgatctgccttgaagaggacgggggggtgggacatctggatttccatctgcctgttgaggggctggcactgctacaggtggctccccccaccgccaatgtaggatcttctgcactcgacccttcagcacggggcatgtgcatcggggacacagccattcaccattgggaatgtcaggcaggggagggtttagacaatgaatgtggtaggaggagatgcacgcgtcacagcacaggagctccccgccgtccttgcatacgcggcagtactccatgtgatcatcctcctcctccttctccccttcttcctctccctcctcttcgtattcttcttcttcctccttggcctcccactggaccccctccttctcacagtgagggcagctccatttgccctctggagcccggtcaagctcaggatcaaggcagacgaggtggtaggcacgagggcaggtgtcacacagaataatttccccaccctgctggcacacctcacagtaatcctggtgatccgtctcgtagccatcaacctcctcctccccggccactgcaggacagcccaggaccttcttcttcttccttcctggccggcctctctttagtttcttggtgcggacagggccatcaggccggcctgaggcactgtggacactgccactgtccaggtctgattcctcagcctctggttcaggaccttcgtcgctctgaaaaacatacgagcctcctttcttcctcttgccacccagaagccctagttttattttgagtggtgccattttctttccccgaagcttcttgcgtccatcaggcactcgggggctcttactccgcctcttatggcctggacctttgccctctttggttttggctcttcggatgggtgggggctggatatcagcagcagggggtggtggaagggcggggggtccggagggtgctatgggggtggccgacgagacagcagctgacacctgctcagctacagctgctgctgctgctgccgctgccgccgccacagcagctgctgaccccttgaaggggttgttggcactgaactctctccatttggccccaaggatggtcatcatcttagacattgggatcttaggattcttcttagcaattaggggcctcatgaactggctgaaggctttgtagttggtgagcgtgtggtaatcctcctcagagaacacatgctccacatcctccaggccccaggtcagaagcagagttgctgatgacttctgttccacttgcttttgccccccatctccctccccctttttccgccgctttgtcttcttctcctttttttctcggtgcttccttcttcgtttccgacccggtccggttccatattcactgcccccactctctgacttctcccggtactcatctcgctcagaaccaaattcctcctcactgtcacgcttcttgcgttttcggggttttcctggcttgttctccttctgcttcttgggtcctcgttttctcttcttcacacccaatgctgacggcagcagccgaatgtcatccttatctggcggcgggggcggcggcggcgggggcagcggtggcggcggcggcggcggcggcgggaagaggtggcagccgggggggctgtggcggtcgcggccccggtcgtggcccggcccgcgcccgagtactccctcgtcgtcgtcctcctcatcgtcctcgtcggccgcctccacctcctcctcctcctccaaccaatatgactggtgttctcataagaggaagaaattttgacacagacatatatacagggaaatccatgtgaagacacatggagaaaacagccatctacaagatgaggagagagggctcagaagaaaccaaccctgctgacaccctgatcttggacttctggcctttagaatcataacaaaatccatttttattgttgaagccacccactctgtgatacactgctatggcagccctagcaaactaaaacagtgagtaaagagtatatgggtatactctatagcctatattgcaacttatttaaaatcctgaaattatttccaaacaaaaaagtgaattcctactgaacacattttgcacaccaggcattgtacaggaattcttgggtgaaagttccagggctcaatccaggaccacactcttattggccaggcaggggctcccacagagctttgagtaacttcttggttgtgcagtctgcaggcaatgttggcattgtaaattcctcccttgcagcctccttcatgtggtgaggggatcacttcagctgcctgctgtggacaaagaacatcaaattacagcatcacgagtgctattgttgcctgtggtggtctccctgtccaagcgggaccgctttgcagagaccagaggcatatcgcggcttgagctgaaaatgcatttgttgcagcttaggttgaattatttttcgttttctcttcttcacacccaatgctgacggcagcagccgaatgtcatccttatctggcggcgggggcggcggcggcgggggcagcggtggcggcggcggcggcggcggcgggaagaggtggcagccgggggggctgtggcggtcgcggccccggtcgtggcccggcccgcgcccgagtactccctcgtcgtcgtcctcctcatcgtcctcgtcggccgcctccacctcctcctcctcctccaaccaatatgactggtgttctcataagaggaagaaattttgacacagacatatatacagggaaatccatgtgaagacacatggagaaaacagccatctacaagatgaggagagagggctcagaagaaaccaaccctgctgacaccctgatcttggacttctggcctttagaatcataacaaaatccatttttattgttgaagccacccactctgtgatacactgctatggcagccctagcaaactaaaacagtgagtaaagagtatatgggtatactctatagcctatattgcaacttatttaaaatcctgaaattatttccaaacaaaaaagtgaattcctactgaacacattttgcacaccaggcattgtacaggaattc

SEQ ID NO: 419381 - DNA, 2013 bp, Homo sapiens
caatcccttttcagaataaacttgctttataatcaatataatctctgtgcctttgaatctaacaggacacctgggtcccagacgcctgggaattgggtctctcaattccctttggttttggagggaggagtttaaaactgtgcatgggagcaggagggactcaagggtggcagtggtgagtgggaggaaatacactttgggatgactcgttcagccctgagagaggggtgtgagttacccagggaatgggtagggaaggtttaaagcaacacccaaggaaagaagggaaactcatctcttgtagtgattcaaccctgagaacagatggggagtggggttggctgtcccccatggatggatgaaaggtcacctaatcagtagtcaccaggacatagtggtggaggcacaagtggccaaggagtgctcatttggtggagactgggaaagcggctgttatttagtgtctgtgtagtagagggagcgcagctggtcccagaagaagagggagaggatggtgtgggggccgaggcggaagtaggaggcacctatacccttgtacatgccaaaaatgccctcggtccgagctgtctgcagcagagcgtccagtatcccccggtacatgaggcccttgccctgtgcatctgtgggctggttgtagagccttgtgcaggccacatcaaagggtgccatggccaagacaactgcaatgccactcatcatggcagccaccagcgccaacttccagctctggggaggaaagatctcccactggctcaggaggtccttggtggatgagaaggtgcacagctgggtggaggaaccgacgataactcggggcaggccgcccagagccccacgccataaccccaccagaccatgtttctggccaatctcggttagcgcctgaaacatgccctgatgcttatactggtgccctacagcaatttctgaggctgcctgtgcctgcaggtgtgtcttcaccatgtagatggggctccccaagtaggctcccatgaccccagccatggccccagctgctgcgctgcgggcaggactgtggggtgccttcggctgtgtgcaggtagcccccagcctcagccagcccataggtgcccagtcggatgccattcatcaggaactggtacaagagggcgggggccaggcctttctgcagggcagcaaggccatccaccttgccgatggtgatgaaggcatggaagacatttcggtagtgccgctggtatgtgccaggggcctgcagttctccttgcaactgcatcctggtcttcaccacctccaggggattggtgaatacacaggccccgcaggctgccaggccactcatcaagaagtccatggtgggatagctgtagcaggaactgacccaagagtaagaaagtaaaaatgggtgtcagaaagcggggttggaagacagggggaaggcctgtttcagcagtacaggttgcagaagataagaatttagatttgcagtcaagggtgtcagggtcaaatgtcaagtggtcaaacgtcagctggaatttgggagtcaagagctggcaagcagggaagagatagaaatctaggagattctggtgagaagcttaaggcaggaccctctgaggtcaaggaggggcaaaagacagaaggttgcaggtgggatggctcaggatggcgggcgacgggagcacgggagtagaggagggaatcgcggggttgggagatggaagccagggaggcaggaagaagaaagccagcaagtgagagaagaaaaggatccgggagaagagccggtgatttcctcgagccagcaacgagatctcgatccgagaaagaagtcaggactctggccaggaatgagcgtccctgagcgtccccaggcagccaccggagctcgcagtagcttcaaccccgggtagcctgcggaggccgggccgccacactcctgccactggagcgcggggccaatggggagccttcaagagccacaaccgaggccctcagccaatcagcgcc

SEQ ID NO: 419382 - DNA, 1253 bp, Homo sapiens
caatcccttttcagaataaacttgctttataatcaatataatctctgtgcctttgaatctaacaggacacctgggtcccagacgcctgggaattgggtctctcaattccctttggttttggagggaggagtttaaaactgtgcatgggagcaggagggactcaagggtggcagtggtgagtgggaggaaatacactttgggatgactcgttcagccctgagagaggggtgtgagttacccagggaatgggtagggaaggtttaaagcaacacccaaggaaagaagggaaactcatctcttgtagtgattcaaccctgagaacagatggggagtggggttggctgtcccccatggatggatgaaaggtcacctaatcagtagtcaccaggacatagtggtggaggcacaagtggccaaggagtgctcatttggtggagactgggaaagcggctgttatttagtgtctgtgtagtagagggagcgcagctggtcccagaagaagagggagaggatggtgtgggggccgaggcggaagtaggaggcacctatacccttgtacatgccaaaaatgccctcggtccgagctgtctgcagcagagcgtccagtatcccccggtacatgaggcccttgccctgtgcatctgtgggctggttgtagagccttgtgcaggccacatcaaagggtgccatggccaagacaactgcaatgccactcatcatggcagccaccagcgccaacttccagctctggggaggaaagatctcccactggctcaggaggtccttggtggatgagaaggtgcacagctgggtggaggaaccgacgataactcggggcaggccgcccagagccccacgccataaccccaccagaccatgtttctggccaatctcggttagcgcctgaaacatgccctgatgcttatactggtgccctacagcaatttctgaggctgcctgtgcctgcaggtgtgtcttcaccatgtagatggggctccccaagtaggctcccatgaccccagccatggccccagctgctgcgctgcgggcaggactgtggggtgccttcggctgtgtgcaggtagcccccagcctcagccagcccataggtgcccagtcggatgccattcatcaggaactggtacaagagggcgggggccaggcctttctgcagggcagcaaggccatccaccttgccgatggtgatgaaggcatggagtgacgttcctcatccaagatcctctagagcgaca

SEQ ID NO: 419383 - DNA, 6079 bp, Homo sapiens
cgaacaattaattaaaaaggaggttaattcacagtttacagacttagcatctgcttgtttagcatatgcaataaaaggcgaagttgtggtagatttgcaaaaatgtcagttagataattgattatatatataggaatcattttttgcataatccaaatcctctttttcttttgatgatcctaagatatcattttagaacggaatgtggtatttgtaccctatgtattttatgacttaattattctaagttgaaagaatttatatatttttttgtataccacattcgtcactggatttctggaacttttttaaaaaatcggtgaattgggccgttggtggcggctgtgatgaaggaccctgcaggcatctggctgtaattggcgcctgcggcggccagggcccctacgggtgcggcgctgaaggccgccccgtaccccggaggtgtagcgtagggacccggcgggtaggccggtgtggggtgaggctccgtgcccttgctggccagccggctgaggatgctgcgctcggacatctgaaggcgggctgcgatggggggtattcgggacagcgtggctggcaggcgggtcacgtccgccttcatgtcgctcagcaactcctccagctggttcagaaccttgtgcaggacggcgttggccggcttgttccccgccagcgactccttggagaggtgctggtggctctcggccaggcactcggcctcggcgaagcgggcgtggagggccatggcggggtgcgccggctcctgcgacaggttcaggtaggccgcccgccgcagctgctcctcaatcaccagcgcctgctccaggagcttgaacctccgggccaggaacttatttttcatctccagaaagttccccttattggcttcagttttaaatggctcgttgataatggcaaattgagcatcattctggatgtcctgccaccgtgcatagccatggaggacaatcccagccagaagccaatagtcatgtcttctgtgccagatctcattgagtttccccgaggaaatagctgcccgttcctcattctgccacagtgtgtgaagctctgtgaagccaccatcggcgatattgaacatgaaccggggcttctctgtcttttcctctcgtcgcccattggaccgtggctcatctcgaggccctggtcgaagctcccggtcaccttttacatcttctgacttctctctgtccccacggtacccaggttcaggctccatctctccaggcacccctggcacctcatcctctagaggaatcttccttggctccagccgctccccaagtgatggggctgggctgggggcatcagcctctgtctccatcttctccccaattctgctgttcttctctggcttttcctcctggttttcagcttcctccttctcaagaggtgtccttatgccttctcctttctcacttggagctggagtagcaggtttagaggtgcagggactgttggtagcagaagcctcaggagtggtgggagacgttttggtaggagaggaggctctggaggagcgcttagaatcggcgctggggtcaggcatcagttccggcattgaccaacgcccattgatgtgctcaaactcctgcaccttctttttgacgagagacatgactccaatgcgggtcaacacctgctggcgactcagtccctcccgagggaccccatcggcaaaggtttcagagccgtctgccccaggctcacacagatggcgcatgaacaaagacacataggccttaaactccttctcagtcttgcccctcaggtcccgcaccagccactgtgtggtgaaggcatcctgtggtggcatcccccagcgcatcacagcattgaggaaagccttccgctgacgggtgttgaagcccagcacctcaatgttgcccccgactcgggccagcagtggaggcagtggcttatctttctcattccggagctgcctctttgactgtctacgcccttcaggacgttcatcgaagtcttcatcctcctcctctgaacccaccgagtactctgactggttgtcttggtcttcctgagcagcatcattgtagttaacttgcttgcgaacccgcttgcccttgcctagattccgggctaggtcttcctgctgttgctcatagtgatgcctcagcagcttctcccagtagtcagggtccacattctcctcctgcttgatgatctctcgctcaatttcctcaatcttgtcttcttcccgcacgacgtactgtgccaccttgaaggagctgagatactcattcatgttctgcacgtcagtgtcctcagttgcatcctggttccggtccaacagccgagcgatggcctcattgtcataatgaatcacactgctgtcctcctccttgttctccccctcgttttcatccttgaatagctcttcagtgccaaatttgagaatgtcgtcaagctcctgcttggacatggagcctgccttggagcccagcccaggccgcacaaccaggtgtgtcagcatcatctttctcttggccacttgtgtgattcgctcttccactgacgcgcgagtcacaaaccggtaaatcatcactttgttggcctggccaatccgatgagcccggctaaaggcctggatgtcattatgggggttccagtcagaatcaaagatgatgacagtgtcagcagtggccagattgatgcccaggcccccagctcgggtggacaggaggaagcagaattgttgggccccaggagcattaaaccgatcgatggcctcctgcctcagggcacccgtgataccaccatcgatgcgctcatacttgtagccttcatagtctaagaagtcctcaagcaagtctaacattttggtcatctgcgagaagatgagcactcggtgtccttgctccttcagctttcgcagcatcttctggagcagcatgagcttcccagacgacttaataagtgccccaccctcataagccccactggggagtttgggggactccatagcagccacgggaaaaaggtatggatggttgcagcacttcttaagatccatcatgatattaagcagcgacacctggttcccaccacctcgtgaattcaaggcctcaaaatttcgagtcaggatgtatttgtagtatttcttctgcatggggcttagctccacccgaacgatgagctctgtcttggctggcatgttcttaaagacatctgccttgagtctccgcagcatgtgtggccccagcaaatcatgcagtttcttgatctggtcctctttggatatgtcagcaaactcctccaggaagccctccaagttgttaaatctctctggggtgaggaagttcaggagatggaagagctcctccagattattctgcaatggggttcctgtcagcagcaacttatgatctatcttgtaaccattgagaaccctgaaaaacttggactggttgttcttgagtcgatgggcctcatctaccacaagacaggcccagcggatggaaccaagtgctgcctgatcaatggtgatcagctcatacgatgtcaggagaacatggaacttcacctgtgcctcccttttcatcttaaaagctttcttgccccctttgatggcattgtcctcaaaggagaattcattctcacgaatgatggcccggctgtccttgtcacccgtgtatgtcaccacatagaatttgggtgcccacatctggaactcccgctcccagttaatgatggtagagagtggggcactcaccaggaagggaccttttgtgtggccctccttgtagagtgagtagaggaagacgatggtttgtatggtcttgcctagccccatctcatcagctagaatggtgtcagtgccctgggcccaggagaagcgtagccagttcagcccttccaactgatacatgtgcagggtgcctccagtggctgtgataaaccgtggctgagtctcatatttcacggtaggatcattagtgggagaactgggaggcccatcaccctgtagctccttcttcttcttcttatacttgcggggctgggcagggtcttcccccataattagttctcggtgtctccagtagctttgcttatgttcttcgtattcagggatattcatttcatcttcctcccacgtggactggtcatatggtaagtccctccattttactagatagtggtaattcccctttttatccacactgtggttgatgatgcggtggacggtcatccactctggcttgatgccaaaacgatagtacttctcctccatctcagcatagtgcgggtctttcactttacgcttgtcgctcttcccatcatcctcgccggagccatagtccaggggtgggggctcatccatgtcattcttccgctggtagtttcgatacataaccaaatggaagatttccagctgaagctccttggcccaggagcagtgccagtaggatagtcctacccacttgacaaagaactctcgctctgatctgccttgaagaggacgggggggtgggacatctggatttccatctgcctgttgaggggctggcactgctacaggtggctccccccaccgccaatgtaggatcttctgcactcgacccttcagcacggggcatgtgcatcggggacacagccattcaccattgggaatgtcaggcaggggagggtttagacaatgaatgtggtaggaggagatgcacgcgtcacagcacaggagctccccgccgtccttgcatacgcggcagtactccatgtgatcatcctcctcctccttctccccttcttcctctccctcctcttcgtattcttcttcttcctccttggcctcccactggaccccctccttctcacagtgagggcagctccatttgccctctggagcccggtcaagctcaggatcaaggcagacgaggtggtaggcacgagggcaggtgtcacacagaataatttccccaccctgctggcacacctcacagtaatcctggtgatccgtctcgtagccatcaacctcctcctccccggccactgcaggacagcccaggaccttcttcttcttccttcctggccggcctctctttagtttcttggtgcggacagggccatcaggccggcctgaggcactgtggacactgccactgtccaggtctgattcctcagcctctggttcaggaccttcgtcgctctgaaaaacatacgagcctcctttcttcctcttgccacccagaagccctagttttattttgagtggtgccattttctttccccgaagcttcttgcgtccatcaggcactcgggggctcttactccgcctcttatggcctggacctttgccctctttggttttggctcttcggatgggtgggggctggatatcagcagcagggggtggtggaagggcggggggtccggagggtgctatgggggtggccgacgagacagcagctgacacctgctcagctacagctgctgctgctgctgccgctgccgccgccacagcagctgctgaccccttgaaggggttgttggcactgaactctctccatttggccccaaggatggtcatcatcttagacattgggatcttaggattcttcttagcaattaggggcctcatgaactggctgaaggctttgtagttggtgagcgtgtggtaatcctcctcagagaacacatgctccacatcctccaggccccaggtcagaagcagagttgctgatgacttctgttccacttgcttttgccccccatctccctccccctttttccgccgctttgtcttcttctcctttttttctcggtgcttccttcttcgtttccgacccggtccggttccatattcactgcccccactctctgacttctcccggtactcatctcgctcagaaccaaattcctcctcactgtcacgcttcttgcgttttcggggttttcctggcttgttctccttctgcttcttgggtcctcgttttctcttcttcacacccaatgctgacggcagcagccgaatgtcatccttatgcggcggggcggcactgccgagccgggagcgctgccgcttgggcaggtgccgcggccg

SEQ ID NO: 419384 - DNA, 2314 bp, Homo sapiens
ggccgggcggcccggcaagcggcgctgcggggtaggctgctttcctgaggccggactcaacgggtctcggctgagccaccgggtgagctcaccgcccagcccaaaccaggagattgcgagggagcgatgcggtgcagcgcgtgttcttggggaagatcccgactaagccattttccagtggcacctcttccatcatgagttcctgaggcagtccgatggggctactttattccagaacaatcacaatttgcttgtaaatgcatcacgaagaggcagcccagaatgaagaaagcaagcaggagtgttggctcagtgcctaaagtgtctgcaataagtaaaacgcaaacagcagaaaaaattaaacctgaaaacagctcttcagcatctacgggaggcaaacttgtaaaacctggaacagcagcatcattgtcaaagaccaagagcagtgatgaccttttagctggaatggccggaggggtaacggtgactaatggtgttaaaggaaagaaaagcacctgcccatctgcagcaccttcagcatctgcccctgccatgaccaccgtggagaacaaatccaagattagcacaggcacagcttcttcaaccaagcggagcacttctacaggtaataaagaatccagttctactagagaaagattacgtgaacgtacccgattaaaccagagcaaaaaactaccttctgcaggtcagggagctaatgacatggcattggccaaacgttcccgcagtcgaactgctacagaatgtgacgttcgtatgagcaagtctaagtcagacaatcagatcagtgacagagctgctttggaggccaaagtgaaggatcttctcacgctggcaaaaaccaaagacgtagaaattttacatttgagaaatgaactgcgagacatgcgtgcccagctgggcattaatgaggatcattctgagggtgatgaaaaatctgagaaggaaactattatggctcaccagccgactgatgtggagtccactttattgcagttgcaggaacagaatactgccatccgtgaagaactcaaccagctgaaaaatgaaaacagaatgttaaaggacaggttgaatgcattgggcttttccctagagcagaggttagacaattctgaaaaactgtttggctatcagtccctgagcccagaaatcacccctggtaaccagagcgatggaggaggaactctgacttcttcagtggaaggctctgcccctggctcagtggaggatctcttgagtcaggatgaaaatacactaatggaccatcagcacagtaactccatggacaatttagacagtgagtgcagtgaggtctaccagcccctcacatcgagcgatgatgcgctggatgcaccatcctcctcagagtcggaaggcatccccagcatagagcgctcccggaaggggagcagcgggaatgccagtgaagtgtccgtggcttgcctgactgaacggatacaccagatggaagagaaccaacacagtacaagtgaggaactccaggcaaccctgcaagagctagctgatttacagcagattacccaggaactgaatagtgaaaacgaaaggcttggagaagagaaggttattctgatggagtctttatgtcagcagagcgataagttggaacactttagtcgacagattgaatacttccgctctcttctagatgagcatcacatttcttatgtcatagatgaagatgtaaaaagtgggcgctatatggaattagagcaacgttacatggacctcgctgagaatgcccgttttgaacgggagcagcttcttggtgtccagcagcatttaagcaatactttgaaaatggcagaacaagacaataaggaagctcaagaaatgataggggcactcaaagaacgcagtcaccatatggagcgaattattgagtctgagcagaaaggaaaagcagccttggcagccacgttagaggaatacaaagccacagtggccagtgaccagatagagatgaatcgcctgaaggctcagctggagaatgaaaagcagaaagtggcagagctgtattctatccataactctggagacaaatctgatattcaggacctcctggagagtgtcaggctggacaaagaaaaagcagagactttggctagtagcttgcaggaagatctggctcatacccgaaatgatgccaatcgattacaggatgccattgctaaggtagaggatgaataccgagccttccaagaagaagctaagaaacaaattgaagatttgaatatgacgttagaaaaattaagatcagacctggatg

SEQ ID NO: 419385 - DNA, 6161 bp, Homo sapiens
ggccgggcggcccggcaagcggcgctgcggggtaggctgctttcctgaggccggactcaacgggtctcggctgagccaccgggtgagctcaccgcccagcccaaaccaggagattgcgagggagcgatgcggtgcagcgcgatttgcttgtaaatgcatcacgaagaggcagcccagaatgaagaaagcaagcaggagtgttggctcagtgcctaaagtgtctgcaataagtaaaacgcaaacagcagaaaaaattaaacctgaaaacagctcttcagcatctacgggaggcaaacttgtaaaacctggaacagcagcatcattgtcaaagaccaagagcagtgatgaccttttagctggaatggccggaggggtaacggtgactaatggtgttaaaggaaagaaaagcacctgcccatctgcagcaccttcagcatctgcccctgccatgaccaccgtggagaacaaatccaagattagcacaggcacagcttcttcaaccaagcggagcacttctacaggtaataaagaatccagttctactagagaaagattacgtgaacgtacccgattaaaccagagcaaaaaactaccttctgcaggtcagggagctaatgacatggcattggccaaacgttcccgcagtcgaactgctacagaatgtgacgttcgtatgagcaagtctaagtcagacaatcagatcagtgacagagctgctttggaggccaaagtgaaggatcttctcacgctggcaaaaaccaaagacgtagaaattttacatttgagaaatgaactgcgagacatgcgtgcccagctgggcattaatgaggatcattctgagggtgatgaaaaatctgagaaggaaactattatggctcaccagccgactgatgtggagtccactttattgcagttgcaggaacagaatactgccatccgtgaagaactcaaccagctgaaaaatgaaaacagaatgttaaaggacaggttgaatgcattgggcttttccctagagcagaggttagacaattctgaaaaactgtttggctatcagtccctgagcccagaaatcacccctggtaaccagagcgatggaggaggaactctgacttcttcagtggaaggctctgcccctggctcagtggaggatctcttgagtcaggatgaaaatacactaatggaccatcagcacagtaactccatggacaatttagacagtgagtgcagtgaggtctaccagcccctcacatcgagcgatgatgcgctggatgcaccatcctcctcagagtcggaaggcatccccagcatagagcgctcccggaaggggagcagcgggaatgccagtgaagtgtccgtggcttgcctgactgaacggatacaccagatggaagagaaccaacacagtacaagtgaggaactccaggcaaccctgcaagagctagctgatttacagcagattacccaggaactgaatagtgaaaacgaaaggcttggagaagagaaggttattctgatggagtctttatgtcagcagagcgataagttggaacactttagtcgacagattgaatacttccgctctcttctagatgagcatcacatttcttatgtcatagatgaagatgtaaaaagtgggcgctatatggaattagagcaacgttacatggacctcgctgagaatgcccgttttgaacgggagcagcttcttggtgtccagcagcatttaagcaatactttgaaaatggcagaacaagacaataaggaagctcaagaaatgataggggcactcaaagaacgcagtcaccatatggagcgaattattgagtctgagcagaaaggaaaagcagccttggcagccacgttagaggaatacaaagccacagtggccagtgaccagatagagatgaatcgcctgaaggctcagctggagaatgaaaagcagaaagtggcagagctgtattctatccataactctggagacaaatctgatattcaggacctcctggagagtgtcaggctggacaaagaaaaagcagagactttggctagtagcttgcaggaagatctggctcatacccgaaatgatgccaatcgattacaggatgccattgctaaggtagaggatgaataccgagccttccaagaagaagctaagaaacaaattgaagatttgaatatgacgttagaaaaattaagatcagacctggatgaaaaagaaacagaaaggagtgacatgaaagaaaccatctttgaacttgaagatgaagtagaacaacatcgtgctgtgaaacttcatgacaacctcattatttctgatctagagaatacagttaaaaaactccaggaccaaaagcacgacatggaaagagaaataaagacactccacagaagacttcgggaagaatctgcggaatggcggcagtttcaggctgatctccagactgcagtagtcattgcaaatgacattaaatctgaagcccaagaggagattggtgatctaaagcgccggttacatgaggctcaagaaaaaaatgagaaactcacaaaagaattggaggaaataaagtcacgcaagcaagaggaggagcgaggccgggtatacaattacatgaatgccgttgagagagatttggcagccttaaggcagggaatgggactgagtagaaggtcctcgacttcctcagagccaactcctacagtaaaaaccctcatcaagtcctttgacagtgcatctcaagtaccaaaccctgctgcagctgcaattcctcgaacgcccctgagcccaagtcctatgaaaacccctcctgcagcagctgtgtcccctatgcagagacattccataagtggaccaatctcaacatccaaacccctgacagccctgtcagataagagaccaaactatggggaaatccctgttcaagagcatctgttaagaacatcttcagccagccggcctgcttccctgccaagagtgcctgcgatggaaagtgccaagaccctctcagtgtctcgacgaagtagtgaagaaatgaaacgggacatttctgcacaggagggagcgtcgccagcctctctgatggctatgggaaccacgtctccacagctttccctgtcctcttctccaacggcatctgtgactcccaccacccgaagccgaataagagaagaaaggaaagaccctctctcagcattggccagagaatatggaggatcaaagaggaacgccttgctgaagtggtgtcagaagaaaacagaaggctatcagaatattgacattacaaacttcagcagcagctggaatgatgggctggccttctgtgccctcctgcatacatatctccctgcccacattccatatcaagaactgaacagccaggataagagaaggaacttcatgctggctttccaggcagctgaaagtgtcggcatcaaatccacactggacattaatgaaatggtacggactgaacgacccgactggcagaacgtgatgctgtatgtgacggcgatctacaagtactttgagacctgagcatgccgggaggagccgccccaatagcgggggtacccctccacagcgaccgagcgacaccgacgccattagctacgcacccctgtaaagcttccagcaactctgggctgccccacagcgtgtgagcctccagctcggggcttccgtattggaagaactcagccgtgtggcccacagctcccaccagggcccctcccacatgacccgtccattcaggtcatgtgggctcagcacacatcctgcaggccggtggctgctggagttttccttctgaagagaatattgaactacactagtgctccagggcaccaaacaaaaagggctcatgcacagctgaatttgggaaaagggattcagttctgtgggaaactcactagggttgatgaaggctcggccgcggcacttcctgactattggctggggtgggttccggtgctggtgagaacccagaaggagagtcagcgcctggcagttcccagcgccctgggcccttcaccgtcctagtttggaggagcatgttcaccacagacgtgggtcagctgccccacacctgacggggctgtcccggccgacacaatccaggcgtgttcagcctgagctaggagagtatctagagggcgtggtgcgggcacgccagggctggggtgctgctgctgcactcacgcggctgggctttctggcgggaagcagttacgggggccccttgcctggactcagcgacctgtcttccagcctggaaggggtttggagtcccagctctggctttagatttcttcatcataaggagtttttctagttaacatttttgttttgttacgagcaatgctggaaaaggtcgctcctgttctgttagtaccaaagttacattgtttcaataagcatagaaatctaaacaacatctgtacattagcatggtgagagcaaggaataaagcaggaaataggagaaaagtaaacaactttagggagcccaggcagtgtcatttaaactcactgagtcactaagacataattctcctaggccagagttaaagaaagtgccttaactcttcttgtgagggcagccactgccctccatggccaaggcaggacctccaagactcagtggttgagttgtctcctaccaccatgcccgccctccccaggtactgggtccatgccccctgtgcccaccctccccaggtgctgggtccatgctgtttgaaccaaagccttatttaaaggtggtcactggagatgctctcaggccagaactcaacagctatttttgggaatagggatctcccgtgtgcctaacgcagtagctattggtttgaacaatgtccagacaagacctgtacctttgagaatataactgtgtttggcacctgcatagcaccatgaggaagaccagccaccagtggaagcggggtcactgccccacagactggatgcaatgaggggctcacaggaggcccagccagcccgattgtgggctgaggggtctgcattcaagcacgatgttctagaataggagtttaacgtgtctacgtaacctagaatgtggttattaggaaaggggctgtgcatgtgggtgcagctggcggcacacctggtcaccagatggccagaagctgcccatcagccctgcccagatgtcagcctgggagctcaggctgctgccgctggctggatgccctttggtgaaatgcctgttttcagctaagaaaggagaggccaggcaagcaaagtcatgccacaaagcatatcagagacccccgcagactcctggccccgtcccgccccccgtctgagttgtgtttttgttgctgttcctctgttgatggccagctctgctgttggcatgagccactgatgttcatgtgagaattactgtttttaagtgtctctccacttaggtgtcctcagttcccacttttgctctcatttgccttcacagaggccactccacctgtccggatccagctgtctggtcatggtttggtttatttattttgtccttcaggggctgttttgccctaagaatgagggggcttcccctggtctgcagttcccaactttatcccttgctggccatgcgagcccagccctggtgcctcatgggatgggggggtaggggtccccaggatcttctggaggaaggtggccatggatggatgggctgtatctgtgttttccctctgggagtctcatgggtccagcatcaggcctgaggtcagcaacagggaaagagggtgggcacggggagggcttggccccgcctatctagaggcttgcctcgggcccctccttggggaaggtttgcgtgcagagctgcaagggagagggttccagaagcattgccttttgcctcgtctaataggatccttaggacactgtgggctttaggaatgactatagatgctcacacgtgtttaaagtgacatttggagatgctctcagtcctgtggcatctggcacgaagtctccaagaagccactttgcctcttctcccttcaagcacaagctttactgcaaaagggccagtcgcgtttctatttctctcgatcccaggcttctgcggaccgacgatacgtttaaatgttgttctagtaaatattcttgaatgtattaaaatggctgaaacaaca

SEQ ID NO: 419386 - DNA, 2955 bp, Homo sapiens
tatacgcgctaggtagaggccggggtgtaatcggccgagggaaaacagaaggctatcagaatattgacattacaaacttcagcagcagctggaatgatgggctggccttctgtgccctcctgcatacatatctccctgcccacattccatatcaagaactgaacagccaggataagagaaggaacttcatgctggctttccaggcagctgaaagtgtcggcatcaaatccacactggacattaatgaaatggtacggactgaacgacccgactggcagaacgtgatgctgtatgtgacggcgatctacaagtactttgagacctgagcatgccgggaggagccgccccaatagcgggggtacccctccacagcgaccgagcgacaccgacgccattagctacgcacccctgtaaagcttccagcaactctgggctgccccacagcgtgtgagcctccagctcggggcttccgtattggaagaactcagccgtgtggcccacagctcccaccagggcccctcccacatgacccgtccattcaggtcatgtgggctcagcacacatcctgcaggccggtggctgctggagttttccttctgaagagaatattgaactacactagtgctccagggcaccaaacaaaaagggctcatgcacagctgaatttgggaaaagggattcagttctgtgggaaactcactagggttgatgaaggctcggccgcggcacttcctgactattggctggggtgggttccggtgctggtgagaacccagaaggagagtcagcgcctggcagttcccagcgccctgggcccttcaccgtcctagtttggaggagcatgttcaccacagacgtgggtcagctgccccacacctgacggggctgtcccggccgacacaatccaggcgtgttcagcctgagctaggagagtatctagagggcgtggtgcgggcacgccagggctggggtgctgctgctgcactcacgcggctgggctttctggcgggaagcagttacgggggccccttgcctggactcagcgacctgtcttccagcctggaaggggtttggagtcccagctctggctttagatttcttcatcataaggagtttttctagttaacatttttgttttgttacgagcaatgctggaaaaggtcgctcctgttctgttagtaccaaagttacattgtttcaataagcatagaaatctaaacaacatctgtacattagcatggtgagagcaaggaataaagcaggaaataggagaaaagtaaacaactttagggagcccaggcagtgtcatttaaactcactgagtcactaagacataattctcctaggccagagttaaagaaagtgccttaactcttcttgtgagggcagccactgccctccatggccaaggcaggacctccaagactcagtggttgagttgtctcctaccaccatgcccgccctccccaggtactgggtccatgccccctgtgcccaccctccccaggtgctgggtccatgctgtttgaaccaaagccttatttaaaggtggtcactggagatgctctcaggccagaactcaacagctatttttgggaatagggatctcccgtgtgcctaacgcagtagctattggtttgaacaatgtccagacaagacctgtacctttgagaatataactgtgtttggcacctgcatagcaccatgaggaagaccagccaccagtggaagcggggtcactgccccacagactggatgcaatgaggggctcacaggaggcccagccagcccgattgtgggctgaggggtctgcattcaagcacgatgttctagaataggagtttaacgtgtctacgtaacctagaatgtggttattaggaaaggggctgtgcatgtgggtgcagctggcggcacacctggtcaccagatggccagaagctgcccatcagccctgcccagatgtcagcctgggagctcaggctgctgccgctggctggatgccctttggtgaaatgcctgttttcagctaagaaaggagaggccaggcaagcaaagtcatgccacaaagcatatcagagacccccgcagactcctggccccgtcccgccccccgtctgagttgtgtttttgttgctgttcctctgttgatggccagctctgctgttggcatgagccactgatgttcatgtgagaattactgtttttaagtgtctctccacttaggtgtcctcagttcccacttttgctctcatttgccttcacagaggccactccacctgtccggatccagctgtctggtcatggtttggtttatttattttgtccttcaggggctgttttgccctaagaatgagggggcttcccctggtctgcagttcccaactttatcccttgctggccatgcgagcccagccctggtgcctcatgggatgggggggtaggggtccccaggatcttctggaggaaggtggccatggatggatgggctgtatctgtgttttccctctgggagtctcatgggtccagcatcaggcctgaggtcagcaacagggaaagagggtgggcacggggagggcttggccccgcctatctagaggcttgcctcgggcccctccttggggaaggtttgcgtgcagagctgcaagggagagggttccagaagcattgccttttgcctcgtctaataggatccttaggacactgtgggctttaggaatgactatagatgctcacacgtgtttaaagtgacatttggagatgctctcagtcctgtggcatctggcacgaagtctccaagaagccactttgcctcttctcccttcaagcacaagctttactgcaaaagggccagtcgcgtttctatttctctcgatcccaggcttctgcggaccgacgatacgtttaaatgttgttctagtaaatattcttgaatgtattaaaatggctgaaacaaca

SEQ ID NO: 419387 - DNA, 1505 bp, Homo sapiens
  misc_feature (25)..(25): n is a, c, g, or t
acccaggatcttctggaggaaggtnggccatgagatgggctgtatctgtgttttccctctgggagtccatgctgtttgaaccaaagccttatttaaaggtggtcactggagatgctctcaggccagaactcaacagctatttttgggaatagggatctcccgtgtgcctaacgcagtagctattggtttgaacaatgtccagacaagacctgtacctttgagaatataactgtgtttggcacctgcatagcaccatgaggaagaccagccaccagtggaagcggggtcactgccccacagactggatgcaatgaggggctcacaggaggcccagccagcccgattgtgggctgaggggtctgcattcaagcacgatgttctagaataggagtttaacgtgtctacgtaacctagaatgtggttattaggaaaggggctgtgcatgtgggtgcagctggcggcacacctggtcaccagatggccagaagctgcccatcagccctgcccagatgtcagcctgggagctcaggctgctgccgctggctggatgccctttggtgaaatgcctgttttcagctaagaaaggagaggccaggcaagcaaagtcatgccacaaagcatatcagagacccccgcagactcctggccccgtcccgccccccgtctgagttgtgtttttgttgctgttcctctgttgatggccagctctgctgttggcatgagccactgatgttcatgtgagaattactgtttttaagtgtctctccacttaggtgtcctcagttcccacttttgctctcatttgccttcacagaggccactccacctgtccggatccagctgtctggtcatggtttggtttatttattttgtccttcaggggctgttttgccctaagaatgagggggcttcccctggtctgcagttcccaactttatcccttgctggccatgcgagcccagccctggtgcctcatgggatgggggggtaggggtccccaggatcttctggaggaaggtggccatggatggatgggctgtatctgtgttttccctctgggagtctcatgggtccagcatcaggcctgaggtcagcaacagggaaagagggtgggcacggggagggcttggccccgcctatctagaggcttgcctcgggcccctccttggggaaggtttgcgtgcagagctgcaagggagagggttccagaagcattgccttttgcctcgtctaataggatccttaggacactgtgggctttaggaatgactatagatgctcacacgtgtttaaagtgacatttggagatgctctcagtcctgtggcatctggcacgaagtctccaagaagccactttgcctcttctcccttcaagcacaagctttactgcaaaagggccagtcgcgtttctatttctctcgatcccaggcttctgcggaccgacgatacgtttaaatgttgttctagtaaatattcttgaatgtattaaaatggctgaaacaaca

SEQ ID NO: 419388 - DNA, 183 bp, Homo sapiens
taaaactctttagcaaactagaaatagaaggagacctgtgggaactccacagctaacgtcatacttaatctggagactgaatgctttcccaccaggatcaggagcaaggtaaggatacccactgtcaccacttttgttcagcattttgctggagctcttaccctgtgcaattgcataagacca

SEQ ID NO: 419389 - DNA, 350 bp, Homo sapiens
aatgaagaagcaggaaaatgtcacctataaccaggggaaaaatcagtcaatagatgcagacctagaacggatagaaatgataggattagcatgcagcaatgtaaatatgatctctgcttaagtatgtgaagggaagcatgcacagatgaagagagaagtgaaagatatgaaaaagaatagaggaggccaggtatggtgactcacgcctgtaatcccagcactttgggaggccaaggcaggtggatcacctgaggtcaggagttcaagaccagcctggccaacatggcgaaaccccatctctactaaaactacaaaaaaattagccaggcacggtggtgtgtgcctgtaat

SEQ ID NO: 419390 - DNA, 6265 bp, Homo sapiens
ggccgggcggcccggcaagcggcgctgcggggtaggctgctttcctgaggccggactcaacgggtctcggctgagccaccgggtgagctcaccgcccagcccaaaccaggagattgcgagggagcgatgcggtgcagcgcgtgttcttggggaagatcccgactaagccattttccagtggcacctcttccatcatgagttcctgaggcagtccgatggggctactttattccagaacaatcacaatttgcttgtaaatgcatcacgaagaggcagcccagaatgaagaaagcaagcaggagtgttggctcagtgcctaaagtgtctgcaataagtaaaacgcaaacagcagaaaaaattaaacctgaaaacagctcttcagcatctacgggaggcaaacttgtaaaacctggaacagcagcatcattgtcaaagaccaagagcagtgatgaccttttagctggaatggccggaggggtaacggtgactaatggtgttaaaggaaagaaaagcacctgcccatctgcagcaccttcagcatctgcccctgccatgaccaccgtggagaacaaatccaagattagcacaggcacagcttcttcaaccaagcggagcacttctacaggtaataaagaatccagttctactagagaaagattacgtgaacgtacccgattaaaccagagcaaaaaactaccttctgcaggtcagggagctaatgacatggcattggccaaacgttcccgcagtcgaactgctacagaatgtgacgttcgtatgagcaagtctaagtcagacaatcagatcagtgacagagctgctttggaggccaaagtgaaggatcttctcacgctggcaaaaaccaaagacgtagaaattttacatttgagaaatgaactgcgagacatgcgtgcccagctgggcattaatgaggatcattctgagggtgatgaaaaatctgagaaggaaactattatggctcaccagccgactgatgtggagtccactttattgcagttgcaggaacagaatactgccatccgtgaagaactcaaccagctgaaaaatgaaaacagaatgttaaaggacaggttgaatgcattgggcttttccctagagcagaggttagacaattctgaaaaactgtttggctatcagtccctgagcccagaaatcacccctggtaaccagagcgatggaggaggaactctgacttcttcagtggaaggctctgcccctggctcagtggaggatctcttgagtcaggatgaaaatacactaatggaccatcagcacagtaactccatggacaatttagacagtgagtgcagtgaggtctaccagcccctcacatcgagcgatgatgcgctggatgcaccatcctcctcagagtcggaaggcatccccagcatagagcgctcccggaaggggagcagcgggaatgccagtgaagtgtccgtggcttgcctgactgaacggatacaccagatggaagagaaccaacacagtacaagtgaggaactccaggcaaccctgcaagagctagctgatttacagcagattacccaggaactgaatagtgaaaacgaaaggcttggagaagagaaggttattctgatggagtctttatgtcagcagagcgataagttggaacactttagtcgacagattgaatacttccgctctcttctagatgagcatcacatttcttatgtcatagatgaagatgtaaaaagtgggcgctatatggaattagagcaacgttacatggacctcgctgagaatgcccgttttgaacgggagcagcttcttggtgtccagcagcatttaagcaatactttgaaaatggcagaacaagacaataaggaagctcaagaaatgataggggcactcaaagaacgcagtcaccatatggagcgaattattgagtctgagcagaaaggaaaagcagccttggcagccacgttagaggaatacaaagccacagtggccagtgaccagatagagatgaatcgcctgaaggctcagctggagaatgaaaagcagaaagtggcagagctgtattctatccataactctggagacaaatctgatattcaggacctcctggagagtgtcaggctggacaaagaaaaagcagagactttggctagtagcttgcaggaagatctggctcatacccgaaatgatgccaatcgattacaggatgccattgctaaggtagaggatgaataccgagccttccaagaagaagctaagaaacaaattgaagatttgaatatgacgttagaaaaattaagatcagacctggatgaaaaagaaacagaaaggagtgacatgaaagaaaccatctttgaacttgaagatgaagtagaacaacatcgtgctgtgaaacttcatgacaacctcattatttctgatctagagaatacagttaaaaaactccaggaccaaaagcacgacatggaaagagaaataaagacactccacagaagacttcgggaagaatctgcggaatggcggcagtttcaggctgatctccagactgcagtagtcattgcaaatgacattaaatctgaagcccaagaggagattggtgatctaaagcgccggttacatgaggctcaagaaaaaaatgagaaactcacaaaagaattggaggaaataaagtcacgcaagcaagaggaggagcgaggccgggtatacaattacatgaatgccgttgagagagatttggcagccttaaggcagggaatgggactgagtagaaggtcctcgacttcctcagagccaactcctacagtaaaaaccctcatcaagtcctttgacagtgcatctcaagtaccaaaccctgctgcagctgcaattcctcgaacgcccctgagcccaagtcctatgaaaacccctcctgcagcagctgtgtcccctatgcagagacattccataagtggaccaatctcaacatccaaacccctgacagccctgtcagataagagaccaaactatggggaaatccctgttcaagagcatctgttaagaacatcttcagccagccggcctgcttccctgccaagagtgcctgcgatggaaagtgccaagaccctctcagtgtctcgacgaagtagtgaagaaatgaaacgggacatttctgcacaggagggagcgtcgccagcctctctgatggctatgggaaccacgtctccacagctttccctgtcctcttctccaacggcatctgtgactcccaccacccgaagccgaataagagaagaaaggaaagaccctctctcagcattggccagagaatatggaggatcaaagaggaacgccttgctgaagtggtgtcagaagaaaacagaaggctatcagaatattgacattacaaacttcagcagcagctggaatgatgggctggccttctgtgccctcctgcatacatatctccctgcccacattccatatcaagaactgaacagccaggataagagaaggaacttcatgctggctttccaggcagctgaaagtgtcggcatcaaatccacactggacattaatgaaatggtacggactgaacgacccgactggcagaacgtgatgctgtatgtgacggcgatctacaagtactttgagacctgagcatgccgggaggagccgccccaatagcgggggtacccctccacagcgaccgagcgacaccgacgccattagctacgcacccctgtaaagcttccagcaactctgggctgccccacagcgtgtgagcctccagctcggggcttccgtattggaagaactcagccgtgtggcccacagctcccaccagggcccctcccacatgacccgtccattcaggtcatgtgggctcagcacacatcctgcaggccggtggctgctggagttttccttctgaagagaatattgaactacactagtgctccagggcaccaaacaaaaagggctcatgcacagctgaatttgggaaaagggattcagttctgtgggaaactcactagggttgatgaaggctcggccgcggcacttcctgactattggctggggtgggttccggtgctggtgagaacccagaaggagagtcagcgcctggcagttcccagcgccctgggcccttcaccgtcctagtttggaggagcatgttcaccacagacgtgggtcagctgccccacacctgacggggctgtcccggccgacacaatccaggcgtgttcagcctgagctaggagagtatctagagggcgtggtgcgggcacgccagggctggggtgctgctgctgcactcacgcggctgggctttctggcgggaagcagttacgggggccccttgcctggactcagcgacctgtcttccagcctggaaggggtttggagtcccagctctggctttagatttcttcatcataaggagtttttctagttaacatttttgttttgttacgagcaatgctggaaaaggtcgctcctgttctgttagtaccaaagttacattgtttcaataagcatagaaatctaaacaacatctgtacattagcatggtgagagcaaggaataaagcaggaaataggagaaaagtaaacaactttagggagcccaggcagtgtcatttaaactcactgagtcactaagacataattctcctaggccagagttaaagaaagtgccttaactcttcttgtgagggcagccactgccctccatggccaaggcaggacctccaagactcagtggttgagttgtctcctaccaccatgcccgccctccccaggtactgggtccatgccccctgtgcccaccctccccaggtgctgggtccatgctgtttgaaccaaagccttatttaaaggtggtcactggagatgctctcaggccagaactcaacagctatttttgggaatagggatctcccgtgtgcctaacgcagtagctattggtttgaacaatgtccagacaagacctgtacctttgagaatataactgtgtttggcacctgcatagcaccatgaggaagaccagccaccagtggaagcggggtcactgccccacagactggatgcaatgaggggctcacaggaggcccagccagcccgattgtgggctgaggggtctgcattcaagcacgatgttctagaataggagtttaacgtgtctacgtaacctagaatgtggttattaggaaaggggctgtgcatgtgggtgcagctggcggcacacctggtcaccagatggccagaagctgcccatcagccctgcccagatgtcagcctgggagctcaggctgctgccgctggctggatgccctttggtgaaatgcctgttttcagctaagaaaggagaggccaggcaagcaaagtcatgccacaaagcatatcagagacccccgcagactcctggccccgtcccgccccccgtctgagttgtgtttttgttgctgttcctctgttgatggccagctctgctgttggcatgagccactgatgttcatgtgagaattactgtttttaagtgtctctccacttaggtgtcctcagttcccacttttgctctcatttgccttcacagaggccactccacctgtccggatccagctgtctggtcatggtttggtttatttattttgtccttcaggggctgttttgccctaagaatgagggggcttcccctggtctgcagttcccaactttatcccttgctggccatgcgagcccagccctggtgcctcatgggatgggggggtaggggtccccaggatcttctggaggaaggtggccatggatggatgggctgtatctgtgttttccctctgggagtctcatgggtccagcatcaggcctgaggtcagcaacagggaaagagggtgggcacggggagggcttggccccgcctatctagaggcttgcctcgggcccctccttggggaaggtttgcgtgcagagctgcaagggagagggttccagaagcattgccttttgcctcgtctaataggatccttaggacactgtgggctttaggaatgactatagatgctcacacgtgtttaaagtgacatttggagatgctctcagtcctgtggcatctggcacgaagtctccaagaagccactttgcctcttctcccttcaagcacaagctttactgcaaaagggccagtcgcgtttctatttctctcgatcccaggcttctgcggaccgacgatacgtttaaatgttgttctagtaaatattcttgaatgtattaaaatggctgaaacaaca

SEQ ID NO: 419391 - DNA, 3728 bp, Homo sapiens
acagtagtgtacttatttgccaaagtaataatttttaaaggaatacagcaaaatataagactccatcataatctggcatgcaataaaaaattactagacaatgaagaagcaggaaaatgtcacctataaccaggggaaaaatcagtcaatagatgcagacctagaacggatagaaatgataggattagcatgcagcaatgtaaatatgatctctgcttaagtatgtgaagggaagcatgcacagatgaagagagaagtgaaagatatgaaaaagaatagaggaggccagtaaaactctttagcaaactagaaatagaaggagacctgtgggaactccacagctaacgtcatacttaatctggagactgaatgctttcccaccaggatcaggagcaagagacattccataagtggaccaatctcaacatccaaacccctgacagccctgtcagataagagaccaaactatggggaaatccctgttcaagagcatctgttaagaacatcttcagccagccggcctgcttccctgccaagagtgcctgcgatggaaagtgccaagaccctctcagtgtctcgacgaagtagtgaagaaatgaaacgggacatttctgcacaggagggagcgtcgccagcctctctgatggctatgggaaccacgtctccacagctttccctgtcctcttctccaacggcatctgtgactcccaccacccgaagccgaataagagaagaaaggaaagaccctctctcagcattggccagagaatatggaggatcaaagaggaacgccttgctgaagtggtgtcagaagaaaacagaaggctatcagaatattgacattacaaacttcagcagcagctggaatgatgggctggccttctgtgccctcctgcatacatatctccctgcccacattccatatcaagaactgaacagccaggataagagaaggaacttcatgctggctttccaggcagctgaaagtgtcggcatcaaatccacactggacattaatgaaatggtacggactgaacgacccgactggcagaacgtgatgctgtatgtgacggcgatctacaagtactttgagacctgagcatgccgggaggagccgccccaatagcgggggtacccctccacagcgaccgagcgacaccgacgccattagctacgcacccctgtaaagcttccagcaactctgggctgccccacagcgtgtgagcctccagctcggggcttccgtattggaagaactcagccgtgtggcccacagctcccaccagggcccctcccacatgacccgtccattcaggtcatgtgggctcagcacacatcctgcaggccggtggctgctggagttttccttctgaagagaatattgaactacactagtgctccagggcaccaaacaaaaagggctcatgcacagctgaatttgggaaaagggattcagttctgtgggaaactcactagggttgatgaaggctcggccgcggcacttcctgactattggctggggtgggttccggtgctggtgagaacccagaaggagagtcagcgcctggcagttcccagcgccctgggcccttcaccgtcctagtttggaggagcatgttcaccacagacgtgggtcagctgccccacacctgacggggctgtcccggccgacacaatccaggcgtgttcagcctgagctaggagagtatctagagggcgtggtgcgggcacgccagggctggggtgctgctgctgcactcacgcggctgggctttctggcgggaagcagttacgggggccccttgcctggactcagcgacctgtcttccagcctggaaggggtttggagtcccagctctggctttagatttcttcatcataaggagtttttctagttaacatttttgttttgttacgagcaatgctggaaaaggtcgctcctgttctgttagtaccaaagttacattgtttcaataagcatagaaatctaaacaacatctgtacattagcatggtgagagcaaggaataaagcaggaaataggagaaaagtaaacaactttagggagcccaggcagtgtcatttaaactcactgagtcactaagacataattctcctaggccagagttaaagaaagtgccttaactcttcttgtgagggcagccactgccctccatggccaaggcaggacctccaagactcagtggttgagttgtctcctaccaccatgcccgccctccccaggtactgggtccatgccccctgtgcccaccctccccaggtgctgggtccatgctgtttgaaccaaagccttatttaaaggtggtcactggagatgctctcaggccagaactcaacagctatttttgggaatagggatctcccgtgtgcctaacgcagtagctattggtttgaacaatgtccagacaagacctgtacctttgagaatataactgtgtttggcacctgcatagcaccatgaggaagaccagccaccagtggaagcggggtcactgccccacagactggatgcaatgaggggctcacaggaggcccagccagcccgattgtgggctgaggggtctgcattcaagcacgatgttctagaataggagtttaacgtgtctacgtaacctagaatgtggttattaggaaaggggctgtgcatgtgggtgcagctggcggcacacctggtcaccagatggccagaagctgcccatcagccctgcccagatgtcagcctgggagctcaggctgctgccgctggctggatgccctttggtgaaatgcctgttttcagctaagaaaggagaggccaggcaagcaaagtcatgccacaaagcatatcagagacccccgcagactcctggccccgtcccgccccccgtctgagttgtgtttttgttgctgttcctctgttgatggccagctctgctgttggcatgagccactgatgttcatgtgagaattactgtttttaagtgtctctccacttaggtgtcctcagttcccacttttgctctcatttgccttcacagaggccactccacctgtccggatccagctgtctggtcatggtttggtttatttattttgtccttcaggggctgttttgccctaagaatgagggggcttcccctggtctgcagttcccaactttatcccttgctggccatgcgagcccagccctggtgcctcatgggatgggggggtaggggtccccaggatcttctggaggaaggtggccatggatggatgggctgtatctgtgttttccctctgggagtctcatgggtccagcatcaggcctgaggtcagcaacagggaaagagggtgggcacggggagggcttggccccgcctatctagaggcttgcctcgggcccctccttggggaaggtttgcgtgcagagctgcaagggagagggttccagaagcattgccttttgcctcgtctaataggatccttaggacactgtgggctttaggaatgactatagatgctcacacgtgtttaaagtgacatttggagatgctctcagtcctgtggcatctggcacgaagtctccaagaagccactttgcctcttctcccttcaagcacaagctttactgcaaaagggccagtcgcgtttctatttctctcgatcccaggcttctgcggaccgacgatacgtttaaatgttgttctagtaaatattcttgaatgtattaaaatggctgaaacaaca

SEQ ID NO: 419392 - DNA, 6758 bp, Homo sapiens
ggccgggcggcccggcaagcggcgctgcggggtaggctgctttcctgaggccggactcaacgggtctcggctgagccaccgggtgagctcaccgcccagcccaaaccaggagattgcgagggagcgatgcggtgcagcgcgtgttcttggggaagatcccgactaagccattttccagtggcacctcttccatcatgagttcctgaggcagtccgatggggctactttattccagaacaatcacaatttgcttgtaaatgcatcacgaagaggcagcccagaatgaagaaagcaagcaggagtgttggctcagtgcctaaagtgtctgcaataagtaaaacgcaaacagcagaaaaaattaaacctgaaaacagctcttcagcatctacgggaggcaaacttgtaaaacctggaacagcagcatcattgtcaaagaccaagagcagtgatgaccttttagctggaatggccggaggggtaacggtgactaatggtgttaaaggaaagaaaagcacctgcccatctgcagcaccttcagcatctgcccctgccatgaccaccgtggagaacaaatccaagattagcacaggcacagcttcttcaaccaagcggagcacttctacaggtaataaagaatccagttctactagagaaagattacgtgaacgtacccgattaaaccagagcaaaaaactaccttctgcaggtcagggagctaatgacatggcattggccaaacgttcccgcagtcgaactgctacagaatgtgacgttcgtatgagcaagtctaagtcagacaatcagatcagtgacagagctgctttggaggccaaagtgaaggatcttctcacgctggcaaaaaccaaagacgtagaaattttacatttgagaaatgaactgcgagacatgcgtgcccagctgggcattaatgaggatcattctgagggtgatgaaaaatctgagaaggaaactattatggctcaccagccgactgatgtggagtccactttattgcagttgcaggaacagaatactgccatccgtgaagaactcaaccagctgaaaaatgaaaacagaatgttaaaggacaggttgaatgcattgggcttttccctagagcagaggttagacaattctgaaaaactgtttggctatcagtccctgagcccagaaatcacccctggtaaccagagcgatggaggaggaactctgacttcttcagtggaaggctctgcccctggctcagtggaggatctcttgagtcaggatgaaaatacactaatggaccatcagcacagtaactccatggacaatttagacagtgagtgcagtgaggtctaccagcccctcacatcgagcgatgatgcgctggatgcaccatcctcctcagagtcggaaggcatccccagcatagagcgctcccggaaggggagcagcgggaatgccagtgaagtgtccgtggcttgcctgactgaacggatacaccagatggaagagaaccaacacagtacaagtgaggaactccaggcaaccctgcaagagctagctgatttacagcagattacccaggaactgaatagtgaaaacgaaaggcttggagaagagaaggttattctgatggagtctttatgtcagcagagcgataagttggaacactttagtcgacagattgaatacttccgctctcttctagatgagcatcacatttcttatgtcatagatgaagatgtaaaaagtgggcgctatatggaattagagcaacgttacatggacctcgctgagaatgcccgttttgaacgggagcagcttcttggtgtccagcagcatttaagcaatactttgaaaatggcagaacaagacaataaggaagctcaagaaatgataggggcactcaaagaacgcagtcaccatatggagcgaattattgagtctgagcagaaaggaaaagcagccttggcagccacgttagaggaatacaaagccacagtggccagtgaccagatagagatgaatcgcctgaaggctcagctggagaatgaaaagcagaaagtggcagagctgtattctatccataactctggagacaaatctgatattcaggacctcctggagagtgtcaggctggacaaagaaaaagcagagactttggctagtagcttgcaggaagatctggctcatacccgaaatgatgccaatcgattacaggatgccattgctaaggtagaggatgaataccgagccttccaagaagaagctaagaaacaaattgaagatttgaatatgacgttagaaaaattaagatcagacctggatgaaaaagaaacagaaaggagtgacatgaaagaaaccatctttgaacttgaagatgaagtagaacaacatcgtgctgtgaaacttcatgacaacctcattatttctgatctagagaatacagttaaaaaactccaggaccaaaagcacgacatggaaagagaaataaagacactccacagaagacttcgggaagaatctgcggaatggcggcagtttcaggctgatctccagactgcagtagtcattgcaaatgacattaaatctgaagcccaagaggagattggtgatctaaagcgccggttacatgaggctcaagaaaaaaatgagaaactcacaaaagaattggaggaaataaagtcacgcaagcaagaggaggagcgaggccgggtatacaattacatgaatgccgttgagagagatttggcagccttaaggcagggaatgggactgagtagaaggtcctcgacttcctcagagccaactcctacagtaaaaaccctcatcaagtcctttgacagtgcatctcaagtaccaaaccctgctgcagctgcaattcctcgaacgcccctgagcccaagtcctatgaaaacccctcctgcagcagctgtgtcccctatgcagagacattccataagtggaccaatctcaacatccaaacccctgacagccctgtcagataagagaccaaactatggggaaatccctgttcaagagcatctgttaagaacatcttcagccagccggcctgcttccctgccaagagtgcctgcgatggaaagtgccaagaccctctcagtgtctcgacgaagtagtgaagaaatgaaacgggacatttctgcacaggagggagcgtcgccagcctctctgatggctatgggaaccacgtctccacagctttccctgtcctcttctccaacggcatctgtgactcccaccacccgaagccgaataagagaagaaaggaaagaccctctctcagcattggccagagaatatggaggatcaaagaggaacgccttgctgaagtggtgtcagaagaaaacagaaggctatcagaatattgacattacaaacttcagcagcagctggaatgatgggctggccttctgtgccctcctgcatacatatctccctgcccacattccatatcaagaactgaacagccaggataagagaaggaacttcatgctggctttccaggcagctgaaagtgtcggcatcaaatccacactggacattaatgaaatggtacggactgaacgacccgactggcagaacgtgatgctgtatgtgacggcgatctacaagtactttgagacctgagcatgccgggaggagccgccccaatagcgggggtacccctccacagcgaccgagcgacaccgacgccattagctacgcacccctgtaaagcttccagcaactctgggctgccccacagcgtgtgagcctccagctcggggcttccgtattggaagaactcagccgtgtggcccacagctcccaccagggcccctcccacatgacccgtccattcaggtcatgtgggctcagcacacatcctgcaggccggtggctgctggagttttccttctgaagagaatattgaactacactagtgctccagggcaccaaacaaaaagggctcatgcacagctgaatttgggaaaagggattcagttctgtgggaaactcactagggttgatgaaggctcggccgcggcacttcctgactattggctggggtgggttccggtgctggtgagaacccagaaggagagtcagcgcctggcagttcccagcgccctgggcccttcaccgtcctagtttggaggagcatgttcaccacagacgtgggtcagctgccccacacctgacggggctgtcccggccgacacaatccaggcgtgttcagcctgagctaggagagtatctagagggcgtggtgcgggcacgccagggctggggtgctgctgctgcactcacgcggctgggctttctggcgggaagcagttacgggggccccttgcctggactcagcgacctgtcttccagcctggaaggggtttggagtcccagctctggctttagatttcttcatcataaggagtttttctagttaacatttttgttttgttacgagcaatgctggaaaaggtcgctcctgttctgttagtaccaaagttacattgtttcaataagcatagaaatctaaacaacatctgtacattagcatggtgagagcaaggaataaagcaggaaataggagaaaagtaaacaactttagggagcccaggcagtgtcatttaaactcactgagtcactaagacataattctcctaggccagagttaaagaaagtgccttaactcttcttgtgagggcagccactgccctccatggccaaggcaggacctccaagactcagtggttgagttgtctcctaccaccatgcccgccctccccaggtactgggtccatgccccctgtgcccaccctccccaggtgctgggtccatgctgtttgaaccaaagccttatttaaaggtggtcactggagatgctctcaggccagaactcaacagctatttttgggaatagggatctcccgtgtgcctaacgcagtagctattggtttgaacaatgtccagacaagacctgtacctttgagaatataactgtgtttggcacctgcatagcaccatgaggaagaccagccaccagtggaagcggggtcactgccccacagactggatgcaatgaggggctcacaggaggcccagccagcccgattgtgggctgaggggtctgcattcaagcacgatgttctagaataggagtttaacgtgtctacgtaacctagaatgtggttattaggaaaggggctgtgcatgtgggtgcagctggcggcacacctggtcaccagatggccagaagctgcccatcagccctgcccagatgtcagcctgggagctcaggctgctgccgctggctggatgccctttggtgaaatgcctgttttcagctaagaaaggagaggccaggcaagcaaagtcatgccacaaagcatatcagagacccccgcagactcctggccccgtcccgccccccgtctgagttgtgtttttgttgctgttcctctgttgatggccagctctgctgttggcatgagccactgatgttcatgtgagaattactgtttttaagtgtctctccacttaggtgtcctcagttcccacttttgctctcatttgccttcacagaggccactccacctgtccggatccagctgtctggtcatggtttggtttatttattttgtccttcaggggctgttttgccctaagaatgagggggcttcccctggtctgcagttcccaactttatcccttgctggccatgcgagcccagccctggtgcctcatgggatgggggggtaggggtccccaggatcttctggaggaaggtggccatggatggatgggctgtatctgtgttttccctctgggagtctcatgggtccagcatcaggcctgaggtcagcaacagggaaagagggtgggcacggggagggcttggccccgcctatctagaggcttgcctcgggcccctccttggggaaggtttgcgtgcagagctgcaagggagagggttccagaagcattgccttttgcctcgtctaataggatccttaggacactgtgggctttaggaatgactatagatgctcacacgtgtttaaagtgacatttggagatgctctcagtcctgtggcatctggcacgaagtctccaagaagccactttgcctcttctcccttcaagcacaagctttactgcaaaagggccagtcgcgtttctatttctctcgatcccaggcttctgcggaccgacgatacgtttaaatgttgttctagtaaatattcttgaatgtattaaaatggctgaaacaacaagcttgggcttttctagcttgccctccactccctgccgtccctctgacgtcgcataaaccagaacccagctccctcctgggactggctgtggagagaagggcacctctgagccagcctgtggccctaccccaaggcgcacttcctcatgtgggcagatcctgaccaggagtccagggtggcctcccctgggccacagcacatcaccgtgtggcctggggctgtgggacagtgagccctgtaaccactagggttctgtgacagatgccaagaccccagagaccgtggcagagctacccccaggagagcggaagcccctacacagcccagacacatgccttccctgggggctggggagtgtgtctcgaggggttttgtttgttttgaggcatgtatcatcttggaaataattgtcaggatgtataaaatagagaaaaagaaaaaaggtatcctacccagaggcaaccagataaacttttttgcctgtgcattgtt

SEQ ID NO: 419393 - DNA, 4482 bp, Homo sapiens
cttcccagtgggactccagcagggcgtcgtggtctgtgcggtgtctcccaaaccactacctggctgcccccgtaccagctgctgggaaagactacttcctccgagttgtgccggcctccgcgttctcctcacctcccctctcctccggacctccgccccctcgcggagaggccttgccgctttaagagccgggctagcgattgacaagcaataaacgctgagcgcccggctgcgctggagccgcccggagctaggggcttcccggggcgcaggagagacgtttcagagcccttgcctccttcaccatgccggttgccgccaccaactctgaaactgccatgcagcaagtcctggacaacttgggatccctccccagtgccacgggggctgcagagctggacctgatcttccttcgaggcattatggaaagtcccatagtaagatccctggccaaggtgataatggtattgtggtttatgcagcagaatgtctttgttcctatgaaatacatgctgaaatactttggggcccatgagaggctggaggagacgaagctggaggccgtgagagacaacaacctggagctggtgcaggagatcctgcgggacctggcgcagctggctgagcagagcagcacagccgccgagctggcccacatcctccaggagccccacttccagtccctcctggagacgcacgactctgtggcctcaaagacctatgagacaccaccccccagccctggcctggaccctacgttcagcaaccagcctgtacctcccgatgctgtgcgcatggtgggcatccgcaagacagccggagaacatctgggtgtaacgttccgcgtggagggcggcgagctggtgatcgcgcgcattctgcatgggggcatggtggctcagcaaggcctgctgcatgtgggtgacatcatcaaggaggtgaacgggcagccagtgggcagtgacccccgcgcactgcaggagctcctgcgcaatgccagtggcagtgtcatcctcaagatcctgcccagctaccaggagccccatctgccccgccaggtatttgtgaaatgtcactttgactatgacccggcccgagacagcctcatcccctgcaaggaagcaggcctgcgcttcaacgccggggacttgctccagatcgtaaaccaggatgatgccaactggtggcaggcatgccatgtcgaagggggcagtgctgggctcattcccagccagctgctggaggagaagcggaaagcatttgtcaagagggacctggagctgacaccaaactcagggaccctatgcggcagcctttcaggaaagaaaaagaagcgaatgatgtatttgaccaccaagaatgcagagtttgaccgtcatgagctgctcatttatgaggaggtggcccgcatgcccccgttccgccggaaaaccctggtactgattggggctcagggcgtgggacggcgcagcctgaagaacaagctcatcatgtgggatccagatcgctatggcaccacggtgccctacacctcccggcggccgaaagactcagagcgggaaggtcagggttacagctttgtgtcccgtggggagatggaggctgacgtccgtgctgggcgctacctggagcatggcgaatacgagggcaacctgtatggcacacgtattgactccatccggggcgtggtcgctgctgggaaggtgtgcgtgctggatgtcaacccccaggcggtgaaggtgctacgaacggccgagtttgtcccttacgtggtgttcatcgaggccccagacttcgagaccctgcgggccatgaacagggctgcgctggagagtggaatatccaccaagcagctcacggaggcggacctgagacggacagtggaggagagcagccgcatccagcggggctacgggcactactttgacctctgcctggtcaatagcaacctggagaggaccttccgcgagctccagacagccatggagaagctacggacagagccccagtgggtgcctgtcagctgggtgtactgagcctgttcacctggtccttggctcactctgtgttgaaacccagaacctgaatccatccccctcctgacctgtgaccccctgccacaatccttagcccccatatctggctgtccttgggtaacagctcccagcaggccctaagtctggcttcagcacagaggcgtgcactgccagggaggtgggcattcatggggtaccttgtgcccaggtgctgcccactcctgatgcccattggtcaccagatatctctgagggccaagctatgcccaggaatgtgtcagagtcacctccataatggtcagtacagagaagagaaaagctgctttgggaccacatggtcagtaggcacactgccccctgccacccctccccagtcaccagttctcctctggactggccacacccaccccattcctggactcctcccacctctcacccctgtgtcggaggaacaggccttgggctgtttccgtgtgaccaggggaatgtgtggcccgctggcagccaggcaggcccgggtggtggtgccagcctggtgccatcttgaaggctggaggagtcagagtgagagccagtggccacagctgcagagcactgcagctcccagctcctttggaaagggacagggtcgcagggcagatgctgctcggtccttccctcatccacagcttctcactgccgaagtttctccagatttctccaatgtgtcctgacaggtcagccctgctccccacagggccaggctggcaggggccagtgggctcagcccaggtaggggcaggatggagggctgagccctgtgacaacctgctgttaccaactgaagagccccaagctctccatggcccacagcaggcacaggtctgagctctatgtccttgaccttggtccatttggttttctgtctagccaggtccaggtagcccacttgcatcagggctgctgggttggaggggctaaggaggagtgcagaggggaccttgggagcctgggcttgaaggacagttgccctccaggaggttcctcacacacaactccagaggcgccatttacactgtagtctgtacaacctgtggttccacgtgcatgttcggcacctgtctgtgcctctggcaccaggttgtgtgtgtgtgcgtgtgcacgtgcgtgtgtgtgtgtgtgtgtcaggtttagtttggggaggaagcaaagggttttgttttggaggtcactctttggggcccctttctgggggttccccatcagccctcatttcttataataccctgatcccagactccaaagccctggtcctttcctgatgtctcctcccttgtcttattgtccccctaccctaaatgcccccctgccataacttggggagggcagttttgtaaaataggagactccctttaagaaagaatgctgtcctagatgtacttgggcatctcatccttcattattctctgcattccttccggggggagcctgtcctcagaggggacaacctgtgacaccctgagtccaaacccttgtgcctcccagttcttccaagtgtctaactagtcttcgctgcagcgtcagccaaagctggcccctgaaccactgtgtgcccatttcctagggaaggggaaggagaataaacagaatatttattacaaaagttagaatatatttcttatactaggaatctcatttgcatttgcatagactatacacatggggtggaaaggccaggcctgcccccatctcgttggtgtggctctgcgtatactacacactcattctcctgctcctcttttcccttagtcagtgtcctttcatcctgattcagctctgccttgcatcaccctcagcctaagggagtgggaaggaaatggggtgttttcttgctgacctgaggctatagggtcacttgccatttcctaccttctctgggggatttgagggtagaggcaggggaagatctgttgttgcagttgcttctgcccccttgatccaaatgaccatcatctctgatggagatgggttgggtacctggccttcatggcaccttcactgctagggatgctcaaggggcaggcctggggcccttccctcctgtctcttctcggtctttcctctctgagcagcctcctacctcccctgcctgagccctcactccacagccctcccaggtacctagcagaggctgtcagtccttggctcacctggaacagggctggggctgggttggaacaggtgtgtgcccccaccacagctctatgactctgttctccctccctgccattgtggactcttgtatttgagggacctcaagagagtgaggaccctaccatccactgtccatattcagtcccagccccagtgcgcttcctctgttccctccctcagccatccaattcttgagttttctcactgattggttttctttctttttccttggattaaatgtgaaagcaaaggc

SEQ ID NO: 419394 - DNA, 2749 bp, Homo sapiens
aggctgtactgcctcggaatttcgggcaggtgggatccactgaggagtacataggctgctggatctggtggagccagcactgggcccacgggtggtaactggctgctgtggaggggggtacgtgagggggggggtctggggcttatcctcaggtcctgtgggtggggcagcgagtcggggcctgagcgtcaagagcatgccctagtgagcgggctcctctgggggagcccagcgcgctccgggcgcctgccggtttgggggtgtctcctcccggggcgctatggcggcgctggccagtagcctgatccggcagaagcgggaggtccgcgagcccgggggcagccggccggtgtcggcgcagcggcgcgtgtgtccccgcggcaccaagtccctttgccagaagcagctcctcatcctgctgtccaaggtgcgactgtgcggggggcggcccgcgcggccggaccgcggcccggagcctcagctcaaaggcatcgtcaccaaactgttctgccgccagggtttctacctccaggcgaatcccgacggaagcatccagggcaccccagaggataccagctccttcacccacttcaacctgatccctgtgggcctccgtgtggtcaccatccagagcgccaagctgggtcactacatggccatgaatgctgagggactgctctacagttcgccgcatttcacagctgagtgtcgctttaaggagtgtgtctttgagaattactacgtcctgtacgcctctgctctctaccgccagcgtcgttctggccgggcctggtacctcggcctggacaaggagggccaggtcatgaagggaaaccgagttaagaagaccaaggcagctgcccactttctgcccaagctcctggaggtggccatgtaccaggagccttctctccacagtgtccccgaggcctccccttccagtccccctgccccctgaaatgtagtccctggactggaggttccctgcactcccagtgagccagccaccaccacaacctgtctcccagtcctgctctcacccctgctgccacacacatgccctgagcagccaggtcccactaggtgctctaccctgagggagcctaggggctgactgtgacttccgaggctgctgagacccttagatctttgggcctaggagggagtcagagagggggatgtctgaagatggtcctggctgatcacttctttctttccacactcacacaaccccatgccttttcctgagatggcgctgggagttcccacatggacagccagggcataaacacttcccaccccggctcagccagttcctggagtcctgtgccccttttcattgccactgagccatttctagattcactggagctcaggattcatgtgtccttctttccctactctaccttctaccttggtctggacacattctggaacactggacaccctcgccagggccacttctgcactagggctctgtgctggaacccaggcatgctgccagccttttctctggatctgtcaggcctctgtccttgactcagatggacccctggtttccaagtagaaagaggctagatttgggccttgtctagctgttggctttggcctgaaccggaaccagtctcagatgaccacgggtttaaccttcttatcccagagacacccaattctagagctttatggagccgtacttccccctgaatcctagctctaggacatagatcatgactctcagcccttttacccaggatggagctggggcctgtatagccatattattgttctaagtaagttctagccccaccctcccgccttcttgagtgatacctattacggatgagttctggaaaagacccagctatgattcataaaaacacttctggatgaatcaagaaccatttcttgtttttcctagataattctctaaaaatatgattcttccatatagaatgctaagcttatttttacatgcagtttctagctccttcaacccagctgaggtcgtgccagggagacagagtctggagaagggcagaggaattttggaaggatccctggctcatagtagggaagctgggatgggggaggggtcaaaattatggcatgactgaacctgcatctgtgttgggtggacatgaatacttagctacctcagcaggaattccttccaggtcccctttaaagctgaggtccttagagtaatatgtccttaataaaaaggacaaatggatacagccttgaccctcccagtgaggagaccccaattcagcaataagtctcacccttctcccctacaggtcaggccaagaagggtgaaggcctcttgcactccagacctcatacgccccaacagcttctaattggatagaacttgctttaccttacagctcacaacctcagctgggttttaggtacccaaaaagggcctgtctagattttttcagaaaaacgtggagtgctaggggcagcctggaaaagatggggaacctgctagtgaactaggagggagacttccatagcctcagacttggatagggtaggctgagggggccctaagggagggactaaggctccaaggcaggtcacttttccttaggctgttctacttctggcttgttgcaagaggagtagatgccccctcacccacacaaaccccactcagtctccacccaactcctggcactgctcccaggggatcgggtctccactccagctttctcaattaaagacgatttatacaactgaa

SEQ ID NO: 419395 - DNA, 4248 bp, Homo sapiens
tcccgccttccccagcccggaggctttggctggggaggcggtagacggcggcgtgtaggacgctccgggagtccccgggtctgggggccgccatggcaggcagcccaggcagcggggtctccttggagggtatatccctggagtcttctgaggaagcggagctccagagggaagccatgcagcaagtcctggacaacttgggatccctccccagtgccacgggggctgcagagctggacctgatcttccttcgaggcattatggaaagtcccatagtaagatccctggccaaggcccatgagaggctggaggagacgaagctggaggccgtgagagacaacaacctggagctggtgcaggagatcctgcgggacctggcgcagctggctgagcagagcagcacagccgccgagctggcccacatcctccaggagccccacttccagtccctcctggagacgcacgactctgtggcctcaaagacctatgagacaccaccccccagccctggcctggaccctacgttcagcaaccagcctgtacctcccgatgctgtgcgcatggtgggcatccgcaagacagccggagaacatctgggtgtaacgttccgcgtggagggcggcgagctggtgatcgcgcgcattctgcatgggggcatggtggctcagcaaggcctgctgcatgtgggtgacatcatcaaggaggtgaacgggcagccagtgggcagtgacccccgcgcactgcaggagctcctgcgcaatgccagtggcagtgtcatcctcaagatcctgcccagctaccaggagccccatctgccccgccaggtatttgtgaaatgtcactttgactatgacccggcccgagacagcctcatcccctgcaaggaagcaggcctgcgcttcaacgccggggacttgctccagatcgtaaaccaggatgatgccaactggtggcaggcatgccatgtcgaagggggcagtgctgggctcattcccagccagctgctggaggagaagcggaaagcatttgtcaagagggacctggagctgacaccaaactcagggaccctatgcggcagcctttcaggaaagaaaaagaagcgaatgatgtatttgaccaccaagaatgcagagtttgaccgtcatgagctgctcatttatgaggaggtggcccgcatgcccccgttccgccggaaaaccctggtactgattggggctcagggcgtgggacggcgcagcctgaagaacaagctcatcatgtgggatccagatcgctatggcaccacggtgccctacacctcccggcggccgaaagactcagagcgggaaggtcagggttacagctttgtgtcccgtggggagatggaggctgacgtccgtgctgggcgctacctggagcatggcgaatacgagggcaacctgtatggcacacgtattgactccatccggggcgtggtcgctgctgggaaggtgtgcgtgctggatgtcaacccccaggcggtgaaggtgctacgaacggccgagtttgtcccttacgtggtgttcatcgaggccccagacttcgagaccctgcgggccatgaacagggctgcgctggagagtggaatatccaccaagcagctcacggaggcggacctgagacggacagtggaggagagcagccgcatccagcggggctacgggcactactttgacctctgcctggtcaatagcaacctggagaggaccttccgcgagctccagacagccatggagaagctacggacagagccccagtgggtgcctgtcagctgggtgtactgagcctgttcacctggtccttggctcactctgtgttgaaacccagaacctgaatccatccccctcctgacctgtgaccccctgccacaatccttagcccccatatctggctgtccttgggtaacagctcccagcaggccctaagtctggcttcagcacagaggcgtgcactgccagggaggtgggcattcatggggtaccttgtgcccaggtgctgcccactcctgatgcccattggtcaccagatatctctgagggccaagctatgcccaggaatgtgtcagagtcacctccataatggtcagtacagagaagagaaaagctgctttgggaccacatggtcagtaggcacactgccccctgccacccctccccagtcaccagttctcctctggactggccacacccaccccattcctggactcctcccacctctcacccctgtgtcggaggaacaggccttgggctgtttccgtgtgaccaggggaatgtgtggcccgctggcagccaggcaggcccgggtggtggtgccagcctggtgccatcttgaaggctggaggagtcagagtgagagccagtggccacagctgcagagcactgcagctcccagctcctttggaaagggacagggtcgcagggcagatgctgctcggtccttccctcatccacagcttctcactgccgaagtttctccagatttctccaatgtgtcctgacaggtcagccctgctccccacagggccaggctggcaggggccagtgggctcagcccaggtaggggcaggatggagggctgagccctgtgacaacctgctgttaccaactgaagagccccaagctctccatggcccacagcaggcacaggtctgagctctatgtccttgaccttggtccatttggttttctgtctagccaggtccaggtagcccacttgcatcagggctgctgggttggaggggctaaggaggagtgcagaggggaccttgggagcctgggcttgaaggacagttgccctccaggaggttcctcacacacaactccagaggcgccatttacactgtagtctgtacaacctgtggttccacgtgcatgttcggcacctgtctgtgcctctggcaccaggttgtgtgtgtgtgcgtgtgcacgtgcgtgtgtgtgtgtgtgtgtcaggtttagtttggggaggaagcaaagggttttgttttggaggtcactctttggggcccctttctgggggttccccatcagccctcatttcttataataccctgatcccagactccaaagccctggtcctttcctgatgtctcctcccttgtcttattgtccccctaccctaaatgcccccctgccataacttggggagggcagttttgtaaaataggagactccctttaagaaagaatgctgtcctagatgtacttgggcatctcatccttcattattctctgcattccttccggggggagcctgtcctcagaggggacaacctgtgacaccctgagtccaaacccttgtgcctcccagttcttccaagtgtctaactagtcttcgctgcagcgtcagccaaagctggcccctgaaccactgtgtgcccatttcctagggaaggggaaggagaataaacagaatatttattacaaaagttagaatatatttcttatactaggaatctcatttgcatttgcatagactatacacatggggtggaaaggccaggcctgcccccatctcgttggtgtggctctgcgtatactacacactcattctcctgctcctcttttcccttagtcagtgtcctttcatcctgattcagctctgccttgcatcaccctcagcctaagggagtgggaaggaaatggggtgttttcttgctgacctgaggctatagggtcacttgccatttcctaccttctctgggggatttgagggtagaggcaggggaagatctgttgttgcagttgcttctgcccccttgatccaaatgaccatcatctctgatggagatgggttgggtacctggccttcatggcaccttcactgctagggatgctcaaggggcaggcctggggcccttccctcctgtctcttctcggtctttcctctctgagcagcctcctacctcccctgcctgagccctcactccacagccctcccaggtacctagcagaggctgtcagtccttggctcacctggaacagggctggggctgggttggaacaggtgtgtgcccccaccacagctctatgactctgttctccctccctgccattgtggactcttgtatttgagggacctcaagagagtgaggaccctaccatccactgtccatattcagtcccagccccagtgcgcttcctctgttccctccctcagccatccaattcttgagttttctcactgattggttttctttctttttccttggattaaatgtgaaagcaaaggc

SEQ ID NO: 419396 - DNA, 4355 bp, Homo sapiens
gcgacctggtgccactcctcagggaatgtctgagtggaggctgcagtaccctgatggtggcctcttgggcacaagatctcagaggaatggggtcaccggagcggagctgagtccttcccttctgcccacacttttccctgtgtgcaaatgtgccctcatttttcctttctggggaactgagttccaagatgcctgacttgcttcctgggcatcatccccttcattaagaggaagaactcatgggagatgggggaggggaagaagctgctgtgaggcgagggccatgcagcaagtcctggacaacttgggatccctccccagtgccacgggggctgcagagctggacctgatcttccttcgaggcattatggaaagtcccatagtaagatccctggccaaggcccatgagaggctggaggagacgaagctggaggccgtgagagacaacaacctggagctggtgcaggagatcctgcgggacctggcgcagctggctgagcagagcagcacagccgccgagctggcccacatcctccaggagccccacttccagtccctcctggagacgcacgactctgtggcctcaaagacctatgagacaccaccccccagccctggcctggaccctacgttcagcaaccagcctgtacctcccgatgctgtgcgcatggtgggcatccgcaagacagccggagaacatctgggtgtaacgttccgcgtggagggcggcgagctggtgatcgcgcgcattctgcatgggggcatggtggctcagcaaggcctgctgcatgtgggtgacatcatcaaggaggtgaacgggcagccagtgggcagtgacccccgcgcactgcaggagctcctgcgcaatgccagtggcagtgtcatcctcaagatcctgcccagctaccaggagccccatctgccccgccaggtatttgtgaaatgtcactttgactatgacccggcccgagacagcctcatcccctgcaaggaagcaggcctgcgcttcaacgccggggacttgctccagatcgtaaaccaggatgatgccaactggtggcaggcatgccatgtcgaagggggcagtgctgggctcattcccagccagctgctggaggagaagcggaaagcatttgtcaagagggacctggagctgacaccaaactcagggaccctatgcggcagcctttcaggaaagaaaaagaagcgaatgatgtatttgaccaccaagaatgcagagtttgaccgtcatgagctgctcatttatgaggaggtggcccgcatgcccccgttccgccggaaaaccctggtactgattggggctcagggcgtgggacggcgcagcctgaagaacaagctcatcatgtgggatccagatcgctatggcaccacggtgccctacacctcccggcggccgaaagactcagagcgggaaggtcagggttacagctttgtgtcccgtggggagatggaggctgacgtccgtgctgggcgctacctggagcatggcgaatacgagggcaacctgtatggcacacgtattgactccatccggggcgtggtcgctgctgggaaggtgtgcgtgctggatgtcaacccccaggcggtgaaggtgctacgaacggccgagtttgtcccttacgtggtgttcatcgaggccccagacttcgagaccctgcgggccatgaacagggctgcgctggagagtggaatatccaccaagcagctcacggaggcggacctgagacggacagtggaggagagcagccgcatccagcggggctacgggcactactttgacctctgcctggtcaatagcaacctggagaggaccttccgcgagctccagacagccatggagaagctacggacagagccccagtgggtgcctgtcagctgggtgtactgagcctgttcacctggtccttggctcactctgtgttgaaacccagaacctgaatccatccccctcctgacctgtgaccccctgccacaatccttagcccccatatctggctgtccttgggtaacagctcccagcaggccctaagtctggcttcagcacagaggcgtgcactgccagggaggtgggcattcatggggtaccttgtgcccaggtgctgcccactcctgatgcccattggtcaccagatatctctgagggccaagctatgcccaggaatgtgtcagagtcacctccataatggtcagtacagagaagagaaaagctgctttgggaccacatggtcagtaggcacactgccccctgccacccctccccagtcaccagttctcctctggactggccacacccaccccattcctggactcctcccacctctcacccctgtgtcggaggaacaggccttgggctgtttccgtgtgaccaggggaatgtgtggcccgctggcagccaggcaggcccgggtggtggtgccagcctggtgccatcttgaaggctggaggagtcagagtgagagccagtggccacagctgcagagcactgcagctcccagctcctttggaaagggacagggtcgcagggcagatgctgctcggtccttccctcatccacagcttctcactgccgaagtttctccagatttctccaatgtgtcctgacaggtcagccctgctccccacagggccaggctggcaggggccagtgggctcagcccaggtaggggcaggatggagggctgagccctgtgacaacctgctgttaccaactgaagagccccaagctctccatggcccacagcaggcacaggtctgagctctatgtccttgaccttggtccatttggttttctgtctagccaggtccaggtagcccacttgcatcagggctgctgggttggaggggctaaggaggagtgcagaggggaccttgggagcctgggcttgaaggacagttgccctccaggaggttcctcacacacaactccagaggcgccatttacactgtagtctgtacaacctgtggttccacgtgcatgttcggcacctgtctgtgcctctggcaccaggttgtgtgtgtgtgcgtgtgcacgtgcgtgtgtgtgtgtgtgtgtcaggtttagtttggggaggaagcaaagggttttgttttggaggtcactctttggggcccctttctgggggttccccatcagccctcatttcttataataccctgatcccagactccaaagccctggtcctttcctgatgtctcctcccttgtcttattgtccccctaccctaaatgcccccctgccataacttggggagggcagttttgtaaaataggagactccctttaagaaagaatgctgtcctagatgtacttgggcatctcatccttcattattctctgcattccttccggggggagcctgtcctcagaggggacaacctgtgacaccctgagtccaaacccttgtgcctcccagttcttccaagtgtctaactagtcttcgctgcagcgtcagccaaagctggcccctgaaccactgtgtgcccatttcctagggaaggggaaggagaataaacagaatatttattacaaaagttagaatatatttcttatactaggaatctcatttgcatttgcatagactatacacatggggtggaaaggccaggcctgcccccatctcgttggtgtggctctgcgtatactacacactcattctcctgctcctcttttcccttagtcagtgtcctttcatcctgattcagctctgccttgcatcaccctcagcctaagggagtgggaaggaaatggggtgttttcttgctgacctgaggctatagggtcacttgccatttcctaccttctctgggggatttgagggtagaggcaggggaagatctgttgttgcagttgcttctgcccccttgatccaaatgaccatcatctctgatggagatgggttgggtacctggccttcatggcaccttcactgctagggatgctcaaggggcaggcctggggcccttccctcctgtctcttctcggtctttcctctctgagcagcctcctacctcccctgcctgagccctcactccacagccctcccaggtacctagcagaggctgtcagtccttggctcacctggaacagggctggggctgggttggaacaggtgtgtgcccccaccacagctctatgactctgttctccctccctgccattgtggactcttgtatttgagggacctcaagagagtgaggaccctaccatccactgtccatattcagtcccagccccagtgcgcttcctctgttccctccctcagccatccaattcttgagttttctcactgattggttttctttctttttccttggattaaatgtgaaagcaaaggc

SEQ ID NO: 419397 - DNA, 4182 bp, Homo sapiens
cgctgccgccgctctgcctggtccagccaccggcccagtgctctgacttcgccggaccggggagctctgcagagacaccctcactccttcccgagggtccgggacgcctagccgggcgtggggggaagctccgtttgcgggggacagggagggaggagcctggagccgaagccagcgccacccgtcgccggatcaacaggacaggacaggttgaggggcgtcgggaaaaggaagagggggtgctataggcaatcccggggaggacgaggaagccctgtagcaggaagctgtgatccgctctgacttgtagggggcctgttcacatctggggactggtgacaacgtgggtgcactcctctcttggggggctggttagattggagggcgtgggatctaaacagcaccagctgtccccaagaaaatttaaggggcagccaggggagaaaaaaacaaaaacaaaaacaaacacggatgctcctcattttgaggtggcggaaggccctccagtcaactacctggtgtatccactaggaagggtggatttggaggtgacttcaaaaggagcggagggtgtgaaggtgaagaaagggtcttggccgctagaattctatgctactagacatgggggggacttggtgaaaaaggtattatccagccagagggtctgggagccctgtcttactgaacctgggcaacctggatattctgagacatattttggggggatttcagtgaaaaaagtgggggatcccctccatttagagtgtagcaaaggaaaaaacaccaaggttgggttccttcctgacattggcagtgccccagtaggggtgggatgagcgaatattcccaaagctaaagtcccacaccctgtagattacaagagtggatttggcaggagtgtgccccaaaatacagtggaaaggtgcctgaagatatttaaaccacgtcttggaaatttagtgggtcttggctttgggataggtgaagtgaggacagacactggagaggagggaaaggggacgttttcaataggaggcaaaactcgagggtgggatccactgaggagtacataggctgctggatctggtggagccagcactgggcccacgggtggtaactggctgctgtggaggggggtacgtgagggggggggtctggggcttatcctcaggtcctgtgggtggggcagcgagtcggggcctgagcgtcaagagcatgccctagtgagcgggctcctctgggggagcccagcgcgctccgggcgcctgccggtttgggggtgtctcctcccggggcgctatggcggcgctggccagtagcctgatccggcagaagcgggaggtccgcgagcccgggggcagccggccggtgtcggcgcagcggcgcgtgtgtccccgcggcaccaagtccctttgccagaagcagctcctcatcctgctgtccaaggtgcgactgtgcggggggcggcccgcgcggccggaccgcggcccggagcctcagctcaaaggcatcgtcaccaaactgttctgccgccagggtttctacctccaggcgaatcccgacggaagcatccagggcaccccagaggataccagctccttcacccacttcaacctgatccctgtgggcctccgtgtggtcaccatccagagcgccaagctgggtcactacatggccatgaatgctgagggactgctctacagttcgccgcatttcacagctgagtgtcgctttaaggagtgtgtctttgagaattactacgtcctgtacgcctctgctctctaccgccagcgtcgttctggccgggcctggtacctcggcctggacaaggagggccaggtcatgaagggaaaccgagttaagaagaccaaggcagctgcccactttctgcccaagctcctggaggtggccatgtaccaggagccttctctccacagtgtccccgaggcctccccttccagtccccctgccccctgaaatgtagtccctggactggaggttccctgcactcccagtgagccagccaccaccacaacctgtctcccagtcctgctctcacccctgctgccacacacatgccctgagcagccaggtcccactaggtgctctaccctgagggagcctaggggctgactgtgacttccgaggctgctgagacccttagatctttgggcctaggagggagtcagagagggggatgtctgaagatggtcctggctgatcacttctttctttccacactcacacaaccccatgccttttcctgagatggcgctgggagttcccacatggacagccagggcataaacacttcccaccccggctcagccagttcctggagtcctgtgccccttttcattgccactgagccatttctagattcactggagctcaggattcatgtgtccttctttccctactctaccttctaccttggtctggacacattctggaacactggacaccctcgccagggccacttctgcactagggctctgtgctggaacccaggcatgctgccagccttttctctggatctgtcaggcctctgtccttgactcagatggacccctggtttccaagtagaaagaggctagatttgggccttgtctagctgttggctttggcctgaaccggaaccagtctcagatgaccacgggtttaaccttcttatcccagagacacccaattctagagctttatggagccgtacttccccctgaatcctagctctaggacatagatcatgactctcagcccttttacccaggatggagctggggcctgtatagccatattattgttctaagtaagttctagccccaccctcccgccttcttgagtgatacctattacggatgagttctggaaaagacccagctatgattcataaaaacacttctggatgaatcaagaaccatttcttgtttttcctagataattctctaaaaatatgattcttccatatagaatgctaagcttatttttacatgcagtttctagctccttcaacccagctgaggtcgtgccagggagacagagtctggagaagggcagaggaattttggaaggatccctggctcatagtagggaagctgggatgggggaggggtcaaaattatggcatgactgaacctgcatctgtgttgggtggacatgaatacttagctacctcagcaggaattccttccaggtcccctttaaagctgaggtccttagagtaatatgtccttaataaaaaggacaaatggatacagccttgaccctcccagtgaggagaccccaattcagcaataagtctcacccttctcccctacaggtcaggccaagaagggtgaaggcctcttgcactccagacctcatacgccccaacagcttctaattggatagaacttgctttaccttacagctcacaacctcagctgggttttaggtacccaaaaagggcctgtctagattttttcagaaaaacgtggagtgctaggggcagcctggaaaagatggggaacctgctagtgaactaggagggagacttccatagcctcagacttggatagggtaggctgagggggccctaagggagggactaaggctccaaggcaggtcacttttccttaggctgttctacttctggcttgttgcaagaggagtagatgccccctcacccacacaaaccccactcagtctccacccaactcctggcactgctcccaggggatcgggtctccactccagctttctcaattaaagacgatttatacaactgaaaaaaaaaaaaaaaaaaaaaaaaaaaaagaaaaaaaaaaaaaaaagggggggggggcggccaaaaaaaaaaccccgaggagggggccacccgctaagcggggcccccgagagtgtgtgtggtaacaaaggggggccccccaagaaggaggggccgcgtataaaaagagcaaagcacacgcaggacccgcgataaacaacaggcggggcggcggcaaacaacatggcatgctcggggacatcagggggggaagaggaaaccaaccactgtgggggggggcgcgacacgtggggcaacaacacccacagaagagttgtaggccgcaaaggaacactaaaacgtgcggggtacatgtggtaacccacacgcggatatgctgacggcgagaatggcacacggtgatagagaaaatatcg

SEQ ID NO: 419398 - DNA, 2445 bp, Homo sapiens
cgctgccgccgctctgcctggtccagccaccggcccagtgctctgacttcgccggaccggggagctctgcagagacaccctcactccttcccgagggtccgggacgcctagccgggcgtggggggaagctccgtttgcgggggacagggagggaggagcctggagccgaagccagcgccacccgtcgccggatcaacaggacaggacagagcctcagctcaaaggcatcgtcaccaaactgttctgccgccagggtttctacctccaggcgaatcccgacggaagcatccagggcaccccagaggataccagctccttcacccacttcaacctgatccctgtgggcctccgtgtggtcaccatccagagcgccaagctgggtcactacatggccatgaatgctgagggactgctctacagttcggtcctacatggactcagaagttgtcctccccctcccccaaaaagcgtcgttctggccgggcctggtacctcggcctggacaaggagggccaggtcatgaagggaaaccgagttaagaagaccaaggcagctgcccactttctgcccaagctcctggaggtggccatgtaccaggagccttctctccacagtgtccccgaggcctccccttccagtccccctgccccctgaaatgtagtccctggactggaggttccctgcactcccagtgagccagccaccaccacaacctgtctcccagtcctgctctcacccctgctgccacacacatgccctgagcagccaggtcccactaggtgctctaccctgagggagcctaggggctgactgtgacttccgaggctgctgagacccttagatctttgggcctaggagggagtcagagagggggatgtctgaagatggtcctggctgatcacttctttctttccacactcacacaaccccatgccttttcctgagatggcgctgggagttcccacatggacagccagggcataaacacttcccaccccggctcagccagttcctggagtcctgtgccccttttcattgccactgagccatttctagattcactggagctcaggattcatgtgtccttctttccctactctaccttctaccttggtctggacacattctggaacactggacaccctcgccagggccacttctgcactagggctctgtgctggaacccaggcatgctgccagccttttctctggatctgtcaggcctctgtccttgactcagatggacccctggtttccaagtagaaagaggctagatttgggccttgtctagctgttggctttggcctgaaccggaaccagtctcagatgaccacgggtttaaccttcttatcccagagacacccaattctagagctttatggagccgtacttccccctgaatcctagctctaggacatagatcatgactctcagcccttttacccaggatggagctggggcctgtatagccatattattgttctaagtaagttctagccccaccctcccgccttcttgagtgatacctattacggatgagttctggaaaagacccagctatgattcataaaaacacttctggatgaatcaagaaccatttcttgtttttcctagataattctctaaaaatatgattcttccatatagaatgctaagcttatttttacatgcagtttctagctccttcaacccagctgaggtcgtgccagggagacagagtctggagaagggcagaggaattttggaaggatccctggctcatagtagggaagctgggatgggggaggggtcaaaattatggcatgactgaacctgcatctgtgttgggtggacatgaatacttagctacctcagcaggaattccttccaggtcccctttaaagctgaggtccttagagtaatatgtccttaataaaaaggacaaatggatacagccttgaccctcccagtgaggagaccccaattcagcaataagtctcacccttctcccctacaggtcaggccaagaagggtgaaggcctcttgcactccagacctcatacgccccaacagcttctaattggatagaacttgctttaccttacagctcacaacctcagctgggttttaggtacccaaaaagggcctgtctagattttttcagaaaaacgtggagtgctaggggcagcctggaaaagatggggaacctgctagtgaactaggagggagacttccatagcctcagacttggatagggtaggctgagggggccctaagggagggactaaggctccaaggcaggtcacttttccttaggctgttctacttctggcttgttgcaagaggagtagatgccccctcacccacacaaaccccactcagtctccacccaactcctggcactgctcccaggggatcgggtctccactccagctttctcaattaaagacgatttatacaactgaa

SEQ ID NO: 419399 - DNA, 3314 bp, Homo sapiens
cttcccagtgggactccagcagggcgtcgtggtctgtgcggtgtctcccaaaccactacctggctgcccccgtaccagctgctgggaaagactacttcctccgagttgtgccggcctccgcgttctcctcacctcccctctcctccggacctccgccccctcgcggagaggccttgccgctttaagagccgggctagcgattgacaagcaataaacgctgagcgcccggctgcgctggagccgcccggagctaggggcttcccggggcgcaggagagacgtttcagagcccttgcctccttcaccatgccggttgccgccaccaactctgaaactgccatgcagcaagtcctggacaacttgggatccctccccagtgccacgggggctgcagagctggacctgatcttccttcgaggcattatggaaagtcccatagtaagatccctggccaaggcccatgagaggctggaggagacgaagctggaggccgtgagagacaacaacctggagctggtgcaggagatcctgcgggacctggcgcagctggctgagcagagcagcacagccgccgagctggcccacatcctccaggagccccacttccagtccctcctggagacgcacgactctgtggcctcaaagacctatgagacaccaccccccagccctggcctggaccctacgttcagcaaccagcctgtacctcccgatgctgtgcgcatggtgggcatccgcaagacagccggagaacatctgggtgtaacgttccgcgtggagggcggcgagctggtgatcgcgcgcattctgcatgggggcatggtggctcagcaaggcctgctgcatgtgggtgacatcatcaaggaggtgaacgggcagccagtgggcagtgacccccgcgcactgcaggagctcctgcgcaatgccagtggcagtgtcatcctcaagatcctgcccagctaccaggagccccatctgccccgccaggtatttgtgaaatgtcactttgactatgacccggcccgagacagcctcatcccctgcaaggaagcaggcctgcgcttcaacgccggggacttgctccagatcgtaaaccaggatgatgccaactggtggcaggcatgccatgtcgaagggggcagtgctgggctcattcccagccagctgctggaggagaagcggaaagcatttgtcaagagggacctggagctgacaccaaactcagggaccctatgcggcagcctttcaggaaagaaaaagaagcgaatgatgtatttgaccaccaagaatgcagagtttgaccgtcatgagctgctcatttatgaggaggtggcccgcatgcccccgttccgccggaaaaccctggtactgattggggctcagggcgtgggacggcgcagcctgaagaacaagctcatcatgtgggatccagatcgctatggcaccacggtgccctacacctcccggcggccgaaagactcagagcgggaaggtcagggttacagctttgtgtcccgtggggagatggaggctgacgtccgtgctgggcgctacctggagcatggcgaatacgagggcaacctgtatggcacacgtattgactccatccggggcgtggtcgctgctgggaaggtgtgcgtgctggatgtcaacccccaggcggtgaaggtgctacgaacggccgagtttgtcccttacgtggtgttcatcgaggccccagacttcgagaccctgcgggccatgaacagggctgcgctggagagtggaatatccaccaagcagctcacggaggcggacctgagacggacagtggaggagagcagccgcatccagcggggctacgggcactactttgacctctgcctggtcaatagcaacctggagaggaccttccgcgagctccagacagccatggagaagctacggacagagccccagtgggtgcctgtcagctgggtgtactgagcctgttcacctggtccttggctcactctgtgttgaaacccagaacctgaatccatccccctcctgacctgtgaccccctgccacaatccttagcccccatatctggctgtccttgggtaacagctcccagcaggccctaagtctggcttcagcacagaggcgtgcactgccagggaggtgggcattcatggggtaccttgtgcccaggtgctgcccactcctgatgcccattggtcaccagatatctctgagggccaagctatgcccaggaatgtgtcagagtcacctccataatggtcagtacagagaagagaaaagctgctttgggaccacatggtcagtaggcacactgccccctgccacccctccccagtcaccagttctcctctggactggccacacccaccccattcctggactcctcccacctctcacccctgtgtcggaggaacaggccttgggctgtttccgtgtgaccaggggaatgtgtggcccgctggcagccaggcaggcccgggtggtggtgccagcctggtgccatcttgaaggctggaggagtcagagtgagagccagtggccacagctgcagagcactgcagctcccagctcctttggaaagggacagggtcgcagggcagatgctgctcggtccttccctcatccacagcttctcactgccgaagtttctccagatttctccaatgtgtcctgacaggtcagccctgctccccacagggccaggctggcaggggccagtgggctcagcccaggtaggggcaggatggagggctgagccctgtgacaacctgctgttaccaactgaagagccccaagctctccatggcccacagcaggcacaggtctgagctctatgtccttgaccttggtccatttggttttctgtctagccaggtccaggtagcccacttgcatcagggctgctgggttggaggggctaaggaggagtgcagaggggaccttgggagcctgggcttgaaggacagttgccctccaggaggttcctcacacacaactccagaggcgccatttacactgtagtctgtacaacctgtggttccacgtgcatgttcggcacctgtctgtgcctctggcaccaggttgtgtgtgtgcccccaccacagctctatgactctgttctccctccctgccattgtggactcttgtatttgagggacctcaagagagtgaggaccctaccatccactgtccatattcagtcccagccccagtgcgcttcctctgttccctccctcagccatccaattcttgagttttctcactgattggttttctttctttttccttggattaaatgtgaaagcaaaggc

SEQ ID NO: 419400 - DNA, 4410 bp, Homo sapiens
cttcccagtgggactccagcagggcgtcgtggtctgtgcggtgtctcccaaaccactacctggctgcccccgtaccagctgctgggaaagactacttcctccgagttgtgccggcctccgcgttctcctcacctcccctctcctccggacctccgccccctcgcggagaggccttgccgctttaagagccgggctagcgattgacaagcaataaacgctgagcgcccggctgcgctggagccgcccggagctaggggcttcccggggcgcaggagagacgtttcagagcccttgcctccttcaccatgccggttgccgccaccaactctgaaactgccatgcagcaagtcctggacaacttgggatccctccccagtgccacgggggctgcagagctggacctgatcttccttcgaggcattatggaaagtcccatagtaagatccctggccaaggcccatgagaggctggaggagacgaagctggaggccgtgagagacaacaacctggagctggtgcaggagatcctgcgggacctggcgcagctggctgagcagagcagcacagccgccgagctggcccacatcctccaggagccccacttccagtccctcctggagacgcacgactctgtggcctcaaagacctatgagacaccaccccccagccctggcctggaccctacgttcagcaaccagcctgtacctcccgatgctgtgcgcatggtgggcatccgcaagacagccggagaacatctgggtgtaacgttccgcgtggagggcggcgagctggtgatcgcgcgcattctgcatgggggcatggtggctcagcaaggcctgctgcatgtgggtgacatcatcaaggaggtgaacgggcagccagtgggcagtgacccccgcgcactgcaggagctcctgcgcaatgccagtggcagtgtcatcctcaagatcctgcccagctaccaggagccccatctgccccgccaggtatttgtgaaatgtcactttgactatgacccggcccgagacagcctcatcccctgcaaggaagcaggcctgcgcttcaacgccggggacttgctccagatcgtaaaccaggatgatgccaactggtggcaggcatgccatgtcgaagggggcagtgctgggctcattcccagccagctgctggaggagaagcggaaagcatttgtcaagagggacctggagctgacaccaaactcagggaccctatgcggcagcctttcaggaaagaaaaagaagcgaatgatgtatttgaccaccaagaatgcagagtttgaccgtcatgagctgctcatttatgaggaggtggcccgcatgcccccgttccgccggaaaaccctggtactgattggggctcagggcgtgggacggcgcagcctgaagaacaagctcatcatgtgggatccagatcgctatggcaccacggtgccctacacctcccggcggccgaaagactcagagcgggaaggtcagggttacagctttgtgtcccgtggggagatggaggctgacgtccgtgctgggcgctacctggagcatggcgaatacgagggcaacctgtatggcacacgtattgactccatccggggcgtggtcgctgctgggaaggtgtgcgtgctggatgtcaacccccaggcggtgaaggtgctacgaacggccgagtttgtcccttacgtggtgttcatcgaggccccagacttcgagaccctgcgggccatgaacagggctgcgctggagagtggaatatccaccaagcagctcacggaggcggacctgagacggacagtggaggagagcagccgcatccagcggggctacgggcactactttgacctctgcctggtcaatagcaacctggagaggaccttccgcgagctccagacagccatggagaagctacggacagagccccagtgggtgcctgtcagctgggtgtactgagcctgttcacctggtccttggctcactctgtgttgaaacccagaacctgaatccatccccctcctgacctgtgaccccctgccacaatccttagcccccatatctggctgtccttgggtaacagctcccagcaggccctaagtctggcttcagcacagaggcgtgcactgccagggaggtgggcattcatggggtaccttgtgcccaggtgctgcccactcctgatgcccattggtcaccagatatctctgagggccaagctatgcccaggaatgtgtcagagtcacctccataatggtcagtacagagaagagaaaagctgctttgggaccacatggtcagtaggcacactgccccctgccacccctccccagtcaccagttctcctctggactggccacacccaccccattcctggactcctcccacctctcacccctgtgtcggaggaacaggccttgggctgtttccgtgtgaccaggggaatgtgtggcccgctggcagccaggcaggcccgggtggtggtgccagcctggtgccatcttgaaggctggaggagtcagagtgagagccagtggccacagctgcagagcactgcagctcccagctcctttggaaagggacagggtcgcagggcagatgctgctcggtccttccctcatccacagcttctcactgccgaagtttctccagatttctccaatgtgtcctgacaggtcagccctgctccccacagggccaggctggcaggggccagtgggctcagcccaggtaggggcaggatggagggctgagccctgtgacaacctgctgttaccaactgaagagccccaagctctccatggcccacagcaggcacaggtctgagctctatgtccttgaccttggtccatttggttttctgtctagccaggtccaggtagcccacttgcatcagggctgctgggttggaggggctaaggaggagtgcagaggggaccttgggagcctgggcttgaaggacagttgccctccaggaggttcctcacacacaactccagaggcgccatttacactgtagtctgtacaacctgtggttccacgtgcatgttcggcacctgtctgtgcctctggcaccaggttgtgtgtgtgtgcgtgtgcacgtgcgtgtgtgtgtgtgtgtgtcaggtttagtttggggaggaagcaaagggttttgttttggaggtcactctttggggcccctttctgggggttccccatcagccctcatttcttataataccctgatcccagactccaaagccctggtcctttcctgatgtctcctcccttgtcttattgtccccctaccctaaatgcccccctgccataacttggggagggcagttttgtaaaataggagactccctttaagaaagaatgctgtcctagatgtacttgggcatctcatccttcattattctctgcattccttccggggggagcctgtcctcagaggggacaacctgtgacaccctgagtccaaacccttgtgcctcccagttcttccaagtgtctaactagtcttcgctgcagcgtcagccaaagctggcccctgaaccactgtgtgcccatttcctagggaaggggaaggagaataaacagaatatttattacaaaagttagaatatatttcttatactaggaatctcatttgcatttgcatagactatacacatggggtggaaaggccaggcctgcccccatctcgttggtgtggctctgcgtatactacacactcattctcctgctcctcttttcccttagtcagtgtcctttcatcctgattcagctctgccttgcatcaccctcagcctaagggagtgggaaggaaatggggtgttttcttgctgacctgaggctatagggtcacttgccatttcctaccttctctgggggatttgagggtagaggcaggggaagatctgttgttgcagttgcttctgcccccttgatccaaatgaccatcatctctgatggagatgggttgggtacctggccttcatggcaccttcactgctagggatgctcaaggggcaggcctggggcccttccctcctgtctcttctcggtctttcctctctgagcagcctcctacctcccctgcctgagccctcactccacagccctcccaggtacctagcagaggctgtcagtccttggctcacctggaacagggctggggctgggttggaacaggtgtgtgcccccaccacagctctatgactctgttctccctccctgccattgtggactcttgtatttgagggacctcaagagagtgaggaccctaccatccactgtccatattcagtcccagccccagtgcgcttcctctgttccctccctcagccatccaattcttgagttttctcactgattggttttctttctttttccttggattaaatgtgaaagcaaaggc

SEQ ID NO: 419401 - DNA, 3768 bp, Homo sapiens
cgctgccgccgctctgcctggtccagccaccggcccagtgctctgacttcgccggaccggggagctctgcagagacaccctcactccttcccgagggtccgggacgcctagccgggcgtggggggaagctccgtttgcgggggacagggagggaggagcctggagccgaagccagcgccacccgtcgccggatcaacaggacaggacaggttgaggggcgtcgggaaaaggaagagggggtgctataggcaatcccggggaggacgaggaagccctgtagcaggaagctgtgatccgctctgacttgtagggggcctgttcacatctggggactggtgacaacgtgggtgcactcctctcttggggggctggttagattggagggcgtgggatctaaacagcaccagctgtccccaagaaaatttaaggggcagccaggggagaaaaaaacaaaaacaaaaacaaacacggatgctcctcattttgaggtggcggaaggccctccagtcaactacctggtgtatccactaggaagggtggatttggaggtgacttcaaaaggagcggagggtgtgaaggtgaagaaagggtcttggccgctagaattctatgctactagacatgggggggacttggtgaaaaaggtattatccagccagagggtctgggagccctgtcttactgaacctgggcaacctggatattctgagacatattttggggggatttcagtgaaaaaagtgggggatcccctccatttagagtgtagcaaaggaaaaaacaccaaggttgggttccttcctgacattggcagtgccccagtaggggtgggatgagcgaatattcccaaagctaaagtcccacaccctgtagattacaagagtggatttggcaggagtgtgccccaaaatacagtggaaaggtgcctgaagatatttaaaccacgtcttggaaatttagtgggtcttggctttgggataggtgaagtgaggacagacactggagaggagggaaaggggacgttttcaataggaggcaaaactcgagggtgggatccactgaggagtacataggctgctggatctggtggagccagcactgggcccacgggtggtaactggctgctgtggaggggggtacgtgagggggggggtctggggcttatcctcaggtcctgtgggtggggcagcgagtcggggcctgagcgtcaagagcatgccctagtgagcgggctcctctgggggagcccagcgcgctccgggcgcctgccggtttgggggtgtctcctcccggggcgctatggcggcgctggccagtagcctgatccggcagaagcgggaggtccgcgagcccgggggcagccggccggtgtcggcgcagcggcgcgtgtgtccccgcggcaccaagtccctttgccagaagcagctcctcatcctgctgtccaaggtgcgactgtgcggggggcggcccgcgcggccggaccgcggcccggagcctcagctcaaaggcatcgtcaccaaactgttctgccgccagggtttctacctccaggcgaatcccgacggaagcatccagggcaccccagaggataccagctccttcacccacttcaacctgatccctgtgggcctccgtgtggtcaccatccagagcgccaagctgggtcactacatggccatgaatgctgagggactgctctacagttcgccgcatttcacagctgagtgtcgctttaaggagtgtgtctttgagaattactacgtcctgtacgcctctgctctctaccgccagcgtcgttctggccgggcctggtacctcggcctggacaaggagggccaggtcatgaagggaaaccgagttaagaagaccaaggcagctgcccactttctgcccaagctcctggaggtggccatgtaccaggagccttctctccacagtgtccccgaggcctccccttccagtccccctgccccctgaaatgtagtccctggactggaggttccctgcactcccagtgagccagccaccaccacaacctgtctcccagtcctgctctcacccctgctgccacacacatgccctgagcagccaggtcccactaggtgctctaccctgagggagcctaggggctgactgtgacttccgaggctgctgagacccttagatctttgggcctaggagggagtcagagagggggatgtctgaagatggtcctggctgatcacttctttctttccacactcacacaaccccatgccttttcctgagatggcgctgggagttcccacatggacagccagggcataaacacttcccaccccggctcagccagttcctggagtcctgtgccccttttcattgccactgagccatttctagattcactggagctcaggattcatgtgtccttctttccctactctaccttctaccttggtctggacacattctggaacactggacaccctcgccagggccacttctgcactagggctctgtgctggaacccaggcatgctgccagccttttctctggatctgtcaggcctctgtccttgactcagatggacccctggtttccaagtagaaagaggctagatttgggccttgtctagctgttggctttggcctgaaccggaaccagtctcagatgaccacgggtttaaccttcttatcccagagacacccaattctagagctttatggagccgtacttccccctgaatcctagctctaggacatagatcatgactctcagcccttttacccaggatggagctggggcctgtatagccatattattgttctaagtaagttctagccccaccctcccgccttcttgagtgatacctattacggatgagttctggaaaagacccagctatgattcataaaaacacttctggatgaatcaagaaccatttcttgtttttcctagataattctctaaaaatatgattcttccatatagaatgctaagcttatttttacatgcagtttctagctccttcaacccagctgaggtcgtgccagggagacagagtctggagaagggcagaggaattttggaaggatccctggctcatagtagggaagctgggatgggggaggggtcaaaattatggcatgactgaacctgcatctgtgttgggtggacatgaatacttagctacctcagcaggaattccttccaggtcccctttaaagctgaggtccttagagtaatatgtccttaataaaaaggacaaatggatacagccttgaccctcccagtgaggagaccccaattcagcaataagtctcacccttctcccctacaggtcaggccaagaagggtgaaggcctcttgcactccagacctcatacgccccaacagcttctaattggatagaacttgctttaccttacagctcacaacctcagctgggttttaggtacccaaaaagggcctgtctagattttttcagaaaaacgtggagtgctaggggcagcctggaaaagatggggaacctgctagtgaactaggagggagacttccatagcctcagacttggatagggtaggctgagggggccctaagggagggactaaggctccaaggcaggtcacttttccttaggctgttctacttctggcttgttgcaagaggagtagatgccccctcacccacacaaaccccactcagtctccacccaactcctggcactgctcccaggggatcgggtctccactccagctttctcaattaaagacgatttatacaactgaa

SEQ ID NO: 419402 - DNA, 5887 bp, Homo sapiens
  misc_feature (1748)..(1748): n is a, c, g, or t
cgctgccgccgctctgcctggtccagccaccggcccagtgctctgacttcgccggaccggggagctctgcagagacaccctcactccttcccgagggtccgggacgcctagccgggcgtggggggaagctccgtttgcgggggacagggagggaggagcctggagccgaagccagcgccacccgtcgccggatcaacaggacaggacaggttgaggggcgtcgggaaaaggaagagggggtgctataggcaatcccggggaggacgaggaagccctgtagcaggaagctgtgatccgctctgacttgtagggggcctgttcacatctggggactggtgacaacgtgggtgcactcctctcttggggggctggttagattggagggcgtgggatctaaacagcaccagctgtccccaagaaaatttaaggggcagccaggggagaaaaaaacaaaaacaaaaacaaacacggatgctcctcattttgaggtggcggaaggccctccagtcaactacctggtgtatccactaggaagggtggatttggaggtgacttcaaaaggagcggagggtgtgaaggtgaagaaagggtcttggccgctagaattctatgctactagacatgggggggacttggtgaaaaaggtattatccagccagagggtctgggagccctgtcttactgaacctgggcaacctggatattctgagacatattttggggggatttcagtgaaaaaagtgggggatcccctccatttagagtgtagcaaaggaaaaaacaccaaggttgggttccttcctgacattggcagtgccccagtaggggtgggatgagcgaatattcccaaagctaaagtcccacaccctgtagattacaagagtggatttggcaggagtgtgccccaaaatacagtggaaaggtgcctgaagatatttaaaccacgtcttggaaatttagtgggtcttggctttgggataggtgaagtgaggacagacactggagaggagggaaaggggacgttttcaataggaggcaaaactcgagggtgggatccactgaggagtacataggctgctggatctggtggagccagcactgggcccacgggtggtaactggctgctgtggaggggggtacgtgagggggggggtctggggcttatcctcaggtcctgtgggtggggcagcgagtcggggcctgagcgtcaagagcatgccctagtgagcgggctcctctgggggagcccagcgcgctccgggcgcctgccggtttgggggtgtctcctcccggggcgctatggcggcgctggccagtagcctgatccggcagaagcgggaggtccgcgagcccgggggcagccggccggtgtcggcgcagcggcgcgtgtgtccccgcggcaccaagtccctttgccagaagcagctcctcatcctgctgtccaaggtgcgactgtgcggggggcggcccgcgcggccggaccgcggcccggagcctcagctcaaaggcatcgtcaccaaactgttctgccgccagggtttctacctccaggcgaatcccgacggaagcatccagggcaccccagaggataccagctccttcacccacttcaacctgatccctgtgggcctccgtgtggtcaccatccagagcgccaagctgggtcactacatggccatgaatgctgagggactgctctacagttcgacctggagatctccaggtctgaaatgctgggtcgacccagnagagagacgtttcagagcccttgcctccttcaccatgccggttgccgccaccaactctgaaactgccatgcagcaagtcctggacaacttgggatccctccccagtgccacgggggctgcagagctggacctgatcttccttcgaggcattatggaaagtcccatagtaagatccctggccaaggcccatgagaggctggaggagacgaagctggaggccgtgagagacaacaacctggagctggtgcaggagatcctgcgggacctggcgcagctggctgagcagagcagcacagccgccgagctggcccacatcctccaggagccccacttccagtccctcctggagacgcacgactctgtggcctcaaagacctatgagacaccaccccccagccctggcctggaccctacgttcagcaaccagcctgtacctcccgatgctgtgcgcatggtgggcatccgcaagacagccggagaacatctgggtgtaacgttccgcgtggagggcggcgagctggtgatcgcgcgcattctgcatgggggcatggtggctcagcaaggcctgctgcatgtgggtgacatcatcaaggaggtgaacgggcagccagtgggcagtgacccccgcgcactgcaggagctcctgcgcaatgccagtggcagtgtcatcctcaagatcctgcccagctaccaggagccccatctgccccgccaggtatttgtgaaatgtcactttgactatgacccggcccgagacagcctcatcccctgcaaggaagcaggcctgcgcttcaacgccggggacttgctccagatcgtaaaccaggatgatgccaactggtggcaggcatgccatgtcgaagggggcagtgctgggctcattcccagccagctgctggaggagaagcggaaagcatttgtcaagagggacctggagctgacaccaaactcagggaccctatgcggcagcctttcaggaaagaaaaagaagcgaatgatgtatttgaccaccaagaatgcagagtttgaccgtcatgagctgctcatttatgaggaggtggcccgcatgcccccgttccgccggaaaaccctggtactgattggggctcagggcgtgggacggcgcagcctgaagaacaagctcatcatgtgggatccagatcgctatggcaccacggtgccctacacctcccggcggccgaaagactcagagcgggaaggtcagggttacagctttgtgtcccgtggggagatggaggctgacgtccgtgctgggcgctacctggagcatggcgaatacgagggcaacctgtatggcacacgtattgactccatccggggcgtggtcgctgctgggaaggtgtgcgtgctggatgtcaacccccaggcggtgaaggtgctacgaacggccgagtttgtcccttacgtggtgttcatcgaggccccagacttcgagaccctgcgggccatgaacagggctgcgctggagagtggaatatccaccaagcagctcacggaggcggacctgagacggacagtggaggagagcagccgcatccagcggggctacgggcactactttgacctctgcctggtcaatagcaacctggagaggaccttccgcgagctccagacagccatggagaagctacggacagagccccagtgggtgcctgtcagctgggtgtactgagcctgttcacctggtccttggctcactctgtgttgaaacccagaacctgaatccatccccctcctgacctgtgaccccctgccacaatccttagcccccatatctggctgtccttgggtaacagctcccagcaggccctaagtctggcttcagcacagaggcgtgcactgccagggaggtgggcattcatggggtaccttgtgcccaggtgctgcccactcctgatgcccattggtcaccagatatctctgagggccaagctatgcccaggaatgtgtcagagtcacctccataatggtcagtacagagaagagaaaagctgctttgggaccacatggtcagtaggcacactgccccctgccacccctccccagtcaccagttctcctctggactggccacacccaccccattcctggactcctcccacctctcacccctgtgtcggaggaacaggccttgggctgtttccgtgtgaccaggggaatgtgtggcccgctggcagccaggcaggcccgggtggtggtgccagcctggtgccatcttgaaggctggaggagtcagagtgagagccagtggccacagctgcagagcactgcagctcccagctcctttggaaagggacagggtcgcagggcagatgctgctcggtccttccctcatccacagcttctcactgccgaagtttctccagatttctccaatgtgtcctgacaggtcagccctgctccccacagggccaggctggcaggggccagtgggctcagcccaggtaggggcaggatggagggctgagccctgtgacaacctgctgttaccaactgaagagccccaagctctccatggcccacagcaggcacaggtctgagctctatgtccttgaccttggtccatttggttttctgtctagccaggtccaggtagcccacttgcatcagggctgctgggttggaggggctaaggaggagtgcagaggggaccttgggagcctgggcttgaaggacagttgccctccaggaggttcctcacacacaactccagaggcgccatttacactgtagtctgtacaacctgtggttccacgtgcatgttcggcacctgtctgtgcctctggcaccaggttgtgtgtgtgtgcgtgtgcacgtgcgtgtgtgtgtgtgtgtgtcaggtttagtttggggaggaagcaaagggttttgttttggaggtcactctttggggcccctttctgggggttccccatcagccctcatttcttataataccctgatcccagactccaaagccctggtcctttcctgatgtctcctcccttgtcttattgtccccctaccctaaatgcccccctgccataacttggggagggcagttttgtaaaataggagactccctttaagaaagaatgctgtcctagatgtacttgggcatctcatccttcattattctctgcattccttccggggggagcctgtcctcagaggggacaacctgtgacaccctgagtccaaacccttgtgcctcccagttcttccaagtgtctaactagtcttcgctgcagcgtcagccaaagctggcccctgaaccactgtgtgcccatttcctagggaaggggaaggagaataaacagaatatttattacaaaagttagaatatatttcttatactaggaatctcatttgcatttgcatagactatacacatggggtggaaaggccaggcctgcccccatctcgttggtgtggctctgcgtatactacacactcattctcctgctcctcttttcccttagtcagtgtcctttcatcctgattcagctctgccttgcatcaccctcagcctaagggagtgggaaggaaatggggtgttttcttgctgacctgaggctatagggtcacttgccatttcctaccttctctgggggatttgagggtagaggcaggggaagatctgttgttgcagttgcttctgcccccttgatccaaatgaccatcatctctgatggagatgggttgggtacctggccttcatggcaccttcactgctagggatgctcaaggggcaggcctggggcccttccctcctgtctcttctcggtctttcctctctgagcagcctcctacctcccctgcctgagccctcactccacagccctcccaggtacctagcagaggctgtcagtccttggctcacctggaacagggctggggctgggttggaacaggtgtgtgcccccaccacagctctatgactctgttctccctccctgccattgtggactcttgtatttgagggacctcaagagagtgaggaccctaccatccactgtccatattcagtcccagccccagtgcgcttcctctgttccctccctcagccatccaattcttgagttttctcactgattggttttctttctttttccttggattaaatgtgaaagcaaaggc

SEQ ID NO: 419403 - DNA, 2303 bp, Homo sapiens
cctcagctcccaccccccatatccttgagcctcagctcaaaggcatcgtcaccaaactgttctgccgccagggtttctacctccaggcgaatcccgacggaagcatccagggcaccccagaggataccagctccttcacccacttcaacctgatccctgtgggcctccgtgtggtcaccatccagagcgccaagctgggtcactacatggccatgaatgctgagggactgctctacagttcgccgcatttcacagctgagtgtcgctttaaggagtgtgtctttgagaattactacgtcctgtacgcctctgctctctaccgccagcgtcgttctggccgggcctggtacctcggcctggacaaggagggccaggtcatgaagggaaaccgagttaagaagaccaaggcagctgcccactttctgcccaagctcctggaggtggccatgtaccaggagccttctctccacagtgtccccgaggcctccccttccagtccccctgccccctgaaatgtagtccctggactggaggttccctgcactcccagtgagccagccaccaccacaacctgtctcccagtcctgctctcacccctgctgccacacacatgccctgagcagccaggtcccactaggtgctctaccctgagggagcctaggggctgactgtgacttccgaggctgctgagacccttagatctttgggcctaggagggagtcagagagggggatgtctgaagatggtcctggctgatcacttctttctttccacactcacacaaccccatgccttttcctgagatggcgctgggagttcccacatggacagccagggcataaacacttcccaccccggctcagccagttcctggagtcctgtgccccttttcattgccactgagccatttctagattcactggagctcaggattcatgtgtccttctttccctactctaccttctaccttggtctggacacattctggaacactggacaccctcgccagggccacttctgcactagggctctgtgctggaacccaggcatgctgccagccttttctctggatctgtcaggcctctgtccttgactcagatggacccctggtttccaagtagaaagaggctagatttgggccttgtctagctgttggctttggcctgaaccggaaccagtctcagatgaccacgggtttaaccttcttatcccagagacacccaattctagagctttatggagccgtacttccccctgaatcctagctctaggacatagatcatgactctcagcccttttacccaggatggagctggggcctgtatagccatattattgttctaagtaagttctagccccaccctcccgccttcttgagtgatacctattacggatgagttctggaaaagacccagctatgattcataaaaacacttctggatgaatcaagaaccatttcttgtttttcctagataattctctaaaaatatgattcttccatatagaatgctaagcttatttttacatgcagtttctagctccttcaacccagctgaggtcgtgccagggagacagagtctggagaagggcagaggaattttggaaggatccctggctcatagtagggaagctgggatgggggaggggtcaaaattatggcatgactgaacctgcatctgtgttgggtggacatgaatacttagctacctcagcaggaattccttccaggtcccctttaaagctgaggtccttagagtaatatgtccttaataaaaaggacaaatggatacagccttgaccctcccagtgaggagaccccaattcagcaataagtctcacccttctcccctacaggtcaggccaagaagggtgaaggcctcttgcactccagacctcatacgccccaacagcttctaattggatagaacttgctttaccttacagctcacaacctcagctgggttttaggtacccaaaaagggcctgtctagattttttcagaaaaacgtggagtgctaggggcagcctggaaaagatggggaacctgctagtgaactaggagggagacttccatagcctcagacttggatagggtaggctgagggggccctaagggagggactaaggctccaaggcaggtcacttttccttaggctgttctacttctggcttgttgcaagaggagtagatgccccctcacccacacaaaccccactcagtctccacccaactcctggcactgctcccaggggatcgggtctccactccagctttctcaattaaagacgatttatacaactgaa

SEQ ID NO: 419404 - DNA, 2777 bp, Homo sapiens
cgctgccgccgctctgcctggtccagccaccggcccagtgctctgacttcgccggaccggggagctctgcagagacaccctcactccttcccgagggtccgggacgcctagccgggcgtggggggaagctccgtttgcgggggacagggagggaggagcctggagccgaagccagcgccacccgtcgccggatcaacaggacaggacaggttgaggggcgtcgggaaaaggaagagggggtgctataggcaatcccggggaggacgaggaagccctgtagcaggaagctgtgatccgctctgacttgtagggggcctgttcacatctggggactggtgacaacgtgggtgcactcctctcttggggggctggttagattggagggcgtgggatctaaacagcaccagctgtccccaagaaaatttaaggggcagccaggggagaaaaaaacaaaaacaaaaacaaacacggatgctcctcattttgaggtggcggaaggccctccagtcaactacctggtgtatccactaggaagggtggatttggaggtgacttcaaaaggagcggagggtgtgaaggtgaagaaagggtcttggccgctagaattctatgctactagacatgggggggacttggtgaaaaaggtattatccagccagagggtctgggagccctgtcttactgaacctgggcaacctggatattctgagacatattttggggggatttcagtgaaaaaagtgggggatcccctccatttagagtgtagcaaaggaaaaaacaccaaggttgggttccttcctgacattggcagtgccccagtaggggtgggatgagcgaatattcccaaagctaaagtcccacaccctgtagattacaagagtggatttggcaggagtgtgccccaaaatacagtggaaaggtgcctgaagatatttaaaccacgtcttggaaatttagtgggtcttggctttgggataggtgaagtgaggacagacactggagaggagggaaaggggacgttttcaataggaggcaaaactcgagggtgggatccactgaggagtacataggctgctggatctggtggagccagcacaggtcccactaggtgctctaccctgagggagcctaggggctgactgtgacttccgaggctgctgagacccttagatctttgggcctaggagggagtcagagagggggatgtctgaagatggtcctggctgatcacttctttctttccacactcacacaaccccatgccttttcctgagatggcgctgggagttcccacatggacagccagggcataaacacttcccaccccggctcagccagttcctggagtcctgtgccccttttcattgccactgagccatttctagattcactggagctcaggattcatgtgtccttctttccctactctaccttctaccttggtctggacacattctggaacactggacaccctcgccagggccacttctgcactagggctctgtgctggaacccaggcatgctgccagccttttctctggatctgtcaggcctctgtccttgactcagatggacccctggtttccaagtagaaagaggctagatttgggccttgtctagctgttggctttggcctgaaccggaaccagtctcagatgaccacgggtttaaccttcttatcccagagacacccaattctagagctttatggagccgtacttccccctgaatcctagctctaggacatagatcatgactctcagcccttttacccaggatggagctggggcctgtatagccatattattgttctaagtaagttctagccccaccctcccgccttcttgagtgatacctattacggatgagttctggaaaagacccagctatgattcataaaaacacttctggatgaatcaagaaccatttcttgtttttcctagataattctctaaaaatatgattcttccatatagaatgctaagcttatttttacatgcagtttctagctccttcaacccagctgaggtcgtgccagggagacagagtctggagaagggcagaggaattttggaaggatccctggctcatagtagggaagctgggatgggggaggggtcaaaattatggcatgactgaacctgcatctgtgttgggtggacatgaatacttagctacctcagcaggaattccttccaggtcccctttaaagctgaggtccttagagtaatatgtccttaataaaaaggacaaatggatacagccttgaccctcccagtgaggagaccccaattcagcaataagtctcacccttctcccctacaggtcaggccaagaagggtgaaggcctcttgcactccagacctcatacgccccaacagcttctaattggatagaacttgctttaccttacagctcacaacctcagctgggttttaggtacccaaaaagggcctgtctagattttttcagaaaaacgtggagtgctaggggcagcctggaaaagatggggaacctgctagtgaactaggagggagacttccatagcctcagacttggatagggtaggctgagggggccctaagggagggactaaggctccaaggcaggtcacttttccttaggctgttctacttctggcttgttgcaagaggagtagatgccccctcacccacacaaaccccactcagtctccacccaactcctggcactgctcccaggggatcgggtctccactccagctttctcaattaaagacgatttatacaactgaa

SEQ ID NO: 419405 - DNA, 432 bp, Homo sapiens
ggcaaatataagtgagcaaataaatttgtgtggattatttagaaagtgtagatataaataattttcaactatgctttagaacactctcccactctgggaagaaaattttagaaaaaggataacccctgcatttctttccattagaagtacatgatcaaaagacaaagtccctttttcccttgactgtgacataacatgtccctcataggcaactgaacagataaaaaatccagacgatgcttagtaatttcctgcttcccctttagtgcacagtgtattatcagtatgttttgccctctttatttaatatcttgctgaattaaattatctcatcaggtttttaagcacaagcccagcctgctttctggatgacacctgccacaggtcatccttcctgaatttgcctaaatgaggggatcctctaggagacga

SEQ ID NO: 419406 - DNA, 431 bp, Homo sapiens
ggcaaatataagtgagcaaataaatttgtgtggattatttagaaagtgtagatataaataattttcaactatgctttagaacactctcccactctgggaagaaaattttagaaaaaggataacccctgcatttctttccattagaagtacatgatcaaaagacaaagtccctttttcccttgactgtgacataacatgtccctcataggcaactgaacagataaaaaatccagacgatgcttagtaatttcctgcttcccctttagtgcacagtgtattatcagtatgttttgccctctttatttaatatcttgctgaattaaattatctcatcaggtttttaagcacaagcccagcctgctttctggatgacacctgccacaggtcatccttcctgaatttgcctaaatagccccagaatattcttcaag

SEQ ID NO: 419407 - DNA, 463 bp, Homo sapiens
tcccaacttcagagaatcaactggctagcaccttggagcacctgctgtggtaacgtgagtggctgaacaccagacaaaaggaggctcccaatcactgttgcagatcttgttaaaatcctggctctatcctcagcttaggtgtattcttcttgtactaggataaagcctctctgacctcttcattaaggcctaagtatacagtatggtatatgacaagcaggaccttcctctcctccccctgtatcttcccaaactacaaaaacagaaagcccccaaccttctcacccctgcctcacacaaatccccacagtggactgtttaaaaaataacagtacttggtagatatatattctcacttgctttcattatagaaaaaagaaagaaaataaatgaactaaacatccaactcaaggaattacaaaaaggagaaagcctcctctgcccccaaggaaaaagttggaaa

SEQ ID NO: 419408 - DNA, 358 bp, Homo sapiens
agccccagaatattcttcaagcatgcccctggctcatcatcccaacttcagagaatcaactggctagcaccttggagcacctgctgtggtaacgtgagtggctgaacaccagacaaaaggaggctcccaatcactgttgcagatcttgttaaaatcctggctctatcctcagcttaggtgtattcttcttgtactaggataaagcctctctgacctcttcattaaggcctaagtatacagtatggtatatgacaagcaggaccttcctctcctccccctgtatcttcccaaactacaaaaacagaaagcccccaaccttctcacccctgcctcacacaaatccccacagtggactgtt

SEQ ID NO: 419409 - DNA, 475 bp, Homo sapiens
tgaaatgtatatccttccatagatatatataccttttgtagatacatacctttcatcttaaaggaattatgccttgtaaaagggtataattcctttaatatgaaaatcagattcaacttctgtgtgctttttaagggcaaatataagtgagcaaataaatttgtgtggattatttagaaagtgtagatataaataattttcaactatgctttagaacactctcccactctgggaagaaaattttagaaaaaggataacccctgcatttctttccattagaagtacatgatcaaaagacaaagtccctttttcccttgactgtgacataacatgtccctcataggcaactgaacagataaaaaatccagacgatgcttagtaatttcctgcttcccctttagtgcacagtgtattatcagtatgttttgccctctttatttaatatcttgctgaattaaattatctcatcaggttt

SEQ ID NO: 419410 - DNA, 1652 bp, Homo sapiens
atataatgtcactaacagtaagtgctgtgctaaacaaaagccaggatggctacagcaagccggaggggagctgagaattagatgtaaattctgagggatgggaagggccctagattttagggcgttgtgcagaagagtaaccagatctgctctacgtttcaggaaaggaaaaaaaaattccctctggctgcggttccgagaatagcctggaaggaggcaggggtcccggctggagaagcgtggctccggggtggggcgtgcagggctagcccgggcgggggacgctgcccaacaagcaggtttgcggagactcacaccttagattctgagtttttaagcttgtttcctcagagcagggaactcacgaacgtttcgtgagcacctacggtatgcagggtacggtgcggagccctagcgtcactgacgaccgggacagccgagcagctgcaggatccgtcgtgttccccagcaattttaatatttaaaaattcgttactgttgctgttacttgttttctatgtattggatgtcttcgtgaagaaccctcaaaagtgcaacgaactcctccctgccagagggcggccgcgcgctctgagtacagcttcccgcggagccggccaggtcctccagggcaccgagaaagccggccagaacggcggcgccctatcccggccgcagcgatgtctgacggcgccccggaactgacggtctggtacgcaggggcgctcggcggcaacggcggctttaaacgtcatcgcgggcgcgacgcctgagggacagtctggggtttggctgtccggacggtgcagcggcgaggccggccgcgaagatgccagtggcggtgatggcggaaagcgcctttagtttcaaaaagttgctggatcagtgcgagaaccaggagctcgaggcccctggaggaattgctacacccccagtgtatggtcagcttctagctttatatttgctccataatgacatgaataatgcaagatatctttggaaaagaataccacctgctataaaatctgcaaattctgaacttgggggaatttggtcagtaggacaaagaatctggcagagagatttccctgggatctatacaaccatcaacgctcaccagtggtctgagacggtccagccaattatggaagcacttagagatgcaacaaggagacgcgcctttgccctggtctctcaagcgtatacttcaatcatcgccgatgattttgcagcctttgttggacttcctgtagaagaggctgtgaaaggcatattagaacaaggatggcaagctgattccaccacaagaatggttctgcccagaaagccagttgcaggggccctggatgtttcctttaacaagtttattcccttatcagagcctgctccagttcccccaatacccaatgaacagcagttagccagactgacggattatgtggctttccttgaaaactgatttatcactctgagttcaagattcatcttcagaatcctgtatactgacaaacgtagaaatgtaaagtttgtattttcaatttattggatggcttaagcacctcagcattccttactatgtgataaaatacatatagaatataagatatactatatacattttgtccataaacgttatgctgaatagttgttga

SEQ ID NO: 419411 - DNA, 2658 bp, Homo sapiens
atataatgtcactaacagtaagtgctgtgctaaacaaaagccaggatggctacagcaagccggaggggagctgagaattagatgtaaattctgagggatgggaagggccctagattttagggcgttgtgcagaagagtaaccagatctgctctacgtttcaggaaaggaaaaaaaaattccctctggctgcggttccgagaatagcctggaaggaggcaggggtcccggctggagaagcgtggctccggggtggggcgtgcagggctagcccgggcgggggacgctgcccaacaagcaggtttgcggagactcacaccttagattctgagtttttaagcttgtttcctcagagcagggaactcacgaacgtttcgtgagcacctacggtatgcagggtacggtgcggagccctagcgtcactgacgaccgggacagccgagcagctgcaggatccgtcgtgttccccagcaattttaatatttaaaaattcgttactgttgctgttacttgttttctatgtattggatgtcttcgtgaagaaccctcaaaagtgcaacgaactcctccctgccagagggcggccgcgcgctctgagtacagcttcccgcggagccggccaggtcctccagggcaccgagaaagccggccagaacggcggcgccctatcccggccgcagcgatgtctgacggcgccccggaactgacggtctggtacgcaggggcgctcggcggcaacggcggctttaaacgtcatcgcgggcgcgacgcctgagggacagtctggggtttggctgtccggacggtgcagcggcgaggccggccgcgaagatgccagtggcggtgatggcggaaagcgcctttagtttcaaaaagttgctggatcagtgcgagaaccaggagctcgaggcccctggaggaattgctacacccccagtgtatggtcagcttctagctttatatttgctccataatgacatgaataatgcaagatatctttggaaaagaataccacctgctataaaatctgcaaattctgaacttgggggaatttggtcagtaggacaaagaatctggcagagagatttccctgggatctatacaaccatcaacgctcaccagtggtctgagacggtccagccaattatggaagcacttagagatgcaacaaggagacgcgcctttgccctggtctctcaagcgtatacttcaatcatcgccgatgattttgcagcctttgttggacttcctgtagaagaggctgtgaaaggcatattagaacaaggatggcaagctgattccaccacaagaatggttctgcccagaaagccagttgcaggggccctggatgtttcctttaacaagtttattcccttatcagagcctgctccagttcccccaatacccaatgaacagcagttagccagactgacggattatgtggctttccttgaaaactgatttatcactctgagttcaagattcatcttcagaatcctgtatactgacaaacgtagaaatgtaaagtttgtattttcaatttattggatggcttaagcacctcagcattccttactatgtgataaaatacatatagaatataagatatactatatacattttgtccataaacgttatgctgaatagttgttgaaacagttctcattttgtagtatttaataatctggatggagcctgtcagtattacagttagttttctagtgactcataaaataagatttcctgtttcatgtagaatagtgtttgtcaactgtcttttctctgtcccagcacatgccgtactcttatatgtaccattggttgataattataatgattcatttggacttgaagaaagattgtccccaggcacagtatctgaatcactggggattatgattcaccctctttggagaacatgctctcttttcaccccccacctcctgagagccactaatgtaagatacagaaacatagctgaggaacaaatagaccatttccatactaaaccagtttgttaactttagattttttccaatagtgtgagtatatccattgctggcagtggagggcttgccatgaaaatgcaacttatttaagacatttatgagacatattaacttgtgctgtcgccttttagaaggagaaacttaagtgtggaatgcattatatgggcaaagaagctatgaagatacatgatacactttgtacaactatcctgcagcccattggttgcttatatttatcgcttggctcaagttctgccctttggagaaatactgagcaagtctttcattctctgtgtgacagccctctgaatatttgaagttgtttgttgtaacttaaggttataacagcccttagttcatttactctgcatttgttcaataaatatttaactgaattcttcaattatttcatctaagatagtttctggaaatttcactctcgatctttctgtggacacaatctattttgtcattgtgtctatatgaatctcttaagtagaaatgagttgtatggtgaatctgtgtagtgataattatataatttatttattttgaatgcattatagtggctatttcagtttttcttaacatcatgcgacccctttcgcatgcactttacttatcctcctctgtcactcctatataatccct

SEQ ID NO: 419412 - DNA, 2364 bp, Homo sapiens
atataatgtcactaacagtaagtgctgtgctaaacaaaagccaggatggctacagcaagccggaggggagctgagaattagatgtaaattctgagggatgggaagggccctagattttagggcgttgtgcagaagagtaaccagatctgctctacgtttcaggaaaggaaaaaaaaattccctctggctgcggttccgagaatagcctggaaggaggcaggggtcccggctggagaagcgtggctccggggtggggcgtgcagggctagcccgggcgggggacgctgcccaacaagcaggtttgcggagactcacaccttagattctgagtttttaagcttgtttcctcagagcagggaactcacgaacgtttcgtgagcacctacggtatgcagggtacggtgcggagccctagcgtcactgacgaccgggacagccgagcagctgcaggatccgtcgtgttccccagcaattttaatatttaaaaattcgttactgttgctgttacttgttttctatgtattggatgtcttcgtgaagaaccctcaaaagtgcaacgaactcctccctgccagagggcggccgcgcgctctgagtacagcttcccgcggagccggccaggtcctccagggcaccgagaaagccggccagaacggcggcgccctatcccggccgcagcgatgtctgacggcgccccggaactgacggtctggtacgcaggggcgctcggcggcaacggcggctttaaacgtcatcgcgggcgcgacgcctgagggacagtctggggtttggctgtccggacggtgcagcggcgaggccggccgcgaagatgccagtggcggtgatggcggaaagcgcctttagtttcaaaaagttgctggatcagtgcgagaaccaggagctcgaggcccctggaggaattgctacacccccagtgtatggtcagcttctagctttatatttgctccataatgacatgaataatgcaagatatctttggaaaagaataccacctgctataaaatctgcaaattctgaacttgggggaatttggtcagtaggacaaagaatctggcagagagatttccctgggatctatacaaccatcaacgctcaccagtggtctgagacggtccagccaattatggaagcacttagagatgcaacaaggagacgcgcctttgccctggtctctcaagcgtatacttcaatcatcgccgatgattttgcagcctttgttggacttcctgtagaagaggctgtgaaaggcatattagaacaaggatggcaagctgattccaccacaagaatggttctgcccagaaagccagttgcaggggccctggatgtttcctttaacaagtttattcccttatcagagcctgctccagttcccccaatacccaatgaacagcagttagccagactgacggattatgtggctttccttgaaaactgatttatcactctgagttcaagattcatcttcagaatcctgtatactgacaaacgtagaaatgtaaagtttgtattttcaatttattggatggcttaagcacctcagcattccttactatgtgataaaatacatatagaatataagatatactatatacattttgtccataaacgttatgctgaatagttgttgaaacagttctcattttgtagtatttaataatctggatggagcctgtcagtattacagttagttttctagtgactcctgtcccagcacatgccgtactcttatatgtaccattggttgataattataatgattcatttggacttgaagaaagattgtccccaggcacagtatctgaatcactggggattatgattcaccctctttggagaacatgctctcttttcaccccccacctcctgagagccactaatgtaagatacagaaacatagctgaggaacaaatagaccatttccatactaaaccagtttgttaactttagattttttccaatagtgtgagtatatccattgctggcagtggagggcttgccatgaaaatgcaacttatttaagacatttatgagacatattaacttgtgctgtcgccttttagaaggagaaacttaagtgtggaatgcattatatgggcaaagaagctatgaagatacatgatacactttgtacaactatcctgcagcccattggttgcttatatttatcgcttggctcaagttctgccctttggagaaatactgagcaagtctttcattctctgtgtgacagccctctgaatatttgaagttgtttgttgtaacttaaggttataacagcccttagttcatttactctgcatttgttcaataaatatttaactgaattcttcaattatttca

SEQ ID NO: 419413 - DNA, 2067 bp, Homo sapiens
  misc_feature (2039)..(2039): n is a, c, g, or t
atataatgtcactaacagtaagtgctgtgctaaacaaaagccaggatggctacagcaagccggaggggagctgagaattagatgtaaattctgagggatgggaagggccctagattttagggcgttgtgcagaagagtaaccagatctgctctacgtttcaggaaaggaaaaaaaaattccctctggctgcggttccgagaatagcctggaaggaggcaggggtcccggctggagaagcgtggctccggggtggggcgtgcagggctagcccgggcgggggacgctgcccaacaagcaggtttgcggagactcacaccttagattctgagtttttaagcttgtttcctcagagcagggaactcacgaacgtttcgtgagcacctacggtatgcagggtacggtgcggagccctagcgtcactgacgaccgggacagccgagcagctgcaggatccgtcgtgttccccagcaattttaatatttaaaaattcgttactgttgctgttacttgttttctatgtattggatgtcttcgtgaagaaccctcaaaagtgcaacgaactcctccctgccagagggcggccgcgcgctctgagtacagcttcccgcggagccggccaggtcctccagggcaccgagaaagccggccagaacggcggcgccctatcccggccgcagcgatgtctgacggcgccccggaactgacggtctggtacgcaggggcgctcggcggcaacggcggctttaaacgtcatcgcgggcgcgacgcctgagggacagtctggggtttggctgtccggacggtgcagcggcgaggccggccgcgaagatgccagtggcggtgatggcggaaagcgcctttagtttcaaaaagttgctggatcagtgcgagaaccaggagctcgaggcccctggaggaattgctacacccccagtgtatggtcagcttctagctttatatttgctccataatgacatgaataatgcaagatatctttggaaaagaataccacctgctataaaatctgcaaattctgaacttgggggaatttggtcagtaggacaaagaatctggcagagagatttccctgggatctatacaaccatcaacgctcaccagtggtctgagacggtccagccaattatggaagcacttagagatgcaacaaggagacgcgcctttgccctggtctctcaagcgtatacttcaatcatcgccgatgattttgcagcctttgttggacttcctgtagaagaggctgtgaaaggcatattagaacaaggatggcaagctgattccaccacaagaatggttctgcccagaaagccagttgcaggggccctggatgtttcctttaacaagtttattcccttatcagagcctgctccagttcccccaatacccaatgaacagcagttagccagactgacggattatgtggctttccttgaaaactgatttatcactctgagttcaagattcatcttcagaatcctgtatactgacaaacgtagaaatgtaaagtttgtattttcaatttattggatggcttaagcacctcagcattccttactatgtgataaaatacatatagaatataagatatactatatacattttgtccataaacgttatgctgaatagttgttgaaacagttctcattttgtagtatttaataatctggatggagcctgtcagtattacagttagttttctagtgactcataaaataagatttcctgtttcatgtagaatagtgtttgtcaactgtcttttctctgtcccagcacatgccgtactcttatatgtaccattggttgataattataatgattcatttggacttgaagaaagattgtccccaggcacagtatctgaatcactggggattatgattcaccctctttggagaacatgctctcttttcaccccccacctcctgagagccactaatgtaagatacagaaacatagctgaggaacaaatagaccatttccatactaaaccagtttgttaacaaaaaaaaataaccaaaanaaagaaaatatccatagctaacaaaaaa

SEQ ID NO: 419414 - DNA, 2483 bp, Homo sapiens
atataatgtcactaacagtaagtgctgtgctaaacaaaagccaggatggctacagcaagccggaggggagctgagaattagatgtaaattctgagggatgggaagggccctagattttagggcgttgtgcagaagagtaaccagatctgctctacgtttcaggaaaggaaaaaaaaattccctctggctgcggttccgagaatagcctggaaggaggcaggggtcccggctggagaagcgtggctccggggtggggcgtgcagggctagcccgggcgggggacgctgcccaacaagcaggtttgcggagactcacaccttagattctgagtttttaagcttgtttcctcagagcagggaactcacgaacgtttcgtgagcacctacggtatgcagggtacggtgcggagccctagcgtcactgacgaccgggacagccgagcagctgcaggatccgtcgtgttccccagcaattttaatatttaaaaattcgttactgttgctgttacttgttttctatgtattggatgtcttcgtgaagaaccctcaaaagtgcaacgaactcctccctgccagagggcggccgcgcgctctgagtacagcttcccgcggagccggccaggtcctccagggcaccgagaaagccggccagaacggcggcgccctatcccggccgcagcgatgtctgacggcgccccggaactgacggtctggtacgcaggggcgctcggcggcaacggcggctttaaacgtcatcgcgggcgcgacgcctgagggacagtctggggtttggctgtccggacggtgcagcggcgaggccggccgcgaagatgccagtggcggtgatggcggaaagcgcctttagtttcaaaaagttgctggatcagtgcgagaaccaggagctcgaggacgcttgatgtaatgggcagaatcagaatgcttcaggaatctgtcgaatttgtttcttataatagcccctggaggaattgctacacccccagtgtatggtcagcttctagctttatatttgctccataatgacatgaataatgcaagatatctttggaaaagaataccacctgctataaaatctgcaaattctgaacttgggggaatttggtcagtaggacaaagaatctggcagagagatttccctgggatctatacaaccatcaacgctcaccagtggtctgagacggtccagccaattatggaagcacttagagatgcaacaaggagacgcgcctttgccctggtctctcaagcgtatacttcaatcatcgccgatgattttgcagcctttgttggacttcctgtagaagaggctgtgaaaggcatattagaacaaggatggcaagctgattccaccacaagaatggttctgcccagaaagccagttgcaggggccctggatgtttcctttaacaagtttattcccttatcagagcctgctccagttcccccaatacccaatgaacagcagttagccagactgacggattatgtggctttccttgaaaactgatttatcactctgagttcaagattcatcttcagaatcctgtatactgacaaacgtagaaatgtaaagtttgtattttcaatttattggatggcttaagcacctcagcattccttactatgtgataaaatacatatagaatataagatatactatatacattttgtccataaacgttatgctgaatagttgttgaaacagttctcattttgtagtatttaataatctggatggagcctgtcagtattacagttagttttctagtgactcataaaataagatttcctgtttcatgtagaatagtgtttgtcaactgtcttttctctgtcccagcacatgccgtactcttatatgtaccattggttgataattataatgattcatttggacttgaagaaagattgtccccaggcacagtatctgaatcactggggattatgattcaccctctttggagaacatgctctcttttcaccccccacctcctgagagccactaatgtaagatacagaaacatagctgaggaacaaatagaccatttccatactaaaccagtttgttaactttagattttttccaatagtgtgagtatatccattgctggcagtggagggcttgccatgaaaatgcaacttatttaagacatttatgagacatattaacttgtgctgtcgccttttagaaggagaaacttaagtgtggaatgcattatatgggcaaagaagctatgaagatacatgatacactttgtacaactatcctgcagcccattggttgcttatatttatcgcttggctcaagttctgccctttggagaaatactgagcaagtctttcattctctgtgtgacagccctctgaatatttgaagttgtttgttgtaacttaaggttataacagcccttagttcatttactctgcatttgttcaataaatatttaactgaattcttcaattatttca

SEQ ID NO: 419415 - DNA, 2518 bp, Homo sapiens
atataatgtcactaacagtaagtgctgtgctaaacaaaagccaggatggctacagcaagccggaggggagctgagaattagatgtaaattctgagggatgggaagggccctagattttagggcgttgtgcagaagagtaaccagatctgctctacgtttcaggaaaggaaaaaaaaattccctctggctgcggttccgagaatagcctggaaggaggcaggggtcccggctggagaagcgtggctccggggtggggcgtgcagggctagcccgggcgggggacgctgcccaacaagcaggtttgcggagactcacaccttagattctgagtttttaagcttgtttcctcagagcagggaactcacgaacgtttcgtgagcacctacggtatgcagggtacggtgcggagccctagcgtcactgacgaccgggacagccgagcagctgcaggatccgtcgtgttccccagcaattttaatatttaaaaattcgttactgttgctgttacttgttttctatgtattggatgtcttcgtgaagaaccctcaaaagtgcaacgaactcctccctgccagagggcggccgcgcgctctgagtacagcttcccgcggagccggccaggtcctccagggcaccgagaaagccggccagaacggcggcgccctatcccggccgcagcgatgtctgacggcgccccggaactgacggtctggtacgcaggggcgctcggcggcaacggcggctttaaacgtcatcgcgggcgcgacgcctgagggacagtctggggtttggctgtccggacggtgcagcggcgaggccggccgcgaagatgccagtggcggtgatggcggaaagcgcctttagtttcaaaaagttgctggatcagtgcgagaaccaggagctcgaggcccctggaggaattgctacacccccagtgtatggtcagcttctagctttatatttgctccataatgacataaacttttatgacctctatttacttaacttcatatataatcaataaaacaaaagaagtgaaaagagaagattgcagccaagaggaattcgttacaaacatgaataatgcaagatatctttggaaaagaataccacctgctataaaatctgcaaattctgaacttgggggaatttggtcagtaggacaaagaatctggcagagagatttccctgggatctatacaaccatcaacgctcaccagtggtctgagacggtccagccaattatggaagcacttagagatgcaacaaggagacgcgcctttgccctggtctctcaagcgtatacttcaatcatcgccgatgattttgcagcctttgttggacttcctgtagaagaggctgtgaaaggcatattagaacaaggatggcaagctgattccaccacaagaatggttctgcccagaaagccagttgcaggggccctggatgtttcctttaacaagtttattcccttatcagagcctgctccagttcccccaatacccaatgaacagcagttagccagactgacggattatgtggctttccttgaaaactgatttatcactctgagttcaagattcatcttcagaatcctgtatactgacaaacgtagaaatgtaaagtttgtattttcaatttattggatggcttaagcacctcagcattccttactatgtgataaaatacatatagaatataagatatactatatacattttgtccataaacgttatgctgaatagttgttgaaacagttctcattttgtagtatttaataatctggatggagcctgtcagtattacagttagttttctagtgactcataaaataagatttcctgtttcatgtagaatagtgtttgtcaactgtcttttctctgtcccagcacatgccgtactcttatatgtaccattggttgataattataatgattcatttggacttgaagaaagattgtccccaggcacagtatctgaatcactggggattatgattcaccctctttggagaacatgctctcttttcaccccccacctcctgagagccactaatgtaagatacagaaacatagctgaggaacaaatagaccatttccatactaaaccagtttgttaactttagattttttccaatagtgtgagtatatccattgctggcagtggagggcttgccatgaaaatgcaacttatttaagacatttatgagacatattaacttgtgctgtcgccttttagaaggagaaacttaagtgtggaatgcattatatgggcaaagaagctatgaagatacatgatacactttgtacaactatcctgcagcccattggttgcttatatttatcgcttggctcaagttctgccctttggagaaatactgagcaagtctttcattctctgtgtgacagccctctgaatatttgaagttgtttgttgtaacttaaggttataacagcccttagttcatttactctgcatttgttcaataaatatttaactgaattcttcaattatttca

SEQ ID NO: 419416 - DNA, 1684 bp, Homo sapiens
tggtctggctgtacgcatgtgtgcaggtagagaagcaagacaacggatgatgctcaggtgtcggggaatcacagaaagcgtctttatgtgacaaaaaaggtagctagcttccagtgagagcaagccaccgtgactcaaaggccctgtgggaggaaagtatagctatactaccccgagtgatatggatcgacgtgtcttgagtttaatctatagctctcgtttattaccattaaatggtcgcaatcatatctggagcgagctatcatataccgaacttagctactcatgatcttgcaaattctgaacttgggggaatttggtcagtaggacaaagaatctggcagagagatttccctgggatctatacaaccatcaacgctcaccagtggtctgagacggtccagccaattatggaagcacttagagatgcaacaaggagacgcgcctttgccctggtctctcaagcgtatacttcaatcatcgccgatgattttgcagcctttgttggacttcctgtagaagaggctgtgaaaggcatattagaacaaggatggcaagctgattccaccacaagaatggttctgcccagaaagccagttgcaggggccctggatgtttcctttaacaagtttattcccttatcagagcctgctccagttcccccaatacccaatgaacagcagttagccagactgacggattatgtggctttccttgaaaactgatttatcactctgagttcaagattcatcttcagaatcctgtatactgacaaacgtagaaatgtaaagtttgtattttcaatttattggatggcttaagcacctcagcattccttactatgtgataaaatacatatagaatataagatatactatatacattttgtccataaacgttatgctgaatagttgttgaaacagttctcattttgtagtatttaataatctggatggagcctgtcagtattacagttagttttctagtgactcataaaataagatttcctgtttcatgtagaatagtgtttgtcaactgtcttttctctgtcccagcacatgccgtactcttatatgtaccattggttgataattataatgattcatttggacttgaagaaagattgtccccaggcacagtatctgaatcactggggattatgattcaccctctttggagaacatgctctcttttcaccccccacctcctgagagccactaatgtaagatacagaaacatagctgaggaacaaatagaccatttccatactaaaccagtttgttaactttagattttttccaatagtgtgagtatatccattgctggcagtggagggcttgccatgaaaatgcaacttatttaagacatttatgagacatattaacttgtgctgtcgccttttagaaggagaaacttaagtgtggaatgcattatatgggcaaagaagctatgaagatacatgatacactttgtacaactatcctgcagcccattggttgcttatatttatcgcttggctcaagttctgccctttggagaaatactgagcaagtctttcattctctgtgtgacagccctctgaatatttgaagttgtttgttgtaacttaaggttataacagcccttagttcatttactctgcatttgttcaataaatatttaactgaattcttcaattatttca

SEQ ID NO: 419417 - DNA, 2329 bp, Homo sapiens
atataatgtcactaacagtaagtgctgtgctaaacaaaagccaggatggctacagcaagccggaggggagctgagaattagatgtaaattctgagggatgggaagggccctagattttagggcgttgtgcagaagagtaaccagatctgctctacgtttcaggaaaggaaaaaaaaattccctctggctgcggttccgagaatagcctggaaggaggcaggggtcccggctggagaagcgtggctccggggtggggcgtgcagggctagcccgggcgggggacgctgcccaacaagcaggtttgcggagactcacaccttagattctgagtttttaagcttgtttcctcagagcagggaactcacgaacgtttcgtgagcacctacggtatgcagggtacggtgcggagccctagcgtcactgacgaccgggacagccgagcagctgcaggatccgtcgtgttccccagcaattttaatatttaaaaattcgttactgttgctgttacttgttttctatgtattggatgtcttcgtgaagaaccctcaaaagtgcaacgaactcctccctgccagagggcggccgcgcgctctgagtacagcttcccgcggagccggccaggtcctccagggcaccgagaaagccggccagaacggcggcgccctatcccggccgcagcgatgtctgacggcgccccggaactgacggtctggtacgcaggggcgctcggcggcaacggcggctttaaacgtcatcgcgggcgcgacgcctgagggacagtctggggtttggctgtccggacggtgcagcggcgaggccggccgcgaagatgccagtggcggtgatggcggaaagcgcctttagtttcaaaaagttgctggatcagtgcgagaaccaggagctcgaggcccctggaggaattgctacacccccagtgtatggtcagcttctagctttatatttgctccataatgacatgaatctggcagagagatttccctgggatctatacaaccatcaacgctcaccagtggtctgagacggtccagccaattatggaagcacttagagatgcaacaaggagacgcgcctttgccctggtctctcaagcgtatacttcaatcatcgccgatgattttgcagcctttgttggacttcctgtagaagaggctgtgaaaggcatattagaacaaggatggcaagctgattccaccacaagaatggttctgcccagaaagccagttgcaggggccctggatgtttcctttaacaagtttattcccttatcagagcctgctccagttcccccaatacccaatgaacagcagttagccagactgacggattatgtggctttccttgaaaactgatttatcactctgagttcaagattcatcttcagaatcctgtatactgacaaacgtagaaatgtaaagtttgtattttcaatttattggatggcttaagcacctcagcattccttactatgtgataaaatacatatagaatataagatatactatatacattttgtccataaacgttatgctgaatagttgttgaaacagttctcattttgtagtatttaataatctggatggagcctgtcagtattacagttagttttctagtgactcataaaataagatttcctgtttcatgtagaatagtgtttgtcaactgtcttttctctgtcccagcacatgccgtactcttatatgtaccattggttgataattataatgattcatttggacttgaagaaagattgtccccaggcacagtatctgaatcactggggattatgattcaccctctttggagaacatgctctcttttcaccccccacctcctgagagccactaatgtaagatacagaaacatagctgaggaacaaatagaccatttccatactaaaccagtttgttaactttagattttttccaatagtgtgagtatatccattgctggcagtggagggcttgccatgaaaatgcaacttatttaagacatttatgagacatattaacttgtgctgtcgccttttagaaggagaaacttaagtgtggaatgcattatatgggcaaagaagctatgaagatacatgatacactttgtacaactatcctgcagcccattggttgcttatatttatcgcttggctcaagttctgccctttggagaaatactgagcaagtctttcattctctgtgtgacagccctctgaatatttgaagttgtttgttgtaacttaaggttataacagcccttagttcatttactctgcatttgttcaataaatatttaactgaattcttcaattatttca

SEQ ID NO: 419418 - DNA, 2370 bp, Homo sapiens
atataatgtcactaacagtaagtgctgtgctaaacaaaagccaggatggctacagcaagccggaggggagctgagaattagatgtaaattctgagggatgggaagggccctagattttagggcgttgtgcagaagagtaaccagatctgctctacgtttcaggaaaggaaaaaaaaattccctctggctgcggttccgagaatagcctggaaggaggcaggggtcccggctggagaagcgtggctccggggtggggcgtgcagggctagcccgggcgggggacgctgcccaacaagcaggtttgcggagactcacaccttagattctgagtttttaagcttgtttcctcagagcagggaactcacgaacgtttcgtgagcacctacggtatgcagggtacggtgcggagccctagcgtcactgacgaccgggacagccgagcagctgcaggatccgtcgtgttccccagcaattttaatatttaaaaattcgttactgttgctgttacttgttttctatgtattggatgtcttcgtgaagaaccctcaaaagtgcaacgaactcctccctgccagagggcggccgcgcgctctgagtacagcttcccgcggagccggccaggtcctccagggcaccgagaaagccggccagaacggcggcgccctatcccggccgcagcgatgtctgacggcgccccggaactgacggtctggtacgcaggggcgctcggcggcaacggcggctttaaacgtcatcgcgggcgcgacgcctgagggacagtctggggtttggctgtccggacggtgcagcggcgaggccggccgcgaagatgccagtggcggtgatggcggaaagcgcctttagtttcaaaaagttgctggatcagtgcgagaaccaggagctcgaggcccctggaggaattgctacacccccagtgtatggtcagcttctagctttatatttgctccataatgacatgaataatgcaagatatctttggaaaagaataccacctgctataaaatctgcaaattctgaacttgggggaatttggtcagtaggacaaagaatctggcagagagatttccctgggatctatacaaccatcaacgctcaccagtggtctgagacggtccagccaattatggaagcacttagagatgcaacaaggagacgcgcctttgccctggtctctcaagcgtatacttcaatcatcgccgatgattttgcagcctttgttggacttcctgtagaagaggctgtgaaaggcatattagaacaaggatggcaagctgattccaccacaagaatggttctgcccagaaagccagagcctgctccagttcccccaatacccaatgaacagcagttagccagactgacggattatgtggctttccttgaaaactgatttatcactctgagttcaagattcatcttcagaatcctgtatactgacaaacgtagaaatgtaaagtttgtattttcaatttattggatggcttaagcacctcagcattccttactatgtgataaaatacatatagaatataagatatactatatacattttgtccataaacgttatgctgaatagttgttgaaacagttctcattttgtagtatttaataatctggatggagcctgtcagtattacagttagttttctagtgactcataaaataagatttcctgtttcatgtagaatagtgtttgtcaactgtcttttctctgtcccagcacatgccgtactcttatatgtaccattggttgataattataatgattcatttggacttgaagaaagattgtccccaggcacagtatctgaatcactggggattatgattcaccctctttggagaacatgctctcttttcaccccccacctcctgagagccactaatgtaagatacagaaacatagctgaggaacaaatagaccatttccatactaaaccagtttgttaactttagattttttccaatagtgtgagtatatccattgctggcagtggagggcttgccatgaaaatgcaacttatttaagacatttatgagacatattaacttgtgctgtcgccttttagaaggagaaacttaagtgtggaatgcattatatgggcaaagaagctatgaagatacatgatacactttgtacaactatcctgcagcccattggttgcttatatttatcgcttggctcaagttctgccctttggagaaatactgagcaagtctttcattctctgtgtgacagccctctgaatatttgaagttgtttgttgtaacttaaggttataacagcccttagttcatttactctgcatttgttcaataaatatttaactgaattcttcaattatttca

SEQ ID NO: 419419 - DNA, 1111 bp, Homo sapiens
ggtaggtgttggggccaaagctttgttactgtggtatgtaacatgaagtgtgtttgtttctttaacatacagagcctgctccagttcccccaatacccaatgaacagcagttagccagactgacggattatgtggctttccttgaaaactgatttatcactctgagttcaagattcatcttcagaatcctgtatactgacaaacgtagaaatgtaaagtttgtattttcaatttattggatggcttaagcacctcagcattccttactatgtgataaaatacatatagaatataagatatactatatacattttgtccataaacgttatgctgaatagttgttgaaacagttctcattttgtagtatttaataatctggatggagcctgtcagtattacagttagttttctagtgactcataaaataagatttcctgtttcatgtagaatagtgtttgtcaactgtcttttctctgtcccagcacatgccgtactcttatatgtaccattggttgataattataatgattcatttggacttgaagaaagattgtccccaggcacagtatctgaatcactggggattatgattcaccctctttggagaacatgctctcttttcaccccccacctcctgagagccactaatgtaagatacagaaacatagctgaggaacaaatagaccatttccatactaaaccagtttgttaactttagattttttccaatagtgtgagtatatccattgctggcagtggagggcttgccatgaaaatgcaacttatttaagacatttatgagacatattaacttgtgctgtcgccttttagaaggagaaacttaagtgtggaatgcattatatgggcaaagaagctatgaagatacatgatacactttgtacaactatcctgcagcccattggttgcttatatttatcgcttggctcaagttctgccctttggagaaatactgagcaagtctttcattctctgtgtgacagccctctgaatatttgaagttgtttgttgtaacttaaggttataacagcccttagttcatttactctgcatttgttcaataaatatttaactgaattcttcaattatttca

SEQ ID NO: 419420 - DNA, 2699 bp, Homo sapiens
atataatgtcactaacagtaagtgctgtgctaaacaaaagccaggatggctacagcaagccggaggggagctgagaattagatgtaaattctgagggatgggaagggccctagattttagggcgttgtgcagaagagtaaccagatctgctctacgtttcaggaaaggaaaaaaaaattccctctggctgcggttccgagaatagcctggaaggaggcaggggtcccggctggagaagcgtggctccggggtggggcgtgcagggctagcccgggcgggggacgctgcccaacaagcaggtttgcggagactcacaccttagattctgagtttttaagcttgtttcctcagagcagggaactcacgaacgtttcgtgagcacctacggtatgcagggtacggtgcggagccctagcgtcactgacgaccgggacagccgagcagctgcaggatccgtcgtgttccccagcaattttaatatttaaaaattcgttactgttgctgttacttgttttctatgtattggatgtcttcgtgaagaaccctcaaaagtgcaacgaactcctccctgccagagggcggccgcgcgctctgagtacagcttcccgcggagccggccaggtcctccagggcaccgagaaagccggccagaacggcggcgccctatcccggccgcagcgatgtctgacggcgccccggaactgacggtctggtacgcaggggcgctcggcggcaacggcggctttaaacgtcatcgcgggcgcgacgcctgagggacagtctggggtttggctgtccggacggtgcagcggcgaggccggccgcgaagatgccagtggcggtgatggcggaaagcgcctttagtttcaaaaagttgctggatcagtgcgagaaccaggagctcgaggcccctggaggaattgctacacccccagtgtatggtcagcttctagctttatatttgctccataatgacatgaataatgcaagatatctttggaaaagaataccacctgctataaaatctgcaaattctgaacttgggggaatttggtcagtaggacaaagaatctggcagagagatttccctgggatctatacaaccatcaacgctcaccagtggtctgagacggtccagccaattatggaagcacttagagatgcaacaaggagacgcgcctttgccctggtctctcaagcgtatacttcaatcatcgccgatgattttgcagcctttgttggacttcctgtagaagaggctgtgaaaggcatattagaacaaggatggcaagctgattccaccacaagaatggttctgcccagaaagccagttgcaggggccctggatgtttcctttaacaagtttattcccttatcagagcctgctccagttcccccaatacccaatgaacagcagttagccagactgacggattatgtggctttccttgaaaactgatttatcactctgagttcaagattcatcttcagaatcctgtatactgacaaacgtagaaatttgaggaaatgggaattcaagaagtcagaggatcaggagagtgatcaagagaatgacagtgccagtttttttaacttccaggtattaagtacaaattgtatccatggttattttttaaaagcagattagagtcaatccaaatattcattaataggggattgtttgaataaacagcagtgtagactacgcaggtgtaaaaggagtgaagatctctatactaaactggaatgatctccagagtgagaacatagaaagcacatgtagtttatatggttattttgagggtaacaaaaggagaatgattacaattatatatatgtacatatttccttatatttcaaaactaagcaattgggggatatatacaaaatgaatataatagttccctaaagaggaaggagaggacagtgaactactacatagagaaaaaataatctcaagtgatcaaacacaatatttcaattttacattgtcagtgggatatacactaaggacagaaaaaaatcttagactaatgaatgtggtttttcatgattaatttcacaaaatcttgatatcttttttattattaaaagtatagattaaattaataatcatgtaacattagaccccagtaatcttaaatttgacatggaaacctcattatatgctttatttttctttgtaaacagtaaatatttcccactcctgtctacatgaaaaggtctagagtaattacagttcagtaacaatgagcaccactagtacccagatggtgttctttcattttcatttgcaattaaaaggaatcagaacttatttgcaaaacagctaatagttccagggcagtaagtgtacaagttcatatctggtacaagatgtccaggattcaaggaggctcttaaagacttgggattctgtcaaagggttatacaagccaacttgaagggatttctacaggccatgtaaaaatgagacagtttgagcatgaaatatttgtatatgtgtctgtttttaactcttaataacctcatcactgtacaagaaaggcagggtaagtgcttgatttcacttccctttattatcagttctcaggacaaattgatatgctgccaatctctaaagcaacaaaatcgaacctgtagggtagtcaaaaagctcatgctggaaaattccaccgaataaagataaaagttagaaa

SEQ ID NO: 419421 - DNA, 1483 bp, Homo sapiens
atataatgtcactaacagtaagtgctgtgctaaacaaaagccaggatggctacagcaagccggaggggagctgagaattagatgtaaattctgagggatgggaagggccctagattttagggcgttgtgcagaagagtaaccagatctgctctacgtttcaggaaaggaaaaaaaaattccctctggctgcggttccgagaatagcctggaaggaggcaggggtcccggctggagaagcgtggctccggggtggggcgtgcagggctagcccgggcgggggacgctgcccaacaagcaggtttgcggagactcacaccttagattctgagtttttaagcttgtttcctcagagcagggaactcacgaacgtttcgtgagcacctacggtatgcagggtacggtgcggagccctagcgtcactgacgaccgggacagccgagcagctgcaggatccgtcgtgttccccagcaattttaatatttaaaaattcgttactgttgctgttacttgttttctatgtattggatgtcttcgtgaagaaccctcaaaagtgcaacgaactcctccctgccagagggcggccgcgcgctctgagtacagcttcccgcggagccggccaggtcctccagggcaccgagaaagccggccagaacggcggcgccctatcccggccgcagcgatgtctgacggcgccccggaactgacggtctggtacgcaggggcgctcggcggcaacggcggctttaaacgtcatcgcgggcgcgacgcctgagggacagtctggggtttggctgtccggacggtgcagcggcgaggccggccgcgaagatgccagtggcggtgatggcggaaagcgcctttagtttcaaaaagttgctggatcagtgcgagaaccaggagctcgaggcccctggaggaattgctacacccccagtgtatggtcagcttctagctttatatttgctccataatgacattgtaagtatgtttaacctaaagctaagagcaacaggtttctcaaagttatatggaaatatttctgcactgaagtagcaccactaaacataggcacaacgagctaccttttttattacagtaattgttaacgtctatttcctattgaatcataggttaatgaattatgattaggtcgtcattgtcttacatatactttctagaaaacatttcaatttattatgacaaattacgtcagtaaattcatttaacctttttgtctttttaagaaacttttatgacctctatttacttaacttcatatataatcaataaaacaaaagaagtgaaaagagaagattgcagccaagaggaattcgttacaaacatgtatgagattttttaagttttttttgtttttaattattcctatttcacgttcacatggaaaagtcagaaagcataactactctagcctgagcaaccaaagtgagaccctgtctcaaaaggaaagcataactgcaaaaa

SEQ ID NO: 419422 - DNA, 2418 bp, Homo sapiens
atataatgtcactaacagtaagtgctgtgctaaacaaaagccaggatggctacagcaagccggaggggagctgagaattagatgtaaattctgagggatgggaagggccctagattttagggcgttgtgcagaagagtaaccagatctgctctacgtttcaggaaaggaaaaaaaaattccctctggctgcggttccgagaatagcctggaaggaggcaggggtcccggctggagaagcgtggctccggggtggggcgtgcagggctagcccgggcgggggacgctgcccaacaagcaggtttgcggagactcacaccttagattctgagtttttaagcttgtttcctcagagcagggaactcacgaacgtttcgtgagcacctacggtatgcagggtacggtgcggagccctagcgtcactgacgaccgggacagccgagcagctgcaggatccgtcgtgttccccagcaattttaatatttaaaaattcgttactgttgctgttacttgttttctatgtattggatgtcttcgtgaagaaccctcaaaagtgcaacgaactcctccctgccagagggcggccgcgcgctctgagtacagcttcccgcggagccggccaggtcctccagggcaccgagaaagccggccagaacggcggcgccctatcccggccgcagcgatgtctgacggcgccccggaactgacggtctggtacgcaggggcgctcggcggcaacggcggctttaaacgtcatcgcgggcgcgacgcctgagggacagtctggggtttggctgtccggacggtgcagcggcgaggccggccgcgaagatgccagtggcggtgatggcggaaagcgcctttagtttcaaaaagttgctggatcagtgcgagaaccaggagctcgaggcccctggaggaattgctacacccccagtgtatggtcagcttctagctttatatttgctccataatgacatgaataatgcaagatatctttggaaaagaataccacctgctataaaatctgcaaattctgaacttgggggaatttggtcagtaggacaaagaatctggcagagagatttccctgggatctatacaaccatcaacgctcaccagtggtctgagacggtccagccaattatggaagcacttagagatgcaacaaggagacgcgcctttgccctggtctctcaagcgtatacttcaatcatcgccgatgattttgcagcctttgttggacttcctgtagaagaggctgtgaaaggcatattagaacaaggatggcaagctgattccaccacaagaatggttctgcccagaaagccagttgcaggggccctggatgtttcctttaacaagtttattcccttatcagagcctgctccagttcccccaatacccaatgaacagcagttagccagactgacggattatgtggctttccttgaaaactgatttatcactctgagttcaagattcatcttcagaatcctgtatactgacaaacgtagaaatgtaaagtttgtattttcaatttattggatggcttaagcacctcagcattccttactatgtgataaaatacatatagaatataagatatactatatacattttgtccataaacgttatgctgaatagttgttgaaacagttctcattttgtagtatttaataatctggatggagcctgtcagtattacagttagttttctagtgactcataaaataagatttcctgtttcatgtagaatagtgtttgtcaactgtcttttctctgtcccagcacatgccgtactcttatatgtaccattggttgataattataatgattcatttggacttgaagaaagattgtccccaggcacagtatctgaatcactggggattatgattcaccctctttggagaacatgctctcttttcaccccccacctcctgagagccactaatgtaagatacagaaacatagctgaggaacaaatagaccatttccatactaaaccagtttgttaactttagattttttccaatagtgtgagtatatccattgctggcagtggagggcttgccatgaaaatgcaacttatttaagacatttatgagacatattaacttgtgctgtcgccttttagaaggagaaacttaagtgtggaatgcattatatgggcaaagaagctatgaagatacatgatacactttgtacaactatcctgcagcccattggttgcttatatttatcgcttggctcaagttctgccctttggagaaatactgagcaagtctttcattctctgtgtgacagccctctgaatatttgaagttgtttgttgtaacttaaggttataacagcccttagttcatttactctgcatttgttcaataaatatttaactgaattcttcaattatttca

SEQ ID NO: 419423 - DNA, 1572 bp, Homo sapiens
atataatgtcactaacagtaagtgctgtgctaaacaaaagccaggatggctacagcaagccggaggggagctgagaattagatgtaaattctgagggatgggaagggccctagattttagggcgttgtgcagaagagtaaccagatctgctctacgtttcaggaaaggaaaaaaaaattccctctggctgcggttccgagaatagcctggaaggaggcaggggtcccggctggagaagcgtggctccggggtggggcgtgcagggctagcccgggcgggggacgctgcccaacaagcaggtttgcggagactcacaccttagattctgagtttttaagcttgtttcctcagagcagggaactcacgaacgtttcgtgagcacctacggtatgcagggtacggtgcggagccctagcgtcactgacgaccgggacagccgagcagctgcaggatccgtcgtgttccccagcaattttaatatttaaaaattcgttactgttgctgttacttgttttctatgtattggatgtcttcgtgaagaaccctcaaaagtgcaacgaactcctccctgccagagggcggccgcgcgctctgagtacagcttcccgcggagccggccaggtcctccagggcaccgagaaagccggccagaacggcggcgccctatcccggccgcagcgatgtctgacggcgccccggaactgacggtctggtacgcaggggcgctcggcggcaacggcggctttaaacgtcatcgcgggcgcgacgcctgagggacagtctggggtttggctgtccggacggtgcagcggcgaggccggccgcgaagatgccagtggcggtgatggcggaaagcgcctttagtttcaaaaagttgctggatcagtgcgagaaccaggagctcgaggtaaccctttgcgtcgcgctgggagaaactgcggagtagtcttaggccctggggcggcaccagtttccagggtaacggggtctgaggctagcgggctttgggagctcacggggcgggcgtgggaggtggacgtgtggatccctgaccgccgcaacctgctccgaccgggcccggtctccccgaactcgccgggacctttttgttatgtgtcttcagcttgtgagcccgaaaaccctgtgcgtctttgctccagcacctaccgatgagctcatattaattaggcatctttccttcccagtatcgggttgggagagggtagtaaagtgggttttattaaagatcttggtatacacacacacactaacacacacaccgcaactcacacgcacaccaagaaaaatgtgaccattgtaacctttttttaactcacaaagcctttctcgtaatgttgtcaagttagcttgccattttgtcttcagtaagacagatgaaagttatgcagctgttaaagttaatgtttttcttagacacttaaaaagggtttatatcattagttttaaaattaaataaaggagacaacatccagaagcagcagctcactaatagataatagatactttccagttgagttaaaatggaaagaattgtctttgcaacgcagctgt

SEQ ID NO: 419424 - DNA, 2604 bp, Homo sapiens
atataatgtcactaacagtaagtgctgtgctaaacaaaagccaggatggctacagcaagccggaggggagctgagaattagatgtaaattctgagggatgggaagggccctagattttagggcgttgtgcagaagagtaaccagatctgctctacgtttcaggaaaggaaaaaaaaattccctctggctgcggttccgagaatagcctggaaggaggcaggggtcccggctggagaagcgtggctccggggtggggcgtgcagggctagcccgggcgggggacgctgcccaacaagcaggtttgcggagactcacaccttagattctgagtttttaagcttgtttcctcagagcagggaactcacgaacgtttcgtgagcacctacggtatgcagggtacggtgcggagccctagcgtcactgacgaccgggacagccgagcagctgcaggatccgtcgtgttccccagcaattttaatatttaaaaattcgttactgttgctgttacttgttttctatgtattggatgtcttcgtgaagaaccctcaaaagtgcaacgaactcctccctgccagagggcggccgcgcgctctgagtacagcttcccgcggagccggccaggtcctccagggcaccgagaaagccggccagaacggcggcgccctatcccggccgcagcgatgtctgacggcgccccggaactgacggtctggtacgcaggggcgctcggcggcaacggcggctttaaacgtcatcgcgggcgcgacgcctgagggacagtctggggtttggctgtccggacggtgcagcggcgaggccggccgcgaagatgccagtggcggtgatggcggaaagcgcctttagtttcaaaaagttgctggatcagtgcgagaaccaggagctcgaggcccctggaggaattgctacacccccagtgtatggtcagcttctagctttatatttgctccataatgacatgaataatgcaagatatctttggaaaagaataccacctgctataaaatctgcaaattctgaacttgggggaatttggtcagtaggacaaagaatctggcagagagatttccctgggatctatacaaccatcaacgctcaccagtggtctgagacggtccagccaattatggaagcacttagagatgcaacaaggagacgcgcctttgccctggtctctcaagcgtatacttcaatcatcgccgatgattttgcagcctttgttggacttcctgtagaagaggctgtgaaaggcatattagaacaaggatggcaagctgattccaccacaagaatggttctgcccagaaagccagttgcaggggccctggatgtttcctttaacaagtttattcccttatcagagcctgctccagttcccccaatacccaatgaacagcagttagccagactgacggattatgtggctttccttgaaaactgatttatcactctgagttcaagattcatcttcagaatcctgtatactgacaaacgtagaaatgtaaagtttgtattttcaatttattggatggcttaagcacctcagcattccttactatgtgataaaatacatatagaatataagatatactatatacattttgtccataaacgttatgctgaatagttgttgaaacagttctcattttgtagtatttaataatctggatggagcctgtcagtattacagttagttttctagtgactcataaaataagatttcctgtttcatgtagaatagtgtttgtcaactgtcttttctctgtcccagcacatgccgtactcttatatgtaccattggttgataattataatgattcatttggacttgaagaaagattgtccccaggcacagtatctgaatcactggggattatgattcaccctctttggagaacatgctctcttttcaccccccacctcctgagagccactaatgtaagatacagaaacatagctgaggaacaaatagaccatttccatactaaaccagtttgttaactttagattttttccaatagtgtgagtatatccattgctggcagtggagggcttgccatgaaaatgcaacttatttaagacatttatgagacatattaacttgtgctgtcgccttttagaaggagaaacttaagtgtggaatgcattatatgggcaaagaagctatgaagatacatgatacactttgtacaactatcctgcagcccattggttgcttatatttatcgcttggctcaagttctgccctttggagaaatactgagcaagtctttcattctctgtgtgacagccctctgaatatttgaagttgtttgttgtaacttaaggttataacagcccttagttcatttactctgcatttgttcaataaatatttaactgaattcttcaattatttcatttgtcattgtgtctatatgaatctcttaagtagaaatgagttgtatggtgaatctgtgtagtgataattatataatttatttattttgaatgcattatagtggctatttcagtttttcttaacatcatgcgacccctttcgcatgcactttacttatcctcctctgtcactcctatataatccct

SEQ ID NO: 419425 - DNA, 2364 bp, Homo sapiens
atataatgtcactaacagtaagtgctgtgctaaacaaaagccaggatggctacagcaagccggaggggagctgagaattagatgtaaattctgagggatgggaagggccctagattttagggcgttgtgcagaagagtaaccagatctgctctacgtttcaggaaaggaaaaaaaaattccctctggctgcggttccgagaatagcctggaaggaggcaggggtcccggctggagaagcgtggctccggggtggggcgtgcagggctagcccgggcgggggacgctgcccaacaagcaggtttgcggagactcacaccttagattctgagtttttaagcttgtttcctcagagcagggaactcacgaacgtttcgtgagcacctacggtatgcagggtacggtgcggagccctagcgtcactgacgaccgggacagccgagcagctgcaggatccgtcgtgttccccagcaattttaatatttaaaaattcgttactgttgctgttacttgttttctatgtattggatgtcttcgtgaagaaccctcaaaagtgcaacgaactcctccctgccagagggcggccgcgcgctctgagtacagcttcccgcggagccggccaggtcctccagggcaccgagaaagccggccagaacggcggcgccctatcccggccgcagcgatgtctgacggcgccccggaactgacggtctggtacgcaggggcgctcggcggcaacggcggctttaaacgtcatcgcgggcgcgacgcctgagggacagtctggggtttggctgtccggacggtgcagcggcgaggccggccgcgaagatgccagtggcggtgatggcggaaagcgcctttagtttcaaaaagttgctggatcagtgcgagaaccaggagctcgaggcccctggaggaattgctacacccccagtgtatggtcagcttctagctttatatttgctccataatgacatgaataatgcaagatatctttggaaaagaataccacctgctataaaatctgcaaattctgaacttgggggaatttggtcagtaggacaaagaatctggcagagagatttccctgggatctatacaaccatcaacgctcaccagtggtctgagacggtccagccaattatggaagcacttagagatgcaacaaggagacgcgcctttgccctggtctctcaagcgtatacttcaatcatcgccgatgattttgcagcctttgttggacttcctgtagaagaggctgtgaaaggcatattagaacaaggatggcaagctgattccaccacaagaatggttctgcccagaaagccagttgcaggggccctggatgtttcctttaacaagtttattcccttatcagagcctgctccagttcccccaatacccaatgaacagcagttagccagactgacggattatgtggctttccttgaaaactgatttatcactctgagttcaagattcatcttcagaatcctgtatactgacaaacgtagaaatgtaaagtttgtattttcaatttattggatggcttaagcacctcagcattccttactatgtgataaaatacatatagaatataagatatactatatacattttgtccataaacgttatgctgaatagttgttgaaacagttctcattttgtagtatttaataatctggatggagcctgtcagtattacagttagttttctagtgactcataaaataagatttcctgtttcatgtagaatagtgtttgtcaactgtcttttctctgtcccagcacatgccgtactcttatatgtaccattggttgataattataatgattcatttggacttgaagaaagattgtccccaggcacagtatctgaatcactggggattatgattcaccctctttggagaacatgctctcttttcaccccccacctcctgagagccactaatgtaagatacagaaacatagctgaggaacaaatagaccatttccatactaaaccagtttgttaactttagattttttccaatagtgtgagtatatccattgctggcagtggagggcttgccatgtttagaaggagaaacttaagtgtggaatgcattatatgggcaaagaagctatgaagatacatgatacactttgtacaactatcctgcagcccattggttgcttatatttatcgcttggctcaagttctgccctttggagaaatactgagcaagtctttcattctctgtgtgacagccctctgaatatttgaagttgtttgttgtaacttaaggttataacagcccttagttcatttactctgcatttgttcaataaatatttaactgaattcttcaattatttca

SEQ ID NO: 419426 - DNA, 2436 bp, Homo sapiens
atataatgtcactaacagtaagtgctgtgctaaacaaaagccaggatggctacagcaagccggaggggagctgagaattagatgtaaattctgagggatgggaagggccctagattttagggcgttgtgcagaagagtaaccagatctgctctacgtttcaggaaaggaaaaaaaaattccctctggctgcggttccgagaatagcctggaaggaggcaggggtcccggctggagaagcgtggctccggggtggggcgtgcagggctagcccgggcgggggacgctgcccaacaagcaggtttgcggagactcacaccttagattctgagtttttaagcttgtttcctcagagcagggaactcacgaacgtttcgtgagcacctacggtatgcagggtacggtgcggagccctagcgtcactgacgaccgggacagccgagcagctgcaggatccgtcgtgttccccagcaattttaatatttaaaaattcgttactgttgctgttacttgttttctatgtattggatgtcttcgtgaagaaccctcaaaagtgcaacgaactcctccctgccagagggcggccgcgcgctctgagtacagcttcccgcggagccggccaggtcctccagggcaccgagaaagccggccagaacggcggcgccctatcccggccgcagcgatgtctgacggcgccccggaactgacggtctggtacgcaggggcgctcggcggcaacggcggctttaaacgtcatcgcgggcgcgacgcctgagggacagtctggggtttggctgtccggacggtgcagcggcgaggccggccgcgaagatgccagtggcggtgatggcggaaagcgcctttagtttcaaaaagttgctggatcagtgcgagaaccaggagctcgaggcccctggaggaattgctacacccccagtgtatggtcagcttctagctttatatttgctccataatgacattgtggtggcgtaaattaggaataatgcaagatatctttggaaaagaataccacctgctataaaatctgcaaattctgaacttgggggaatttggtcagtaggacaaagaatctggcagagagatttccctgggatctatacaaccatcaacgctcaccagtggtctgagacggtccagccaattatggaagcacttagagatgcaacaaggagacgcgcctttgccctggtctctcaagcgtatacttcaatcatcgccgatgattttgcagcctttgttggacttcctgtagaagaggctgtgaaaggcatattagaacaaggatggcaagctgattccaccacaagaatggttctgcccagaaagccagttgcaggggccctggatgtttcctttaacaagtttattcccttatcagagcctgctccagttcccccaatacccaatgaacagcagttagccagactgacggattatgtggctttccttgaaaactgatttatcactctgagttcaagattcatcttcagaatcctgtatactgacaaacgtagaaatgtaaagtttgtattttcaatttattggatggcttaagcacctcagcattccttactatgtgataaaatacatatagaatataagatatactatatacattttgtccataaacgttatgctgaatagttgttgaaacagttctcattttgtagtatttaataatctggatggagcctgtcagtattacagttagttttctagtgactcataaaataagatttcctgtttcatgtagaatagtgtttgtcaactgtcttttctctgtcccagcacatgccgtactcttatatgtaccattggttgataattataatgattcatttggacttgaagaaagattgtccccaggcacagtatctgaatcactggggattatgattcaccctctttggagaacatgctctcttttcaccccccacctcctgagagccactaatgtaagatacagaaacatagctgaggaacaaatagaccatttccatactaaaccagtttgttaactttagattttttccaatagtgtgagtatatccattgctggcagtggagggcttgccatgaaaatgcaacttatttaagacatttatgagacatattaacttgtgctgtcgccttttagaaggagaaacttaagtgtggaatgcattatatgggcaaagaagctatgaagatacatgatacactttgtacaactatcctgcagcccattggttgcttatatttatcgcttggctcaagttctgccctttggagaaatactgagcaagtctttcattctctgtgtgacagccctctgaatatttgaagttgtttgttgtaacttaaggttataacagcccttagttcatttactctgcatttgttcaataaatatttaactgaattcttcaattatttca

SEQ ID NO: 419427 - DNA, 2785 bp, Homo sapiens
atataatgtcactaacagtaagtgctgtgctaaacaaaagccaggatggctacagcaagccggaggggagctgagaattagatgtaaattctgagggatgggaagggccctagattttagggcgttgtgcagaagagtaaccagatctgctctacgtttcaggaaaggaaaaaaaaattccctctggctgcggttccgagaatagcctggaaggaggcaggggtcccggctggagaagcgtggctccggggtggggcgtgcagggctagcccgggcgggggacgctgcccaacaagcaggtttgcggagactcacaccttagattctgagtttttaagcttgtttcctcagagcagggaactcacgaacgtttcgtgagcacctacggtatgcagggtacggtgcggagccctagcgtcactgacgaccgggacagccgagcagctgcaggatccgtcgtgttccccagcaattttaatatttaaaaattcgttactgttgctgttacttgttttctatgtattggatgtcttcgtgaagaaccctcaaaagtgcaacgaactcctccctgccagagggcggccgcgcgctctgagtacagcttcccgcggagccggccaggtcctccagggcaccgagaaagccggccagaacggcggcgccctatcccggccgcagcgatgtctgacggcgccccggaactgacggtctggtacgcaggggcgctcggcggcaacggcggctttaaacgtcatcgcgggcgcgacgcctgagggacagtctggggtttggctgtccggacggtgcagcggcgaggccggccgcgaagatgccagtggcggtgatggcggaaagcgcctttagtttcaaaaagttgctggatcagtgcgagaaccaggagctcgaggcccctggaggaattgctacacccccagtgtatggtcagcttctagctttatatttgctccataatgacattgtaagtatgtttaacctaaagctaagagcaacaggtttctcaaagttatatggaaatatttctgcactgaagtagcaccactaaacataggcacaacgagctaccttttttattacagtaattgttaacgtctatttcctattgaatcataggttaatgaattatgattaggtcgtcattgtcttacatatactttctagaaaacatttcaatttattatgacaaattacgtcagtaaattcatttaacctttttgtctttttaagaaacttttatgacctctatttacttaacttcatatataatcaataaaacaaaagaagtgaaaagagaagattgcagccaagaggaattcgttacaaacatgaataatgcaagatatctttggaaaagaataccacctgctataaaatctgcaaattctgaacttgggggaatttggtcagtaggacaaagaatctggcagagagatttccctgggatctatacaaccatcaacgctcaccagtggtctgagacggtccagccaattatggaagcacttagagatgcaacaaggagacgcgcctttgccctggtctctcaagcgtatacttcaatcatcgccgatgattttgcagcctttgttggacttcctgtagaagaggctgtgaaaggcatattagaacaaggatggcaagctgattccaccacaagaatggttctgcccagaaagccagttgcaggggccctggatgtttcctttaacaagtttattcccttatcagagcctgctccagttcccccaatacccaatgaacagcagttagccagactgacggattatgtggctttccttgaaaactgatttatcactctgagttcaagattcatcttcagaatcctgtatactgacaaacgtagaaatgtaaagtttgtattttcaatttattggatggcttaagcacctcagcattccttactatgtgataaaatacatatagaatataagatatactatatacattttgtccataaacgttatgctgaatagttgttgaaacagttctcattttgtagtatttaataatctggatggagcctgtcagtattacagttagttttctagtgactcataaaataagatttcctgtttcatgtagaatagtgtttgtcaactgtcttttctctgtcccagcacatgccgtactcttatatgtaccattggttgataattataatgattcatttggacttgaagaaagattgtccccaggcacagtatctgaatcactggggattatgattcaccctctttggagaacatgctctcttttcaccccccacctcctgagagccactaatgtaagatacagaaacatagctgaggaacaaatagaccatttccatactaaaccagtttgttaactttagattttttccaatagtgtgagtatatccattgctggcagtggagggcttgccatgaaaatgcaacttatttaagacatttatgagacatattaacttgtgctgtcgccttttagaaggagaaacttaagtgtggaatgcattatatgggcaaagaagctatgaagatacatgatacactttgtacaactatcctgcagcccattggttgcttatatttatcgcttggctcaagttctgccctttggagaaatactgagcaagtctttcattctctgtgtgacagccctctgaatatttgaagttgtttgttgtaacttaaggttataacagcccttagttcatttactctgcatttgttcaataaatatttaactgaattcttcaattatttca

SEQ ID NO: 419428 - DNA, 2378 bp, Homo sapiens
atataatgtcactaacagtaagtgctgtgctaaacaaaagccaggatggctacagcaagccggaggggagctgagaattagatgtaaattctgagggatgggaagggccctagattttagggcgttgtgcagaagagtaaccagatctgctctacgtttcaggaaaggaaaaaaaaattccctctggctgcggttccgagaatagcctggaaggaggcaggggtcccggctggagaagcgtggctccggggtggggcgtgcagggctagcccgggcgggggacgctgcccaacaagcaggtttgcggagactcacaccttagattctgagtttttaagcttgtttcctcagagcagggaactcacgaacgtttcgtgagcacctacggtatgcagggtacggtgcggagccctagcgtcactgacgaccgggacagccgagcagctgcaggatccgtcgtgttccccagcaattttaatatttaaaaattcgttactgttgctgttacttgttttctatgtattggatgtcttcgtgaagaaccctcaaaagtgcaacgaactcctccctgccagagggcggccgcgcgctctgagtacagcttcccgcggagccggccaggtcctccagggcaccgagaaagccggccagaacggcggcgccctatcccggccgcagcgatgtctgacggcgccccggaactgacggtctggtacgcaggggcgctcggcggcaacggcggctttaaacgtcatcgcgggcgcgacgcctgagggacagtctggggtttggctgtccggacggtgcagcggcgaggccggccgcgaagatgccagtggcggtgatggcggaaagcgcctttagtttcaaaaagttgctggatcagtgcgagaaccaggagctcgaggcccctggaggaattgctacacccccagtgtatggtcagcttctagctttatatttgctccataatgacatgaataatgcaagatatctttggaaaagaataccacctgctataaaatctgaatctggcagagagatttccctgggatctatacaaccatcaacgctcaccagtggtctgagacggtccagccaattatggaagcacttagagatgcaacaaggagacgcgcctttgccctggtctctcaagcgtatacttcaatcatcgccgatgattttgcagcctttgttggacttcctgtagaagaggctgtgaaaggcatattagaacaaggatggcaagctgattccaccacaagaatggttctgcccagaaagccagttgcaggggccctggatgtttcctttaacaagtttattcccttatcagagcctgctccagttcccccaatacccaatgaacagcagttagccagactgacggattatgtggctttccttgaaaactgatttatcactctgagttcaagattcatcttcagaatcctgtatactgacaaacgtagaaatgtaaagtttgtattttcaatttattggatggcttaagcacctcagcattccttactatgtgataaaatacatatagaatataagatatactatatacattttgtccataaacgttatgctgaatagttgttgaaacagttctcattttgtagtatttaataatctggatggagcctgtcagtattacagttagttttctagtgactcataaaataagatttcctgtttcatgtagaatagtgtttgtcaactgtcttttctctgtcccagcacatgccgtactcttatatgtaccattggttgataattataatgattcatttggacttgaagaaagattgtccccaggcacagtatctgaatcactggggattatgattcaccctctttggagaacatgctctcttttcaccccccacctcctgagagccactaatgtaagatacagaaacatagctgaggaacaaatagaccatttccatactaaaccagtttgttaactttagattttttccaatagtgtgagtatatccattgctggcagtggagggcttgccatgaaaatgcaacttatttaagacatttatgagacatattaacttgtgctgtcgccttttagaaggagaaacttaagtgtggaatgcattatatgggcaaagaagctatgaagatacatgatacactttgtacaactatcctgcagcccattggttgcttatatttatcgcttggctcaagttctgccctttggagaaatactgagcaagtctttcattctctgtgtgacagccctctgaatatttgaagttgtttgttgtaacttaaggttataacagcccttagttcatttactctgcatttgttcaataaatatttaactgaattcttcaattatttca

SEQ ID NO: 419429 - DNA, 1192 bp, Homo sapiens
actctagaggtatccctggcttcctacaagaggctgtgaaaggcatattagaacaaggatggcaagctgattccaccacaagaatggttctgcccagaaagccagttgcaggggccctggatgtttcctttaacaagtttattcccttatcagagcctgctccagttcccccaatacccaatgaacagcagttagccagactgacggattatgtggctttccttgaaaactgatttatcactctgagttcaagattcatcttcagaatcctgtatactgacaaacgtagaaatgtaaagtttgtattttcaatttattggatggcttaagcacctcagcattccttactatgtgataaaatacatatagaatataagatatactatatacattttgtccataaacgttatgctgaatagttgttgaaacagttctcattttgtagtatttaataatctggatggagcctgtcagtattacagttagttttctagtgactcataaaataagatttcctgtttcatgtagaatagtgtttgtcaactgtcttttctctgtcccagcacatgccgtactcttatatgtaccattggttgataattataatgattcatttggacttgaagaaagattgtccccaggcacagtatctgaatcactggggattatgattcaccctctttggagaacatgctctcttttcaccccccacctcctgagagccactaatgtaagatacagaaacatagctgaggaacaaatagaccatttccatactaaaccagtttgttaactttagattttttccaatagtgtgagtatatccattgctggcagtggagggcttgccatgaaaatgcaacttatttaagacatttatgagacatattaacttgtgctgtcgccttttagaaggagaaacttaagtgtggaatgcattatatgggcaaagaagctatgaagatacatgatacactttgtacaactatcctgcagcccattggttgcttatatttatcgcttggctcaagttctgccctttggagaaatactgagcaagtctttcattctctgtgtgacagccctctgaatatttgaagttgtttgttgtaacttaaggttataacagcccttagttcatttactctgcatttgttcaataaatatttaactgaattcttcaattatttca

SEQ ID NO: 419430 - DNA, 1739 bp, Homo sapiens
atataatgtcactaacagtaagtgctgtgctaaacaaaagccaggatggctacagcaagccggaggggagctgagaattagatgtaaattctgagggatgggaagggccctagattttagggcgttgtgcagaagagtaaccagatctgctctacgtttcaggaaaggaaaaaaaaattccctctggctgcggttccgagaatagcctggaaggaggcaggggtcccggctggagaagcgtggctccggggtggggcgtgcagggctagcccgggcgggggacgctgcccaacaagcaggtttgcggagactcacaccttagattctgagtttttaagcttgtttcctcagagcagggaactcacgaacgtttcgtgagcacctacggtatgcagggtacggtgcggagccctagcgtcactgacgaccgggacagccgagcagctgcaggatccgtcgtgttccccagcaattttaatatttaaaaattcgttactgttgctgttacttgttttctatgtattggatgtcttcgtgaagaaccctcaaaagtgcaacgaactcctccctgccagagggcggccgcgcgctctgagtacagcttcccgcggagccggccaggtcctccagggcaccgagaaagccggccagaacggcggcgccctatcccggccgcagcgatgtctgacggcgccccggaactgacggtctggtacgcaggggcgctcggcggcaacggcggctttaaacgtcatcgcgggcgcgacgcctgagggacagtctggggtttggctgtccggacggtgcagcggcgaggccggccgcgaagatgccagtggcggtgatggcggaaagcgcctttagtttcaaaaagttgctggatcagtgcgagaaccaggagctcgaggcccctggaggaattgctacacccccagtgtatggtcagcttctagctttatatttgctccataatgacattgtaagtatgtttaacctaaagctaagagcaacaggtttctcaaagttatatggaaatatttctgcactgaagtagcaccactaaacataggcacaacgagctaccttttttattacagtaattgttaacgtctatttcctattgaatcataggttaatgaattatgattaggtcgtcattgtcttacatatactttctagaaaacatttcaatttattatgacaaattacgtcagtaaattcatttaacctttttgtctttttaagaaacttttatgacctctatttacttaacttcatatataatcaataaaacaaaagaagtgaaaagagaagattgcagccaagaggaattcgttacaaacatgtatgagattttttaagttttttttgtttttaattattcctatttcacgttcacatggaaaagtcagaaagcataactactctaggccgggcgccgtggcacacgcctgtaatcccagcactctgggaggccaaggcaagtggatggcttgagtccaggagttttgataccagcctggggaatatagtgaaaccccgtctgtcctaaaaatacaaaaaattagctgggcatggttgcgtgtgcctctaatcccagctacctgggaggctgaggtggggagaatcacctgagcccagaaagtcaaggctgcagtgagctaagattgcgcgactgcactctagcctgagcaaccaaagtgagaccctgtctcaaaaggaaagcataactgcaaaaa

SEQ ID NO: 419431 - DNA, 636 bp, Homo sapiens
ggcgaggggcgggcgtcggggacattaccggacaggccttgtccggcaataccaagtttcatgcaggctcttgggaaagctggtgctgctgctgcctgattcccgccgacagaccttgggaccggggccaacactggcagctggagatggcggacacgagatccgtgcacgagactaggtttgaggcggccgtgaaggtgatccagagtttgccgaagaatgtcattccacacaacatacgagcagacgctcgacatcgcagagcatgcagctaagcaggcacactgagaggaccccggcgaacagcacaggcacggagacaggagcacccagagttagcgcgcaaaataactggcgaagcacggagagacactgacgggaatgaccaaagaggaaagccaggactagccagtacgcggaagaacgtgaagaggacgatggacaacgatgccacagacgtgcagaccagacgcaggaagagaagcggcacgaaggcacagaagggaacacagacgacggcacaaacagagtgaccgggacgcgtaagaaaaggcagcagagaccggagaaggaggagaccaagagtgtcacgacaaaacagcgcacagagaatagtcgacgacaaagggaaaaaac

SEQ ID NO: 419432 - DNA, 380 bp, Homo sapiens
cggcacgaggtttactgcaacttttgtagaattttatttgtgctacaagacacgttgcataggaaactatttaaagcccctgaggaaaaaatatccatggtttaaggtgcaactggttttgtttcttctttggggaaaaggtgatagatggtctctgggagaaattatggggtggagttgagaagcacaatcgaaggttatatggtgggatgattggcgaattgtgtgtcctggttcttgcagcataaaatagctaatgtttgttcctgctttgtttaataagaacctcatttaaacttgacagctatggtatttttttaatgataacttcttttctgtttattgtaaaactaagttaaaaataaaaggttaatgagaaa

SEQ ID NO: 419433 - DNA, 3918 bp, Homo sapiens
gggagggcacggactgacagacggactccggcggaatggggggtgtggctgctccgccagggtccccagggtgggagagcggctccgcggccaccgatgcccggaccccctctgtcttctgctagacatgctcttcctctcgtttcatgcaggctcttgggaaagctggtgctgctgctgcctgattcccgccgacagaccttgggaccggggccaacactggcagctggagatggcggacacgagatccgtgcacgagactaggtttgaggcggccgtgaaggtgatccagagtttgccgaagaatggttcattccagccaacaaatgaaatgatgcttaaattttatagcttctataagcaggcaactgaaggaccctgtaaactttcaaggcctggattttgggatcctattggaagatataaatgggatgcttggagttcactgggtgatatgaccaaagaggaagccatgattgcatatgttgaagaaatgaaaaagattattgaaactatgccaatgactgagaaagttgaagaattgctgcgtgtcataggtccattttatgaaattgtcgaggacaaaaagagtggcaggagttctgatataacctcagatcttggtaatgttctcacttctactccaaacgccaaaaccgttaatggtaaagctgaaagcagtgacagtggagccgagtctgaggaagaagaggcccaagaagaagtgaaaggagcagaacaaagtgataatgataagaaaatgatgaagaagtcagcagaccataagaatttggaagtcattgtcactaatggctatgataaagatggctttgttcaggatatacagaatgacattcatgccagttcttccctgaatggcagaagcactgaagaagtaaagcccattgatgaaaacttggggcaaactggaaaatctgctgtttgcattcaccaagatataaatgatgatcatgttgaagatgttacaggaattcagcatttgacaagcgattcagacagtgaagtttactgtgattctatggaacaatttggacaagaagagtctttagacagctttacgtccaacaatggaccatttcagtattacttgggtggtcattccagtcaacccatggaaaattctggatttcgtgaagatattcaagtacctcctggaaatggcaacattgggaatatgcaggtggttgcagttgaaggaaaaggtgaagtcaagcatggaggagaagatggcaggaataacagcggagcaccacaccgggagaagcgaggcggagaaactgacgaattctctaatgttagaagaggaagaggacataggatgcaacacttgagcgaaggaaccaagggccggcaggtgggaagtggaggtgatggggagcgctggggctccgacagagggtcccgaggcagcctcaatgagcagatcgccctcgtgctgatgagactgcaggaggacatgcagaatgtccttcagagactgcagaaactggaaacgctgactgctttgcaggcaaaatcatcaacatcaacattgcagactgctcctcagcccacctcacagagaccatcttggtggcccttcgagatgtctcctggtgtgctaacgtttgccatcatatggccttttattgcacagtggttggtgtatttatactatcaaagaaggagaagaaaactgaactgaggaaaatggtgttttcctcaagaagactactggaactggatgacctcagaatgaactggattgtggtgttcacaagaaaatcttagtttgtgatgattacattgctttttgttgtccagtagtttagtttgtgtacatatatacacatatatattttgcactacacaaacgataacattttaaggactaatattgctgatacttgaataatcaatctctactaggttataagtagtatacacagatttaccctgcccttgaacttgaaggacattaaattattaatgatcatttggtaacatgtttacctgattatcttccatagagtaacataagctgcttttcaaaggtaccattgtgataatgagatcaaatttataagttattatttttaattttctaaattaaataaaagaaagaatgcaaaccaggagtgaatttcaaatgagatgtaatcgactttatatcttagtcacggagttgccatggcatgtagtagaaaaccacaggaagaatggtcatattcactttgtgggctgcccataatctttcttgggcattcacaactcttgagtttggtgttcaggcatcattattaaaaagtggagtcctatgtaccagactgagtttttacaaatgatttgcaggctagacataacccactgatggaaatggtgaagaatgagcttcatgtaggtttaaaagtgtattctgagcctgtagatgattaatcaggtttttattcaatcatataaatgtattcctttgtaatcatttttgtttaactgaggatatctagtgtctgcttcatagggtgctttgaaatataaaatgaaaacttatttatactgtttttacaacagtcaaaaaggaaacacacgaaaatcacttttctgcaactgatgaactatatagactggactcttaacctcttagtgcctcagtttttccttcggggtatactattttagatacacctacttcacaggagtactggagggatttgcaagctaacgggccaaatgcttccataggaataaggcatgcccagctaacagaaatttaagtccctcttccccacctctctcatctagaccaaaaagaagactacaatttagatccttggagacttttcctgtatgccttccaaaacttcctgctcacttagatgtaccttgtgctttgaagatttctttgatgcagtctttgtaacaaataatttttttttttaaatggagtttctctcttgttgcccaggctggagggcaatggcgtgatcttggctcactgcaacttccacctcctgggttcaagtgattctcctgcctcactcccaagtagctgggattacaggcatgcaccaccatgcctggctaattttgtatttttagtagagacggggtttctccatgttggtaaggctgatctcaaactcccaacctcaggtgatctgcctgcctcggcctcccaaagtgctgggattagaggcgtgagccactgcacctggcctgtagcaaataatttttaagcattctcaagatgtatgatgttgggtttaacatcatatgttcacagtgttttaaataagaaataatctgtctttagtatacaggatggttctttgtttgcctgaaaagtataagaatacaatttacttttcccaaactctttttccttatttttttctttcaaataactttaattatttaatcccatactgattaaaatatgtctgtctaaagggatctactactatttgcttttaaaaaagtgttccctatttatttaggaaaaagtgaagcaagcaactgaatttatatgtaaaaataacatttagacctgtggatcaaagattattttcaaaaatgagatatcaatttggtatcagtaaaaagtgtcttttctcttagtatataaataaataaaatgcaaattaagagtgtaagcagttgtgaatcattacaagcagtctgggataactaactcctagggataaccatttctatcctgttccaaagtcttattttatagtttgaaaagcactttgcacacagttcttgtatataaaagtaaagatgtaattataggatatagtgttcctgctttgtttaataagaacctcatttaaacttgacagctatggtatttttttaatgataacttcttttctgtttattgtaaaactaagttaaaaataaaaggttaatgagaaa

SEQ ID NO: 419434 - DNA, 802 bp, Homo sapiens
  misc_feature (769)..(770): n is a, c, g, or t
ggcgaggggcgggcgtcggggacattaccggacaggccttgtccggcaataccaagtttcatgcaggctcttgggaaagctggtgctgctgctgcctgattcccgccgacagaccttgggaccggggccaacactggcagctggagatggcggacacgagatccgtgcacgagactaggtttgaggcggccgtgaaggtgatccagagtttgccgaagaatgaattctcctgcctcaggctcctgagtagctgggattacaattgcatgccaccacacctggctaatttttgtatttttagtagagacagggttttgccatgttggccaggctggtcttgaactcctgacctcaggtgatccgcccgtctcagcctcccaaagtgctgggattacaggtgtgagccacagctcctggccacactttggagatttagatctcaaagaaataacagaggaaaatgaataaaacacagttttacttgtataagaattatttaaaacaagcttatttttgcctcttaaaataggacataggatgcaacacttgagcgaaggaaccaagggccggcaggtgggaagtggaggtgatggggagcgctggggctccgacagagggtcccgaggcagcctcaatgagcagatcgccctcgtgctgatgagactgcaggaggacatgcagaatgtccttcagagactgcagaaactggaaacgctgactgctttgcaggaaattccaaagttctacctaatgggtatgaaccgatccnnaaaaagaccaaccctctgccagtcgccccccc

SEQ ID NO: 419435 - DNA, 3988 bp, Homo sapiens
gggagggcacggactgacagacggactccggcggaatggggggtgtggctgctccgccagggtccccagggtgggagagcggctccgcggccaccgatgcccggaccccctctgtcttctgctagacatgctcttcctctcgtttcatgcaggctcttgggaaagctggtgctgctgctgcctgattcccgccgacagaccttgggaccggggccaacactggcagctggagatggcggacacgagatccgtgcacgagactaggtttgaggcggccgtgaaggtgatccagagtttgccgaagaatggttcattccagccaacaaatgaaatgatgcttaaattttatagcttctataagcaggcaactgaaggaccctgtaaactttcaaggcctggattttgggatcctattggaagatataaatgggatgcttggagttcactgggtgatatgaccaaagaggaagccatgattgcatatgttgaagaaatgaaaaagattattgaaactatgccaatgactgagaaagttgaagaattgctgcgtgtcataggtccattttatgaaattgtcgaggacaaaaagagtggcaggagttctgatataacctcagatcttggtaatgttctcacttctactccaaacgccaaaaccgttaatggtaaagctgaaagcagtgacagtggagccgagtctgaggaagaagaggcccaagaagaagtgaaaggagcagaacaaagtgataatgataagaaaatgatgaagaagtcagcagaccataagaatttggaagtcattgtcactaatggctatgataaagatggctttgttcaggatatacagaatgacattcatgccagttcttccctgaatggcagaagcactgaagaagtaaagcccattgatgaaaacttggggcaaactggaaaatctgctgtttgcattcaccaagatataaatgatgatcatgttgaagatgttacaggaattcagcatttgacaagcgattcagacagtgaagtttactgtgattctatggaacaatttggacaagaagagtctttagacagctttacgtccaacaatggaccatttcagtattacttgggtggtcattccagtcaacccatggaaaattctggatttcgtgaagatattcaagtacctcctggaaatggcaacattgggaatatgcaggtggttgcagttgaaggaaaaggtgaagtcaagcatggaggagaagatggcaggaataacagcggagcaccacaccgggagaagcgaggcggagaaactgacgaattctctaatgttagaagaggaagaggacataggatgcaacacttgagcgaaggaaccaagggccggcaggtgggaagtggaggtgatggggagcgctggggctccgacagagggtcccgaggcagcctcaatgagcagatcgccctcgtgctgatgagactgcaggaggacatgcagaatgtccttcagagactgcagaaactggaaacgctgactgctttgcaggcaaaatcatcaacatcaacattgcagactgctcctcagcccacctcacagagaccatcttggtggcccttcgagatgtctcctggtgtgctaacgtttgccatcatatggccttttattgcacagtggttggtgtatttatactatcaaagaaggagaagaaaactgaactgaggaaaatggtgttttcctcaagaagactactggaactggatgacctcagaatgaactggattgtggtgttcacaagaaaatcttagtttgtgatgattacattgctttttgttgtccagtagtttagtttgtgtacatatatacacatatatattttgcactacacaaacgataacattttaaggactaatattgctgatacttgaataatcaatctctactaggttataagtagtatacacagatttaccctgcccttgaacttgaaggacattaaattattaatgatcatttggtaacatgtttacctgattatcttccatagagtaacataagctgcttttcaaaggtaccattgtgataatgagatcaaatttataagttattatttttaattttctaaattaaataaaagaaagaatgcaaaccaggagtgaatttcaaatgagatgtaatcgactttatatcttagtcacggagttgccatggcatgtagtagaaaaccacaggaagaatggtcatattcactttgtgggctgcccataatctttcttgggcattcacaactcttgagtttggtgttcaggcatcattattaaaaagtggagtcctatgtaccagactgagtttttacaaatgatttgcaggctagacataacccactgatggaaatggtgaagaatgagcttcatgtaggtttaaaagtgtattctgagcctgtagatgattaatcaggtttttattcaatcatataaatgtattcctttgtaatcatttttgtttaactgaggatatctagtgtctgcttcatagggtgctttgaaatataaaatgaaaacttatttatactgtttttacaacagtcaaaaaggaaacacacgaaaatcacttttctgcaactgatgaactatatagactggactcttaacctcttagtgcctcagtttttccttcggggtatactattttagatacacctacttcacaggagtactggagggatttgcaagctaacgggccaaatgcttccataggaataaggcatgcccagctaacagaaatttaagtccctcttccccacctctctcatctagaccaaaaagaagactacaatttagatccttggagacttttcctgtatgccttccaaaacttcctgctcacttagatgtaccttgtgctttgaagatttctttgatgcagtctttgtaacaaataatttttttttttaaatggagtttctctcttgttgcccaggctggagggcaatggcgtgatcttggctcactgcaacttccacctcctgggttcaagtgattctcctgcctcactcccaagtagctgggattacaggcatgcaccaccatgcctggctaattttgtatttttagtagagacggggtttctccatgttggtaaggctgatctcaaactcccaacctcaggtgatctgcctgcctcggcctcccaaagtgctgggattagaggcgtgagccactgcacctggcctgtagcaaataatttttaagcattctcaagatgtatgatgttgggtttaacatcatatgttcacagtgttttaaataagaaataatctgtctttagtatacaggatggttctttgtttgcctgaaaagtataagaatacaatttacttttcccaaactctttttccttatttttttctttcaaataactttaattatttaatcccatactgattaaaatatgtctgtctaaagggatctactactatttgcttttaaaaaagtgttccctatttatttaggaaaaagtgaagcaagcaactgaatttatatgtaaaaataacatttagacctgtggatcaaagattattttcaaaaatgagatatcaatttggtatcagtaaaaagtgtcttttctcttagtatataaataaataaaatgcaaattaagagtgtaagcagttgtgaatcattacaagcagtctgggataactaactcctagggataaccatttctatcctgttccaaagtcttattttatagtttgaaaagcactttgcacacagttcttgtatataaaagtaaagatgtaattataggatatagtgttcctgctttgtttaataagaacctcatttaaacttgacagctatggtatttttttaatgataacttcttttctgtttattgtaaaactaagttaaaaataaaaggttaatgagaaaaaaaaagaagagaaaaaaaacactgtgtggggatcgggcctgagaagattttaagaaaaggttgggcggc

SEQ ID NO: 419436 - DNA, 3116 bp, Homo sapiens
ggcgaggggcgggcgtcggggacattaccggacaggccttgtccggcaataccaagtttcatgcaggctcttgggaaagctggtgctgctgctgcctgattcccgccgacagaccttgggaccggggccaacactggcagctggagatggcggacacgagatccgtgcacgagactaggtttgaggcggccgtgaaggtgatccagagtttgccgaagaatgaattctcctgcctcaggctcctgagtagctgggattacaattgcatgccaccacacctggctaatttttgtatttttagtagagacagggttttgccatgttggccaggctggtcttgaactcctgacctcaggtgatccgcccgtctcagcctcccaaagtgctgggattacaggtgtgagccacagctcctggccacactttggagatttagatctcaaagaaataacagaggaaaatgaataaaacacagttttacttgtataagaattatttaaaacaagcttatttttgcctcttaaaataggacataggatgcaacacttgagcgaaggaaccaagggccggcaggtgggaagtggaggtgatggggagcgctggggctccgacagagggtcccgaggcagcctcaatgagcagatcgccctcgtgctgatgagactgcaggaggacatgcagaatgtccttcagagactgcagaaactggaaacgctgactgctttgcaggcaaaatcatcaacatcaacattgcagactgctcctcagcccacctcacagagaccatcttggtggcccttcgagatgtctcctggtgtgctaacgtttgccatcatatggccttttattgcacagtggttggtgtatttatactatcaaagaaggagaagaaaactgaactgaggaaaatggtgttttcctcaagaagactactggaactggatgacctcagaatgaactggattgtggtgttcacaagaaaatcttagtttgtgatgattacattgctttttgttgtccagtagtttagtttgtgtacatatatacacatatatattttgcactacacaaacgataacattttaaggactaatattgctgatacttgaataatcaatctctactaggttataagtagtatacacagatttaccctgcccttgaacttgaaggacattaaattattaatgatcatttggtaacatgtttacctgattatcttccatagagtaacataagctgcttttcaaaggtaccattgtgataatgagatcaaatttataagttattatttttaattttctaaattaaataaaagaaagaatgcaaaccaggagtgaatttcaaatgagatgtaatcgactttatatcttagtcacggagttgccatggcatgtagtagaaaaccacaggaagaatggtcatattcactttgtgggctgcccataatctttcttgggcattcacaactcttgagtttggtgttcaggcatcattattaaaaagtggagtcctatgtaccagactgagtttttacaaatgatttgcaggctagacataacccactgatggaaatggtgaagaatgagcttcatgtaggtttaaaagtgtattctgagcctgtagatgattaatcaggtttttattcaatcatataaatgtattcctttgtaatcatttttgtttaactgaggatatctagtgtctgcttcatagggtgctttgaaatataaaatgaaaacttatttatactgtttttacaacagtcaaaaaggaaacacacgaaaatcacttttctgcaactgatgaactatatagactggactcttaacctcttagtgcctcagtttttccttcggggtatactattttagatacacctacttcacaggagtactggagggatttgcaagctaacgggccaaatgcttccataggaataaggcatgcccagctaacagaaatttaagtccctcttccccacctctctcatctagaccaaaaagaagactacaatttagatccttggagacttttcctgtatgccttccaaaacttcctgctcacttagatgtaccttgtgctttgaagatttctttgatgcagtctttgtaacaaataatttttttttttaaatggagtttctctcttgttgcccaggctggagggcaatggcgtgatcttggctcactgcaacttccacctcctgggttcaagtgattctcctgcctcactcccaagtagctgggattacaggcatgcaccaccatgcctggctaattttgtatttttagtagagacggggtttctccatgttggtaaggctgatctcaaactcccaacctcaggtgatctgcctgcctcggcctcccaaagtgctgggattagaggcgtgagccactgcacctggcctgtagcaaataatttttaagcattctcaagatgtatgatgttgggtttaacatcatatgttcacagtgttttaaataagaaataatctgtctttagtatacaggatggttctttgtttgcctgaaaagtataagaatacaatttacttttcccaaactctttttccttatttttttctttcaaataactttaattatttaatcccatactgattaaaatatgtctgtctaaagggatctactactatttgcttttaaaaaagtgttccctatttatttaggaaaaagtgaagcaagcaactgaatttatatgtaaaaataacatttagacctgtggatcaaagattattttcaaaaatgagatatcaatttggtatcagtaaaaagtgtcttttctcttagtatataaataaataaaatgcaaattaagagtgtaagcagttgtgaatcattacaagcagtctgggataactaactcctagggataaccatttctatcctgttccaaagtcttattttatagtttgaaaagcactttgcacacagttcttgtatataaaagtaaagatgtaattataggatatagtgttcctgctttgtttaataagaacctcatttaaacttgacagctatggtatttttttaatgataacttcttttctgtttattgtaaaactaagttaaaaataaaaggttaatgagaaa

SEQ ID NO: 419437 - DNA, 2835 bp, Homo sapiens
gggagggcacggactgacagacggactccggcggaatggggggtgtggctgctccgccagggtccccagggtgggagagcggctccgcggccaccgatgcccggaccccctctgtcttctgctagacatgctcttcctctcgtttcatgcaggctcttgggaaagctggtgctgctgctgcctgattcccgccgacagaccttgggaccggggccaacactggcagctggagatggcggacacgagatccgtgcacgagactaggtttgaggcggccgtgaaggtgatccagagtttgccgaagaatggttcattccagccaacaaatgaaatgatgcttaaattttatagcttctataagcaggcaactgaaggaccctgtaaactttcaaggcctggattttgggatcctattggaagatataaatgggatgcttggagttcactgggtgatatgaccaaagaggaagccatgattgcatatgttgaagaaatgaaaaagattattgaaactatgccaatgactgagaaagttgaagaattgctgcgtgtcataggtccattttatgaaattgtcgaggacaaaaagagtggcaggagttctgatataacctcagatcttggtaatgttctcacttctactccaaacgccaaaaccgttaatggtaaagctgaaagcagtgacagtggagccgagtctgaggaagaagaggcccaagaagaagtgaaaggagcagaacaaagtgataatgataagaaaatgatgaagaagtcagcagaccataagaatttggaagtcattgtcactaatggctatgataaagatggctttgttcaggatatacagaatgacattcatgccagttcttccctgaatggcagaagcactgaagaagtaaagcccattgatgaaaacttggggcaaactggaaaatctgctgtttgcattcaccaagatataaatgatgatcatgttgaagatgttacaggaattcagcatttgacaagcgattcagacagtgaagtttactgtgattctatggaacaatttggacaagaagagtctttagacagctttacgtccaacaatggaccatttcagtattacttgggtggtcattccagtcaacccatggaaaattctggatttcgtgaagatattcaagtacctcctggaaatggcaacattgggaatatgcaggtggttgcagttgaaggaaaaggtgaagtcaagcatggaggagaagatggcaggaataacagcggagcaccacaccgggagaagcgaggcggagaaactgacgaattctctaatgttagaagaggaagaggacataggatgcaacacttgagcgaaggaaccaagggccggcaggtgggaagtggaggtgatggggagcgctggggctccgacagagggtcccgaggcagcctcaatgagcagatcgccctcgtgctgatgagactgcaggaggacatgcagaatgtccttcagagactgcagaaactggaaacgctgactgctttgcaggcaaaatcatcaacatcaacattgcagactgctcctcagcccacctcacagagaccatcttggtggcccttcgagatgtctcctggtgtgctaacgtttgccatcatatggccttttattgcacagtggttggtgtatttatactatcaaagaaggagaagaaaactgaactgaggaaaatggtgttttcctcaagaagactactggaactggatgacctcagaatgaactggattgtggtgttcacaagaaaatcttagtttgtgatgattacattgctttttgttgtccagtagtttagtttgtgtacatatatacacatatatattttgcactacacaaacgataacattttaaggactaatattgctgatacttgaataatcaatctctactaggttataagtagtatacacagatttaccctgcccttgaacttgaaggacattaaattattaatgatcatttggtaacatgtttacctgattatcttccatagagtaacataagctgcttttcaaaggtaccattgtgataatgagatcaaatttataagttattatttttaattttctaaattaaataaaagaaagaatgcaaaccaggagtgaatttcaaatgagatgtaatcgactttatatcttagtcacggagttgccatggcatgtagtagaaaaccacaggaagaatggtcatattcactttgtgggctgcccataatctttcttgggcattcacaactcttgagtttggtgttcaggcatcattattaaaaagtggagtcctatgtaccagactgagtttttacaaatgatttgcaggctagacataacccactgatggaaatggtgaagaatgagcttcatgtaggtttaaaagtgtattctgagcctgtagatgattaatcaggtttttattcaatcatataaatgtattcctttgtaatcatttttgtttaactgaggatatctagtgtctgcttcatagggtgctttgaaatataaaatgaaaacttatttatactgtttttacaacagtcaaaaaggaaacacacgaaaatcacttttctgcaactgatgaactatatagactggactcttaacctcttagtgcctcagtttttccttcggggtatactattttagatacacctacttcacaggagtactggagggatttgcaagctaacgggccaaatgcttccataggaataaagctactactccgcctcactgttaactctggtcagctgttgcacatgatttaccagattcactgccgtcgtgatacactggaacagctat

SEQ ID NO: 419438 - DNA, 3112 bp, Homo sapiens
actgcatttcaccctagagaaagaatgctggcaaagatctctaccacatggaaactgttcttaaagctgctgggccctgaaattttactcagcagtttgaaatcaagacatagcttttctcattcaccctcccacttggggctaatgcacagacatgaacatctattgaggaaaaccacaaaaaacttcaaaacagctacaacggtatcctaagaatatttcaattaaatattagtatgtctgctgaaggcactaattattaagaaacttaaaattatcaatctttcttgaatttctgatagagaagtaaaactattttccaaaactatttttcagaatgttcactgatacataaaaactgctagcatctaattaaagatcactaagggttaaatactgttctctggcccttactgcgcacaccctgccaaaacatcctctaagcttttaaatattgcttcgatggtctgaatttttatttccagggaaaaagagagttttgtcccacagtcagcaggccactagtttattaacttccagtcaccttgatttttgctaaaatgaagactctgcagtctacacttctcctgttactgcttgtgcctctgataaagccagcaccaccaacccagcaggactcacgcattatctatgattatggaacagataattttgaagaatccatatttagccaagattatgaggataaatacctggatggaaaaaatattaaggaaaaagaaactgtgataatacccaatgagaaaagtcttcaattacaaaaagatgaggcaataacaccattacctcccaagaaagaaaatgatgaaatgcccacgtgtctgctgtgtgtttgtttaagtggctctgtatactgtgaagaagttgacattgatgctgtaccacccttaccaaaggaatcagcctatctttacgcacgattcaacaaaattaaaaagctgactgccaaagattttgcagacatacctaacttaagaagactcgattttacaggaaatttgatagaagatatagaagatggtactttttcaaaactttctctgttagaagaactttcacttgctgaaaatcaactactaaaacttccagttcttcctcccaagctcactttatttaatgcaaaatacaacaaaatcaagagtaggggaatcaaagcaaatgcattcaaaaaactgaataacctcaccttcctctacttggaccataatgccctggaatccgtgcctcttaatttaccagaaagtctacgtgtaattcatcttcagttcaacaacatagcttcaattacagatgacacattctgcaaggctaatgacaccagttacatccgggaccgcattgaagagatacgcctggagggcaatccaatcgtcctgggaaagcatccaaacagttttatttgcttaaaaagattaccgatagggtcatacttttaacctctattggtacaacatataaatgaaagtacacctacactaatagtctgtctcaacaatgagtaaaggaacttaagtattggtttaatattaaccttgtatctcattttgaaggaatttaatattttaagcaaggatgttcaaaatcttacatataataagtaaaaagtaagactgaatgtctacgttcgaaacaaagtaatatgaaaatatttaaacagcattacaaaatcctagtttatactagactaccatttaaaaatcatgtttttatataaatgcccaaatttgagatgcattattcctattactaatgatgtaagtacgaggataaatccaagaaactttcaactctttgcctttcctggcctttactggatcccaaaagcatttaaggtacatgttccaaaaactttgaaaagctaaatgtttcccatgatcgctcattcttcttttatgattcatacgttattccttataaagtaagaactttgttttcctcctatcaaggcagctattttattaaatttttcacttagtctgagaaatagcagatagtctcatatttaggaaaactttccaaataaaataaatgttattctctgataaagagctaatacagaaatgttcaagttattttactttctggtaatgtcttcagtaaaatattttctttatctaaatattaacattctaagtctaccaaaaaaagttttaaactcaagcaggccaaaaccaatatgcttataagaaataatgaaaagttcatccatttctgataaagttctctatggcaaagtctttcaaatacgagataactgcaaaatattttccttttatactacagaaatgagaatctcatcaataaattagttcaagcataagatgaaaacagaatattctgtggtgccagtgcacactaccttcccacccatacacatccatgttcactgtaacaaactgaatattcacaataaagcttctgagtaacactttctgattactcatgataaactgacatggctaactgcaagaattaaatcttctatctgagagtaataatttatgatgactcagtggtgccagagtaaagtttctaaaataacattcctctcacttgtaccccactaaaagtattagactacacattacattgaagttaaacacaaaattatcagtgttttagaaacatgagtccggactgtgtaagtaaaagtacaaacattatttccaccataaagtatgtattgaaatcaagttgtctctgtgtacagaatacatacttattcccatttttaagcatttgcttctgttttccctacctagaatgtcagatgtttttcagttatctccccatttgtcaaagttgacctcaagataacatttttcattaaagcatctgagatctaagaacacaattattattctaacaatgattattagctcattcacttattttgataactaatgatcacagctattatactactttctcgttattttgtgtgcatgcctcatttccctgacttaaacctcactgagagcgcaaaatgcagctttatactttttactttcaattgcctagcacaatagtgagtacatttgaattgaatatataataaatattgcaaaataaaatccatctaaatagaaag

SEQ ID NO: 419439 - DNA, 2929 bp, Homo sapiens
actgcatttcaccctagagaaagaatgctggcaaagatctctaccacatggaaactgttcttaaagctgctgggccctgaaattttactcagcagtttgaaatcaagacatagcttttctcattcaccctcccacttggggctaatgcacagacatgaacatctattgaggaaaaccacaaaaaacttcaaaacagctacaacgggttaaatactgttctctggcccttactgcgcacaccctgccaaaacatcctctaagcttttaaatattgcttcgatggtctgaatttttatttccagggaaaaagagagttttgtcccacagtcagcaggccactagtttattaacttccagtcaccttgatttttgctaaaatgaagactctgcagtctacacttctcctgttactgcttgtgcctctgataaagccagcaccaccaacccagcaggactcacgcattatctatgattatggaacagataattttgaagaatccatatttagccaagattatgaggataaatacctggatggaaaaaatattaaggaaaaagaaactgtgataatacccaatgagaaaagtcttcaattacaaaaagatgaggcaataacaccattacctcccaagaaagaaaatgatgaaatgcccacgtgtctgctgtgtgtttgtttaagtggctctgtatactgtgaagaagttgacattgatgctgtaccacccttaccaaaggaatcagcctatctttacgcacgattcaacaaaattaaaaagctgactgccaaagattttgcagacatacctaacttaagaagactcgattttacaggaaatttgatagaagatatagaagatggtactttttcaaaactttctctgttagaagaactttcacttgctgaaaatcaactactaaaacttccagttcttcctcccaagctcactttatttaatgcaaaatacaacaaaatcaagagtaggggaatcaaagcaaatgcattcaaaaaactgaataacctcaccttcctctacttggaccataatgccctggaatccgtgcctcttaatttaccagaaagtctacgtgtaattcatcttcagttcaacaacatagcttcaattacagatgacacattctgcaaggctaatgacaccagttacatccgggaccgcattgaagagatacgcctggagggcaatccaatcgtcctgggaaagcatccaaacagttttatttgcttaaaaagattaccgatagggtcatacttttaacctctattggtacaacatataaatgaaagtacacctacactaatagtctgtctcaacaatgagtaaaggaacttaagtattggtttaatattaaccttgtatctcattttgaaggaatttaatattttaagcaaggatgttcaaaatcttacatataataagtaaaaagtaagactgaatgtctacgttcgaaacaaagtaatatgaaaatatttaaacagcattacaaaatcctagtttatactagactaccatttaaaaatcatgtttttatataaatgcccaaatttgagatgcattattcctattactaatgatgtaagtacgaggataaatccaagaaactttcaactctttgcctttcctggcctttactggatcccaaaagcatttaaggtacatgttccaaaaactttgaaaagctaaatgtttcccatgatcgctcattcttcttttatgattcatacgttattccttataaagtaagaactttgttttcctcctatcaaggcagctattttattaaatttttcacttagtctgagaaatagcagatagtctcatatttaggaaaactttccaaataaaataaatgttattctctgataaagagctaatacagaaatgttcaagttattttactttctggtaatgtcttcagtaaaatattttctttatctaaatattaacattctaagtctaccaaaaaaagttttaaactcaagcaggccaaaaccaatatgcttataagaaataatgaaaagttcatccatttctgataaagttctctatggcaaagtctttcaaatacgagataactgcaaaatattttccttttatactacagaaatgagaatctcatcaataaattagttcaagcataagatgaaaacagaatattctgtggtgccagtgcacactaccttcccacccatacacatccatgttcactgtaacaaactgaatattcacaataaagcttctgagtaacactttctgattactcatgataaactgacatggctaactgcaagaattaaatcttctatctgagagtaataatttatgatgactcagtggtgccagagtaaagtttctaaaataacattcctctcacttgtaccccactaaaagtattagactacacattacattgaagttaaacacaaaattatcagtgttttagaaacatgagtccggactgtgtaagtaaaagtacaaacattatttccaccataaagtatgtattgaaatcaagttgtctctgtgtacagaatacatacttattcccatttttaagcatttgcttctgttttccctacctagaatgtcagatgtttttcagttatctccccatttgtcaaagttgacctcaagataacatttttcattaaagcatctgagatctaagaacacaattattattctaacaatgattattagctcattcacttattttgataactaatgatcacagctattatactactttctcgttattttgtgtgcatgcctcatttccctgacttaaacctcactgagagcgcaaaatgcagctttatactttttactttcaattgcctagcacaatagtgagtacatttgaattgaatatataataaatattgcaaaataaaatccatctaaatagaaag

SEQ ID NO: 419440 - DNA, 206 bp, Homo sapiens
gcacgagcacaatagtgagtacatttgaaagtaaaaagtataaagctgcattttgcgctctcagtgaggtttaagtcagggaaatgaggcatgcacgcaaaatgcagctttatactttttactttcaattgcctagcacaatagtgagtacatttgaattgaatatataataaatattgcaaaataaaatccatctaaatagaaag

SEQ ID NO: 419441 - DNA, 296 bp, Homo sapiens
gcacgagcacaatagtgagtacatttgaaagtaaaaagtataaagctgcattttgcgctctcagtgaggtttaagtcagggaaatgaggcatgcacacaaaataacgagaaagtagtataatagctgtgatcattagttatcaaaagtgcatgcctcatttccctgacttaaacctcactgagagcgcaaaatgcagctttatactttttactttcaattgcctagcacaatagtgagtacatttgaattgaatatataataaatattgcaaaataaaatccatctaaatagaaag

SEQ ID NO: 419442 - DNA, 2401 bp, Homo sapiens
ttattgatgtttcatacatagccagtccgtatatatagcaataccccaaaggccaaaaatcccttcaagaaactgaataacctcaccttcctctacttggaccataatgccctggaatccgtgcctcttaatttaccagaaagtctacgtgtaattcatcttcaggtatgatagttcctttcacaatatctgactctaattacctatgagtcaaaatcttgtgactcattgggaacctcacttattcacatacaaattttggttagatcactgtagtagcgtgatagctaaatgtctgcctatcaaaaagattaatactaggctcatgaactttcttcccagaagtccagattccatccagagcataacaagtagaccagcacagtacgtgtgaagtctgctcttgattgtatttgtctccaggtgtacatttgagtatttcctaattaatttgacacaaggatttgaagtgagggggcactcagacctctgacttaggtttcctttacccattatatagcatatgaaaggttgatttcagatttctgaacaatgttttcctcgttttttttcagttcaacaacatagcttcaattacagatgacacattctgcaaggctaatgacaccagttacatccgggaccgcattgaagagatacgcctggagggcaatccaatcgtcctgggaaagcatccaaacagttttatttgcttaaaaagattaccgatagggtcatacttttaacctctattggtacaacatataaatgaaagtacacctacactaatagtctgtctcaacaatgagtaaaggaacttaagtattggtttaatattaaccttgtatctcattttgaaggaatttaatattttaagcaaggatgttcaaaatcttacatataataagtaaaaagtaagactgaatgtctacgttcgaaacaaagtaatatgaaaatatttaaacagcattacaaaatcctagtttatactagactaccatttaaaaatcatgtttttatataaatgcccaaatttgagatgcattattcctattactaatgatgtaagtacgaggataaatccaagaaactttcaactctttgcctttcctggcctttactggatcccaaaagcatttaaggtacatgttccaaaaactttgaaaagctaaatgtttcccatgatcgctcattcttcttttatgattcatacgttattccttataaagtaagaactttgttttcctcctatcaaggcagctattttattaaatttttcacttagtctgagaaatagcagatagtctcatatttaggaaaactttccaaataaaataaatgttattctctgataaagagctaatacagaaatgttcaagttattttactttctggtaatgtcttcagtaaaatattttctttatctaaatattaacattctaagtctaccaaaaaaagttttaaactcaagcaggccaaaaccaatatgcttataagaaataatgaaaagttcatccatttctgataaagttctctatggcaaagtctttcaaatacgagataactgcaaaatattttccttttatactacagaaatgagaatctcatcaataaattagttcaagcataagatgaaaacagaatattctgtggtgccagtgcacactaccttcccacccatacacatccatgttcactgtaacaaactgaatattcacaataaagcttctgagtaacactttctgattactcatgataaactgacatggctaactgcaagaattaaatcttctatctgagagtaataatttatgatgactcagtggtgccagagtaaagtttctaaaataacattcctctcacttgtaccccactaaaagtattagactacacattacattgaagttaaacacaaaattatcagtgttttagaaacatgagtccggactgtgtaagtaaaagtacaaacattatttccaccataaagtatgtattgaaatcaagttgtctctgtgtacagaatacatacttattcccatttttaagcatttgcttctgttttccctacctagaatgtcagatgtttttcagttatctccccatttgtcaaagttgacctcaagataacatttttcattaaagcatctgagatctaagaacacaattattattctaacaatgattattagctcattcacttattttgataactaatgatcacagctattatactactttctcgttattttgtgtgcatgcctcatttccctgacttaaacctcactgagagcgcaaaatgcagctttatactttttactttcaattgcctagcacaatagtgagtacatttgaattgaatatataataaatattgcaaaataaaatccatctaaatagaaag

SEQ ID NO: 419443 - DNA, 1782 bp, Homo sapiens
actgcatttcaccctagagaaagaatgctggcaaagatctctaccacatggaaactgttcttaaagctgctgggccctgaaattttactcagcagtttgaaatcaagacatagcttttctcattcaccctcccacttggggctaatgcacagacatgaacatctattgaggaaaaccacaaaaaacttcaaaacagctacaacgggaaaaagagagttttgtcccacagtcagcaggccactagtttattaacttccagtcaccttgatttttgctaaaatgaagactctgcagtctacacttctcctgttactgcttgtgcctctgataaagccagcaccaccaacccagcaggactcacgcattatctatgattatggaacagataattttgaagaatccatatttagccaagattatgaggataaatacctggatggaaaaaatattaaggaaaaagaaactgtgataatacccaatgagaaaagtcttcaattacaaaaagatgaggcaataacaccattacctcccaagaaagaaaatgatgaaatgcccacgtgtctgctgtgtgtttgtttaagtggctctgtatactgtgaagaagttgacattgatgctgtaccacccttaccaaaggaatcagcctatctttacgcacgattcaacaaaattaaaaagctgactgccaaagattttgcagacatacctaacttaagaagactcgattttacaggaaatttgatagaagatatagaagatggtactttttcaaaactttctctgttagaagaactttcacttgctgaaaatcaactactaaaacttccagttcttcctcccaagctcactttatttaatgcaaaatacaacaaaatcaagagtaggggaatcaaagcaaatgcattcaaaaaactgaataacctcaccttcctctacttggaccataatgccctggaatccgtgcctcttaatttaccagaaagtctacgtgtaattcatcttcagttcaacaacatagcttcaattacagatgacacattctgcaaggctaatgacaccagttacatccgggaccgcattgaagagatacgcctggagggcaatccaatcgtcctgggaaagcatccaaacagttttatttgcttaaaaagattaccgatagggtcatacttttaacctctattggtacaacatataaatgaaagtacacctacactaatagtctgtctcaacaatgagtaaaggaacttaagtattggtttaatattaaccttgtatctcattttgaaggaatttaatattttaagcaaggatgttcaaaatcttacatataataagtaaaaagtaagactgaatgtctacgttcgaaacaaagtaatatgaaaatatttaaacagcattacaaaatcctagtttatactagactaccatttaaaaatcatgtttttatataaatgcccaaatttgagatgcattattcctattactaatgatgtaagtacgaggataaatccaagaaactttcaactctttgcctttcctggcctttactggatcccaaaagcatttaaggtacatgttccaaaaactttgaaaagctaaatgtttcccatgatcgctcattcttcttttatgattcatacgttattccttataaagtaagaactttgttttcctcctatcaaggcagctattttattaaatttttcacttagtctgagaaatagcagatagtctcatatttaggaaaactttccaaataaaataaatgttattctctga

SEQ ID NO: 419444 - DNA, 1019 bp, Homo sapiens
actgcatttcaccctagagaaagaatgctggcaaagatctctaccacatggaaactgttcttaaagctgctgggccctgaaattttactcagcagtttgaaatcaagacatagcttttctcattcaccctcccacttggggctaatgcacagacatgaacatctattgaggaaaaccacaaaaaacttcaaaacagctacaacgggaaaaagagagttttgtcccacagtcagcaggccactagtttattaacttccagtcaccttgatttttgctaaaatgaagactctgcagtctacacttctcctgttactgcttgtgcctctgataaagccagcaccaccaacccagcaggactcacgcattatctatgattatggaacagataattttgaagaatccatatttagccaagattatgaggataaatacctggatggaaaaaatattaaggaaaaagaaactgtgataatacccaatgagaaaagtcttcaattacaaaaagatgaggcaataacaccattacctcccaagaaagaaaatgatggtaagtatcattctaaatatttttcaaatggatcttttaaaaatagctataatggactttattccttgtggtaatcaaaaactgactcaagatacagtaaatacaaactagtggaattttatttccaatgataaactcaaactgggagtgcacaccatttgccatcccacattatgagtgagaaatgtggagcaagaacttgtgagaacaaccaaagcttaggcaagcttagcctccacaaagtgtggtttccatccatataaaatctattcgagaaatacttaaacacggattatttgcaaaatacaatgtgcagcctcagtatacggtaaatataattattgcctttaagaaacttacagaacagaaacacacatatacatcaataattacacatacatttcaattaaaatagaaaacttgtcatgaaataacaaattacaaatcctacttaataattccagtgtacgtg

SEQ ID NO: 419445 - DNA, 2831 bp, Homo sapiens
actgcatttcaccctagagaaagaatgctggcaaagatctctaccacatggaaactgttcttaaagctgctgggccctgaaattttactcagcagtttgaaatcaagacatagcttttctcattcaccctcccacttggggctaatgcacagacatgaacatctattgaggaaaaccacaaaaaacttcaaaacagctacaacgggaaaaagagagttttgtcccacagtcagcaggccactagtttattaacttccagtcaccttgatttttgctaaaatgaagactctgcagtctacacttctcctgttactgcttgtgcctctgataaagccagcaccaccaacccagcaggactcacgcattatctatgattatggaacagataattttgaagaatccatatttagccaagattatgaggataaatacctggatggaaaaaatattaaggaaaaagaaactgtgataatacccaatgagaaaagtcttcaattacaaaaagatgaggcaataacaccattacctcccaagaaagaaaatgatgaaatgcccacgtgtctgctgtgtgtttgtttaagtggctctgtatactgtgaagaagttgacattgatgctgtaccacccttaccaaaggaatcagcctatctttacgcacgattcaacaaaattaaaaagctgactgccaaagattttgcagacatacctaacttaagaagactcgattttacaggaaatttgatagaagatatagaagatggtactttttcaaaactttctctgttagaagaactttcacttgctgaaaatcaactactaaaacttccagttcttcctcccaagctcactttatttaatgcaaaatacaacaaaatcaagagtaggggaatcaaagcaaatgcattcaaaaaactgaataacctcaccttcctctacttggaccataatgccctggaatccgtgcctcttaatttaccagaaagtctacgtgtaattcatcttcagttcaacaacatagcttcaattacagatgacacattctgcaaggctaatgacaccagttacatccgggaccgcattgaagagatacgcctggagggcaatccaatcgtcctgggaaagcatccaaacagttttatttgcttaaaaagattaccgatagggtcatacttttaacctctattggtacaacatataaatgaaagtacacctacactaatagtctgtctcaacaatgagtaaaggaacttaagtattggtttaatattaaccttgtatctcattttgaaggaatttaatattttaagcaaggatgttcaaaatcttacatataataagtaaaaagtaagactgaatgtctacgttcgaaacaaagtaatatgaaaatatttaaacagcattacaaaatcctagtttatactagactaccatttaaaaatcatgtttttatataaatgcccaaatttgagatgcattattcctattactaatgatgtaagtacgaggataaatccaagaaactttcaactctttgcctttcctggcctttactggatcccaaaagcatttaaggtacatgttccaaaaactttgaaaagctaaatgtttcccatgatcgctcattcttcttttatgattcatacgttattccttataaagtaagaactttgttttcctcctatcaaggcagctattttattaaatttttcacttagtctgagaaatagcagatagtctcatatttaggaaaactttccaaataaaataaatgttattctctgataaagagctaatacagaaatgttcaagttattttactttctggtaatgtcttcagtaaaatattttctttatctaaatattaacattctaagtctaccaaaaaaagttttaaactcaagcaggccaaaaccaatatgcttataagaaataatgaaaagttcatccatttctgataaagttctctatggcaaagtctttcaaatacgagataactgcaaaatattttccttttatactacagaaatgagaatctcatcaataaattagttcaagcataagatgaaaacagaatattctgtggtgccagtgcacactaccttcccacccatacacatccatgttcactgtaacaaactgaatattcacaataaagcttctgagtaacactttctgattactcatgataaactgacatggctaactgcaagaattaaatcttctatctgagagtaataatttatgatgactcagtggtgccagagtaaagtttctaaaataacattcctctcacttgtaccccactaaaagtattagactacacattacattgaagttaaacacaaaattatcagtgttttagaaacatgagtccggactgtgtaagtaaaagtacaaacattatttccaccataaagtatgtattgaaatcaagttgtctctgtgtacagaatacatacttattcccatttttaagcatttgcttctgttttccctacctagaatgtcagatgtttttcagttatctccccatttgtcaaagttgacctcaagataacatttttcattaaagcatctgagatctaagaacacaattattattctaacaatgattattagctcattcacttattttgataactaatgatcacagctattatactactttctcgttattttgtgtgcatgcctcatttccctgacttaaacctcactgagagcgcaaaatgcagctttatactttttactttcaattgcctagcacaatagtgagtacatttgaattgaatatataataaatattgcaaaataaaatccatctaaatagaaag

SEQ ID NO: 419446 - DNA, 2750 bp, Homo sapiens
actgcatttcaccctagagaaagaatgctggcaaagatctctaccacatggaaactgttcttaaagctgctgggccctgaaattttactcagcagtttgaaatcaagacatagcttttctcattcaccctcccacttggggctaatgcacagacatgaacatctattgaggaaaaccacaaaaaacttcaaaacagctacaacgactctgcagtctacacttctcctgttactgcttgtgcctctgataaagccagcaccaccaacccagcaggactcacgcattatctatgattatggaacagataattttgaagaatccatatttagccaagattatgaggataaatacctggatggaaaaaatattaaggaaaaagaaactgtgataatacccaatgagaaaagtcttcaattacaaaaagatgaggcaataacaccattacctcccaagaaagaaaatgatgaaatgcccacgtgtctgctgtgtgtttgtttaagtggctctgtatactgtgaagaagttgacattgatgctgtaccacccttaccaaaggaatcagcctatctttacgcacgattcaacaaaattaaaaagctgactgccaaagattttgcagacatacctaacttaagaagactcgattttacaggaaatttgatagaagatatagaagatggtactttttcaaaactttctctgttagaagaactttcacttgctgaaaatcaactactaaaacttccagttcttcctcccaagctcactttatttaatgcaaaatacaacaaaatcaagagtaggggaatcaaagcaaatgcattcaaaaaactgaataacctcaccttcctctacttggaccataatgccctggaatccgtgcctcttaatttaccagaaagtctacgtgtaattcatcttcagttcaacaacatagcttcaattacagatgacacattctgcaaggctaatgacaccagttacatccgggaccgcattgaagagatacgcctggagggcaatccaatcgtcctgggaaagcatccaaacagttttatttgcttaaaaagattaccgatagggtcatacttttaacctctattggtacaacatataaatgaaagtacacctacactaatagtctgtctcaacaatgagtaaaggaacttaagtattggtttaatattaaccttgtatctcattttgaaggaatttaatattttaagcaaggatgttcaaaatcttacatataataagtaaaaagtaagactgaatgtctacgttcgaaacaaagtaatatgaaaatatttaaacagcattacaaaatcctagtttatactagactaccatttaaaaatcatgtttttatataaatgcccaaatttgagatgcattattcctattactaatgatgtaagtacgaggataaatccaagaaactttcaactctttgcctttcctggcctttactggatcccaaaagcatttaaggtacatgttccaaaaactttgaaaagctaaatgtttcccatgatcgctcattcttcttttatgattcatacgttattccttataaagtaagaactttgttttcctcctatcaaggcagctattttattaaatttttcacttagtctgagaaatagcagatagtctcatatttaggaaaactttccaaataaaataaatgttattctctgataaagagctaatacagaaatgttcaagttattttactttctggtaatgtcttcagtaaaatattttctttatctaaatattaacattctaagtctaccaaaaaaagttttaaactcaagcaggccaaaaccaatatgcttataagaaataatgaaaagttcatccatttctgataaagttctctatggcaaagtctttcaaatacgagataactgcaaaatattttccttttatactacagaaatgagaatctcatcaataaattagttcaagcataagatgaaaacagaatattctgtggtgccagtgcacactaccttcccacccatacacatccatgttcactgtaacaaactgaatattcacaataaagcttctgagtaacactttctgattactcatgataaactgacatggctaactgcaagaattaaatcttctatctgagagtaataatttatgatgactcagtggtgccagagtaaagtttctaaaataacattcctctcacttgtaccccactaaaagtattagactacacattacattgaagttaaacacaaaattatcagtgttttagaaacatgagtccggactgtgtaagtaaaagtacaaacattatttccaccataaagtatgtattgaaatcaagttgtctctgtgtacagaatacatacttattcccatttttaagcatttgcttctgttttccctacctagaatgtcagatgtttttcagttatctccccatttgtcaaagttgacctcaagataacatttttcattaaagcatctgagatctaagaacacaattattattctaacaatgattattagctcattcacttattttgataactaatgatcacagctattatactactttctcgttattttgtgtgcatgcctcatttccctgacttaaacctcactgagagcgcaaaatgcagctttatactttttactttcaattgcctagcacaatagtgagtacatttgaattgaatatataataaatattgcaaaataaaatccatctaaatagaaag

SEQ ID NO: 419447 - DNA, 1130 bp, Homo sapiens
actgcatttcaccctagagaaagaatgctggcaaagatctctaccacatggaaactgttcttaaagctgctgggccctgaaattttactcagcagtttgaaatcaagacatagcttttctcattcaccctcccacttggggctaatgcacagacatgaacatctattgaggaaaaccacaaaaaacttcaaaacagctacaacgggaaaaagagagttttgtcccacagtcagcaggccactagtttattaacttccagtcaccttgatttttgctaaaatgaagactctgcagtctacacttctcctgttactgcttgtgcctctgataaagccagcaccaccaacccagcaggactcacgcattatctatgattatggaacagataattttgaagaatccatatttagccaagattatgaggataaatacctggatggaaaaaatattaaggaaaaagaaactgtgataatacccaatgagaaaagtcttcaattacaaaaagatgaggcaataacaccattacctcccaagaaagaaaatgatgaaatgcccacgtgtctgctgtgtgtttgtttaagtggctctgtatactgtgaagaagttgacattgatgctgtaccacccttaccaaaggaatcagcctatctttacgcacgattcaacaaaattaaaaagctgactgccaaagattttgcagacatacctaacttaagaagactcgattttacaggaaatttgatagaagatatagaagatggtactttttcaaaactttctctgttagaagaactttcacttgctgaaaatcaactactaaaacttccagttcttcctcccaagctcactttatttaatgcaaaatacaacaaaatcaagagtaggggaatcaaagcaaatgcattcaaagtaagtattttatagtaaaactaagcatagtatgagtgatgatatgatagataaaagagaaactttggtctagaattgtattttgattacacttaaaaactattttgatttaataaatgaagacattatttacataataaataaccatcctattaggctcattcagcctagcttatacccatatctcagttaaaatacataacctttattttaaaaaaaaa

SEQ ID NO: 419448 - DNA, 1924 bp, Homo sapiens
  misc_feature (1118)..(1118): n is a, c, g, or t
ttttcttgtctaatggtgttggtgaatactccagaattttgtcagagaacagtggcagtagcagatactctcattttcttcttggcctaacagaagtgcttctagcatttgaccattaaagtgctgtcctggaagcggagacaggtgcattttgtcatgtggtagtgaagtccatccactcttcttttattagatttaaaacaccaagaatgcacattaaacaagctctagtgctgttatggacataatgaaatgactgtgcgtcttggagctattaattgtaggatatccctaaatactggatgattgctgcatccgtcgaaaatctgacgtggtcgctgaattctcgttatccatgccatgtgctgcagagctcagcttgctgacattttgttttggatttcgcactgatgcttctaaataagactgtcacagttttctttatagtgtttggaacctcagtttgctttgttcaaaagataatttgagtttaaatagcagcagtgtcctctgccccacagggttggatttcccataaaacctgagtctagtgttttggggtccagggcttaagaaagttttctgtctcttccatacagttggcctgtgggggtctctggcttttcctcggtgatttctgcagcgccccccacaccccgttagaacccagagttgggcaggggagggctgggggtgaggttggttggaactggcttcacaggcttggctctgccattctctagctctgcagacccctgctgtgggttctcccagaccctcccagggtgagcagtgagggtgctggggctgcccctgctcctttaatggaggtgtctccatgtcggtctgggtctgaatgcccagagggctgggagggctggctgtgacccagaggggccacaggaggggtggcaagcgtgaccttgtcaggccctacccgctgcctgtgtctccagggagagcccgggccacccggacagatgggaccagaaggtcctggaggccagcagggctcgccggggacccagggccgtgcagtccaggggcctgtggtaggtgtcactccttccctgccctcctgccctgtgccccctccgcttcgctgtccagcccatctnccccctccagggtccaccaggggtcaaaggagagaagggagaccatgggcttccaggcttgcagggccaccccggccaccagggcatccccgggagagttggcctccagggaccaaagggaatgagaggcctggagggaactgctggcctgcctggaccccctggccccagggggttccagggcatggcaggggccaggggcactagtggagagcgaggacctccagggaccgtggggcccacaggactgccagggcccaaaggggaacgaggagagaagggcgagccgcagtcccttgccaccctctaccagcttgtgagccaggcctgtgagtctgccattcagacacacgtgtcaaagttcgactccttccacgagaacaccaggccccccatgcccatcttggagcagaagctggagccgggcactgagcccctggggtcccctggcacccgcagcaaggccctggttcctggagaatgggggcgtggtggccgccaccttgagggcagaggggagcctggagctgttggtcagatgggcagccctgggcagcagggggctagcacccagggcctctgggagtgacaggacattttctgcactgccccgaggaacgctgagccttcctccctgggtttgtctggacaccgagagcgaccacatcctggagaagccaggagaaaagctcaggaagagcctgcaggtggaaggagagggaagcagcggcctcggccaaggcccaccccatactcttggctctgtagcatttccaagttcagataaacccctgagtgctcaccca

SEQ ID NO: 419449 - DNA, 1221 bp, Homo sapiens
acagacgtctcaggaaactgggggcaacctggggggagccccgtgggctgtgggaacccctgcccccggcttggaagctgcccacagtggcctggttgcagcctggcagatgaggggtacatcactactcagaataaacggccccctctgcacccacctgtctagatgagggtgacaggcactatcacagggcccccacctgacgccttcccacctggccatgcccccccagaactgtcatggagcccaggaggcgcctgtgtggagcacggggacctggcacgctgctgcccctagatctcagactcccatctaaggaccagacctgctgcctgtgcccagggaggggccctgacaccctctgtccccgtcagaacagggccccaagccactgcattgctccgtcctcacatgccctccctttcctcgcaggggagcctggagctgttggtcagatgggcagccctgggcagcagggggctagcacccagggcctctgggagtgacaggacattttctgcactgccccgaggaacgctgagccttcctccctgggtttgtctggacaccgagagcgaccacatcctggagaagccaggagaaaagctcaggaagagcctgcaggtggaaggagagggaagcagcggcctcggccaaggcccaccccatactcttggctctgtagcatttccaagttcagataaacccctgagtgctcacccaaaaaaaaaaaaaaaaaaaaaaaaaaaaaaaaaaaaaaaaaaaaaaaaaaaaaaaaaaaaaaaaaaaaaaaaaaaaaaaaaaaaaaaaagggggggggggggggaaattttctctccggggggggcgctggactttttgtagaaaagaagggggccccccctaggaggggagccgtctaataataagcaacgagcgggcgagggccgcgcgcgctttaaaaacagtggtggggcgggagagacaacacccgtcgtttgctgctgctcctttgtctggacgaaaggagacgaccacacctcctgggtggggggggagcacaaatgtggggagaacaccacccacacgaagagaagatttttaccccctcggggggagaaatacaatatccggcggggggtgatgtgggggggtgaccacacaccaggtgagtatatctgtcgtgcgcgaagaaaaactagtttgcctagaggggcattcttcataggaaaacttttcgcg

SEQ ID NO: 419450 - DNA, 1849 bp, Homo sapiens
gggctgtggagaacctcccgtgccgtctcacaggtgcacgtggctgtgggccgctccaaggtcaggctctatgtggactgccggaaggtggctgagcggccccttggggagatgggcagcccacccgctgccggcttcgtcacgctggggaggctggccaaggccaggggcccccggagcagttcggccgcgtttcagctccagatgctgcagatcgtgtgcagtgacacctgggccgatgaggaccggtgctgtgagctccctgcctcgagggatggagagacctgccccgccttcgtgtctgcctgttcctgttcctcagagacccctgggcccccaggacctcaaggacccccaggcctccctgggaggaatggcaccccaggagagcagggcttcccagggcccaggggtccaccaggggtcaaaggagagaagggagaccatgggcttccaggcttgcagggcaacccggacacaggacatccccgggagagtatggctccagggaccaagggaatgagaggctgagggactgctggctgcttgaacccctgagccccagcgggttccaggcataggcagggggcaggggcactagtggagagcgaggacatcagggaccgtgcggccacatggatgccatgtccaaatggggacagaggacaaatgggaaccagagacattgcaactttaacacgtgtcagccaggctgaatatgcaccaagaacatggccagtggacttacagagacacagaccagacatagcacaaaaggacgcccggcgcggggcacatgcccgaagcacccacgtaagttgtaggacgagcggaaccaccgcgctcgatggcctcactcccctccgtaccgctcacgctcgtcagctcaccgcgctgggggggccaccgcaagacgagactcgagcagacacgacgcacacgcagcgacccagagcacgcaccagacccaagcagacacaaggccccccatccgcacaacgaacgcagcacgaccaccccaacacacgagccaccgcccccacagccgacacctccgaccaacactcagcaccaacacaaaatactcaccacatactccgatccagaccaagcaaaacaactacaccaccgcgtcacaggacaccaagtcaaccccaaccaactatattaccaagtcccacagtctacactacattcgcacactacaaccaccaacggacgaccaacacacgccactcaaccatccaccacaagtcagatacacagaacagacaacacacccactcagaggcgcacagcacatcacacatacgcacgcaataccttccacaacgaccactacgaaccacaatcagctcagagagaacacgaagcacagaacaacacgacgagacaacacaacggcaagcaggcgcgagagacgcagaagagaagaaaggacgaagagcgagaaaaggacagcgacgagagagacggggacacgcgacaggcgcatcgcagatcacgagacccggaagaacgagagacgaacaggccagcaacagacagagacgagagctcagaagaacgcgagcatgcctgacccgaccgaagacgagggaactgcgtaagcaggcgcaagaaagactcaggacgaacccaacagccacaaagaacgaagcacaagaagagagcacagagctaacacagagccacgaccccacgagcaggaatgacaagagagcgagaagcagcaggaagacatcgacgagaacgcagagaagggagaccggagagtggagatgcgaatgatgagatggcgggactgttgagagatgccagagaaattgacggcggagcactctacaga

SEQ ID NO: 419451 - DNA, 8135 bp, Homo sapiens
  misc_feature (1963)..(1963): n is a, c, g, or t
agcggataagctccagccttcctgtggccacagcaggaccagagtggaccagcacaccccaggagagaggactggggtcccaggagtaggaggagcccgagcaccatgagctccggagaccctgcacacctcggcctctgcctctggctgtggctgggcgccaccctgggaagagagcaagttcaagcaagcggtctcctgaggctggctgtgctgcctgaggaccggctgcagatgaagtggagagagtcggaggggagcggcctcggctacctggtgcaggtgaagcccatggcaggggactcggaacaggaggtgatactgaccaccaagacccctaaggccacagtggggggcctgagcccctccaagggctacaccttgcagatcttcgagctcactggctctgggcgcttcctgctagctcggagggagtttgtgattgaggatctgaagagtagctccctggacaggagcagccagaggcccctcggctctggagccccggagcccaccccctcacacacacggggagcccagaccctgagcaggcttctgagccccaagttgccttcaaaccaagccaggatccgcgcactcctggtgggtcagagtggagagagaccggcccccagtaccgctgcctgccccccgtgcctgctgacatggtcttcctggtggacgggtcctggagcattggccacagtcacttccagcaggtcaaggacttcctggccagtgtcatcgcaccctttgaaatcgggccggataaggtccaagtaggcctgactcagtacagcggggatgctcagactgagtgggacctgaactccctcagcaccaaggaacaggtgctggcagctgtgcgccgcctccgctacaagggggggaacacgttcacaggccttgccctgacccacgtgctggggcagaacctgcagccggcggctggcctccgtccagaggcagccaaggtggtgattctggtgacggacggcaagtcccaggacgatgtgcacactgctgcccgtgtcctcaaggacctgggcgtgaacgtcttcgctgtgggtgtgaagaacgccgatgaggctgagctgaggctcctggcgtccccgccgagggacatcaccgtccacagcgtgctggacttcctgcagctcggcgcgctggctggcctgctcagccgtctcatctgccagaggctccagggtgggagcccgcggcagggcccagcagcggctccagccctggacaccctccctgcccccaccagcctggtcctgagccaggtgacctcctccagcatccgcctgtcctggactccagccccccggcaccccctcaagtatctgatcgtttggcgagcctctagaggtggcacccccagggaggtggtggtggaggggcccgccgcctccacggagctgcacaacctggcctcccgcacagagtacctggtctccgtgttccccatctatgagggcggggttggcgaaggcctgcggggcctggtgaccacagcacctctgcctccgccccgggcgctgaccctggccgcagtgacgcccagaaccgtccacctcacctggcagccctcggccggggccacccactacctggtgcgatgttctcctgcttcccccaagggtgaagaggaggagcgagaggtgcaggtcgggcggcccgaggtgctgctggatggcctggaacctggcagggactatgaggtctcggtgcagagcctgcgaggccctgagggcagcgaggcccggggcatccgtgccaggacccccaccctggcccccccgagacacctgggcttctcagacgtgagccacgacgcggcacgagtgttctgggagggtgccccgaggcctgtgcgcctggtcagggtcacctatgtgtccagcgagggtggacactcggggcagacagaggctcctgggaacgccacctcggccangctggggcctctctcttcctccaccacctacactgtccgtgtcacctgcctctaccctgggggtggctcctctacgctgactggccgggtgaccaccaagaaagctcccagcccaagccagctgtccatgacggagctgccaggggatgcagtccagctggcgtgggtggccgcagccccgtctggcgtgcttgtctaccagatcacgtggacgcccctgggagaggggaaggctcacgagatctctgtcccagggaacctcggcacggccgtcctgcctggcctagggaggcacacagagtacgacgtcaccatcttggcctactacagggacggggcccgcagtgaccctgtgtccctccgctataccccctccacggtgagcaggagcccaccctccaacctggccctggcctcggagacccccgacagcctgcaggtcagctggacgcccccgcttggccgcgtgctccattactggctcacctacgcccccgcctctggcttgggacccgagaaatccgtctctgtgccaggagccaggagccacgtgacactgcccgacctgcaggcagccacgaagtacagggtcctggtctcagctatctatgcagcaggcaggagtgaggctgtgtctgccacgggccagacagcctgcccagccctccgccctgacggctccctcccagggtttgacctgatggtggccttcagcctggtggaaaaggcttatgcgtccatccggggcgtggccatggagccctctgccttcggtgggaccccgaccttcacgctcttcaaggacgcccagctgacaagacgggtcagtgacgtctacccagcccccctacctccagagcacaccatcgtcttccttgtgcgcctacttcccgagacaccccgtgaggccttcgcgctgtggcagatgacagccgaggacttccagcccctccttggggttctgctggatgccgggaagaagtccctgacctacttccaccgtgaccccagggctgccttgcaggaggccaccttcgacccgcaggaagtgaggaagattttcttcgggagcttccacaaggtgcacgtggctgtgggccgctccaaggtcaggctctatgtggactgccggaaggtggctgagcggccccttggggagatgggcagcccacccgctgccggcttcgtcacgctggggaggctggccaaggccaggggcccccggagcagttcggccgcgtttcagctccagatgctgcagatcgtgtgcagtgacacctgggccgatgaggaccggtgctgtgagctccctgcctcgagggatggagagacctgccccgccttcgtgtctgcctgttcctgttcctcagagacccctgggcccccaggacctcaaggacccccaggcctccctgggaggaatggcaccccaggagagcagggcttcccagggcccaggggtccaccaggggtcaaaggagagaagggagaccatgggcttccaggcttgcagggccaccccggccaccagggcatccccgggagagttggcctccagggaccaaagggaatgagaggcctggagggaactgctggcctgcctggaccccctggccccagggggttccagggcatggcaggggccaggggcactagtggagagcgaggacctccagggaccgtggggcccacaggactgccagggcccaaaggggaacgaggagagaagggcgagccgcagtcccttgccaccctctaccagcttgtgagccaggcctgtgagtctgccattcagacacacgtgtcaaagttcgactccttccacgagaacaccaggccccccatgcccatcttggagcagaagctggagccgggcactgagcccctggggtcccctggcacccgcagcaaggccctggttcctggagaatgggggcgtggtggccgccaccttgagggcagaggggagcctggagctgttggtcagatgggcagccctgggcagcagggggctagcacccagggcctctgggagtgacaggacattttctgcactgccccgaggaacgctgagccttcctccctgggtttgtctggacaccgagagcgaccacatcctggagaagccaggagaaaagctcaggaagagcctgcaggtggaaggagagggaagcagcggcctcggccaaggcccaccccatactcttggctctgtagcatttccaagttcagataaacccctgagtgctcacccagccaagcgaggcgggagtcatttcctgggagagtgtcccccaccctggctctgtgcaccccaccttgaggccctgcagcttcagccgcagtggggaaggggaggggctgggctgatggcgaatcgggttcaggagggcagcagtgccctgtggccgtctcagtagctctaaaacaggctcaacaacatgccccgcccctttctctgggcctcatctaagcctggccagggccctgtgggcccgcctctctctgcgcctcacgcaggcaacagatggttccactgctggcccaccagtcacctgcacgatggctcctccctcagaacagcactcccaccccggccccagcaccttcacatctgggcacaggcaggtccctgcctgcctcatcgtcccctctgtccccagcccaagaaggagttcagatcctgtgtgtgaatggccacccctcacccacccagccctgtgctgagttccttgtgcagggacattgctttgagacttggcaccatcagcccctggtccttagggtctcagagcaaggtcatccctcagcaggcttctggcctgtgcgctcctcagcacctctgcccaggtctctcccaaccatcacagacgctgtgtgagcctggacttcctgccttatccccactgtggcccaaacagcatgggggcaagctcagaacacacacctgggcttctgggccttgtggcccgtgggggtgatgtgggaacttctacttcctttccaaacaaatattcagtaactagtccactgttaccacttaggcagctaagcaagaaaggtgccagaaatgaagagggaagccatatcattgaggagagaatgaaaagtattaaaaaggaacaaagagagacccttgatattgacagaaggaaaacccaccaagatcaccagtgcagcattgcgtgcaccaaagcataccccaaagaggtgagcgcaaaacagcttcagggcaaacacttcatctatgattcaactgttccaggaactgaccagacctggagaccaaatagagagtcataggcagggtcagcaggatgggagagagcgcctgcacccacaggagccacagccctgactgaggccaggaagcagccccaaatgccagctcccactgcagcatgagaacagaaacagaccactgaaaattcccaaagtctgtggacaaatcagacgtcgaagaagtcacgtggcatcgagacagattttgcactgagggacaaggagagcatgtggccaaagtaggtgcaggtaaagcagcatctggggcagagttatagccttcagtgcaggtatcagacacagttgttgagagcagcagcccaagccagcccctccgtcctgcagggaggacacctaggtcacttggcttctgttggggagctgagttgcttcagattgtgtgaccagcaaaacagcttggttgctctcacttggtttctccagggcggggaattacatgtccccagctgaactgagaaggctctttgagcagtggagtgagcaggctttgtcatgaggcaggagtggggctagaatcaagcccagagcccacagggcatccagagccttccaaaggagcccctctcctggggctctccaatttgatgaagggactgggcactgggtggctgagaccacattggcagccaggaggaggcagcctggccggggggaaccagggtggctctaatccccaccaccccctcagctgccctacccccgccacgctggtgtgacaccagtgatgctcagcctcaaaaggggagtccggctgtcttcgggaaactgactttatgctggaggccaattaaaatggcacagcaaaggcagcggccagctggtgcccaggcagcttagggactggtccctgaggccccacccgccccagcctgtgcagtggagctgagtacgaatcaaaggtgaggatggcaagggagctgagagcagcctccggatgcaccaaaccggcctggctcctgtttgcaggaaggcagcctccccgagacccagccgacctgcacgtctcccatcagccccgactccaccgcatccctctgggtccttttaggagcccccagggactgagccggggctcacgctcctggccagagcgctgggtttctggcaatgcctcccctcctgcctttacggccacagctctcccctccagaggcccctctgtagtgggcctcggtcccctctccacccccagaggcagcacagcttcagccctacgcagtgtgggggctccgggaggaaatgcagggaggtgcttggtcttggcccagagctcatggccttaggtgctgcccccagtcacccccgtgcccatgcagccggggatgttcagctcaggccagccaccgaggtggtgtgacgcaaggctgatctgacgctcagctcaggccgctggggtcatgggggttgtgggaaggtcatggaatcacggggctcacgctggggtcacagggtggtgtggctgtgtggactgtaaggggcgtgcagccatgcgtatctgacctgccctccctaggtctgcaggcagtgccgagtggctctgcctgaggccccaagagcgaccttggaagctccaggccttcacagcccctctgagagccacctgcaaggtggggagctgggaagaacggctcagtgatgagctcagagggaggggtgggcacagcgcccaggaaggcgggtgcgtgcaggcctgggaggaatgtgtagcaggaggcagggggtgctgtgcccgcaggaccagcaggtgaggcgtgtccacccacaggatggctctggcccaggcagtgtcagaaatggaagctgaggaaacccaaccccagctgtagaggagcctgccccgatgccatctgcacctggggggcgacgtatggctgccagcctcttcatctaccaaggaccagggcagtggggacgggagagctgggacacgtggactcacaccagggcagatggtgggggaagccagtgtctgtagattcagtgcatttcttggggaagggcgtggaacatttggacttgagccccagcacagagacgatgtcataatacagccccccatcgtgatctgatggtaagtacagaactccttgcccagtggagaaacactctcctctcatgtgtggaatatccacacactaaccatgaactgggccataagaaaccttacattccaaaggatcctgctgttcagaactcactcactcactgatgaaactggaaaaacaaccaatgataacaagctaaagaatgcctctagaagctaaaagacacacccatgactccacagtaattcatgggttaaagagaaaaaaggaaacgtgaagatacttgtaaccaaataatgatggatgcagcgccacgtcagaatctctgtgctgcagctgcagtggtacctagagggcaatttatagctgtaaatacagtgctttgttttgttttcttgttttttgagacaaggtcttgctctgtcacccaggctggagtacagtggcatgatctcggctcaatgcaacctctgtgccaccctgggctcaagtggtcctcctgctccggtcttctgagtagcaggaaccacaggcgtgcgccaccacgcttggctaatgttttttgtatttttttaaatagagacagggtgttgccgtgttacccaggctggtcttgaacttctgagctcaaacgatccaccctccttggcctcccaaagtggtgggattacaggtgtgagtcacctcaccggcccttaaacacagtttttagggaagattccaactcaaacaattttaaatagtagaaaataaaccctgaagcagtgtgcattcattagtactgtgtttgcctgtatttaattaaaacctgattgccattggct

SEQ ID NO: 419452 - DNA, 4293 bp, Homo sapiens
  misc_feature (1942)..(1942): n is a, c, g, or t
agcggataagctccagccttcctgtggccacagcaggaccagagtggaccagcacaccccaggagagaggactggggtcccaggagtaggaggagcccgagcaccatgagctccggagaccctgcacacctcggcctctgcctctggctgtggctgggcgccaccctgggaagagagcaagttcaagcaagcggtctcctgaggctggctgtgctgcctgaggaccggctgcagatgaagtggagagagtcggaggggagcggcctcggctacctggtgcaggtgaagcccatggcaggggactcggaacaggaggtgatactgaccaccaagacccctaaggccacagtggggggcctgagcccctccaagggctacaccttgcagatcttcgagctcactggctctgggcgcttcctgctagctcggagggagtttgtgattgaggatctgaagagtagctccctggacaggagcagccagaggcccctcggctctggagccccggagcccaccccctcacacacacggggagcccagaccctgagcaggcttctgagccccaagttgccttcaaaccaagccaggatccgcgcactcctgccggcccccagtaccgctgcctgccccccgtgcctgctgacatggtcttcctggtggacgggtcctggagcattggccacagtcacttccagcaggtcaaggacttcctggccagtgtcatcgcaccctttgaaatcgggccggataaggtccaagtaggcctgactcagtacagcggggatgctcagactgagtgggacctgaactccctcagcaccaaggaacaggtgctggcagctgtgcgccgcctccgctacaagggggggaacacgttcacaggccttgccctgacccacgtgctggggcagaacctgcagccggcggctggcctccgtccagaggcagccaaggtggtgattctggtgacggacggcaagtcccaggacgatgtgcacactgctgcccgtgtcctcaaggacctgggcgtgaacgtcttcgctgtgggtgtgaagaacgccgatgaggctgagctgaggctcctggcgtccccgccgagggacatcaccgtccacagcgtgctggacttcctgcagctcggcgcgctggctggcctgctcagccgtctcatctgccagaggctccagggtgggagcccgcggcagggcccagcagcggctccagccctggacaccctccctgcccccaccagcctggtcctgagccaggtgacctcctccagcatccgcctgtcctggactccagccccccggcaccccctcaagtatctgatcgtttggcgagcctctagaggtggcacccccagggaggtggtggtggaggggcccgccgcctccacggagctgcacaacctggcctcccgcacagagtacctggtctccgtgttccccatctatgagggcggggttggcgaaggcctgcggggcctggtgaccacagcacctctgcctccgccccgggcgctgaccctggccgcagtgacgcccagaaccgtccacctcacctggcagccctcggccggggccacccactacctggtgcgatgttctcctgcttcccccaagggtgaagaggaggagcgagaggtgcaggtcgggcggcccgaggtgctgctggatggcctggaacctggcagggactatgaggtctcggtgcagagcctgcgaggccctgagggcagcgaggcccggggcatccgtgccaggacccccaccctggcccccccgagacacctgggcttctcagacgtgagccacgacgcggcacgagtgttctgggagggtgccccgaggcctgtgcgcctggtcagggtcacctatgtgtccagcgagggtggacactcggggcagacagaggctcctgggaacgccacctcggccangctggggcctctctcttcctccaccacctacactgtccgtgtcacctgcctctaccctgggggtggctcctctacgctgactggccgggtgaccaccaagaaagctcccagcccaagccagctgtccatgacggagctgccaggggatgcagtccagctggcgtgggtggccgcagccccgtctggcgtgcttgtctaccagatcacgtggacgcccctgggagaggggaaggctcacgagatctctgtcccagggaacctcggcacggccgtcctgcctggcctagggaggcacacagagtacgacgtcaccatcttggcctactacagggacggggcccgcagtgaccctgtgtccctccgctataccccctccacggtgagcaggagcccaccctccaacctggccctggcctcggagacccccgacagcctgcaggtcagctggacgcccccgcttggccgcgtgctccattactggctcacctacgcccccgcctctggcttgggacccgagaaatccgtctctgtgccaggagccaggagccacgtgacactgcccgacctgcaggcagccacgaagtacagggtcctggtctcagctatctatgcagcaggcaggagtgaggctgtgtctgccacgggccagacagcctgcccagccctccgccctgacggctccctcccagggtttgacctgatggtggccttcagcctggtggaaaaggcttatgcgtccatccggggcgtggccatggagccctctgccttcggtgggaccccgaccttcacgctcttcaaggacgcccagctgacaagacgggtcagtgacgtctacccagcccccctacctccagagcacaccatcgtcttccttgtgcgcctacttcccgagacaccccgtgaggccttcgcgctgtggcagatgacagccgaggacttccagcccctccttggggttctgctggatgccgggaagaagtccctgacctacttccaccgtgaccccagggctgccttgcaggaggccaccttcgacccgcaggaagtgaggaagattttcttcgggagcttccacaaggtgcacgtggctgtgggccgctccaaggtcaggctctatgtggactgccggaaggtggctgagcggccccttggggagatgggcagcccacccgctgccggcttcgtcacgctggggaggctggccaaggccaggggcccccggagcagttcggccgcgtttcagctccagatgctgcagatcgtgtgcagtgacacctgggccgatgaggaccggtgctgtgagctccctgcctcgagggatggagagacctgccccgccttcgtgtctgcctgttcctgttcctcagagacccctgggcccccaggacctcaaggacccccaggcctccctgggaggaatggcaccccaggagagcagggcttcccagggcccaggggagagcccgggccacccggacagatgggaccagaaggtcctggaggccagcagggctcgccggggacccagggccgtgcagtccaggggcctgtgggtccaccaggggtcaaaggagagaagggagaccatgggcttccaggcttgcagggccaccccggccaccagggcatccccgggagagttggcctccagggaccaaagggaatgagaggcctggagggaactgctggcctgcctggaccccctggccccagggggttccagggcatggcaggggccaggggcactagtggagagcgaggacctccagggaccgtggggcccacaggactgccagggcccaaaggggaacgaggagagaagggcgagccgcagtcccttgccaccctctaccagcttgtgagccaggcctgtgagtctgccattcagacacacgtgtcaaagttcgactccttccacgagaacaccaggccccccatgcccatcttggagcagaagctggagccgggcactgagcccctggggtcccctggcacccgcagcaaggccctggttcctggagaatgggggcgtggtggccgccaccttgagggcagaggggagcctggagctgttggtcagatgggcagccctgggcagcagggggctagcacccagggcctctgggagtgacaggacattttctgcactgccccgaggaacgctgagccttcctccctgggtttgtctggacaccgagagcgaccacatcctggagaagccaggagaaaagctcaggaagagcctgcaggtggaaggagagggaagcagcggcctcggccaaggcccaccccatactcttggctctgtagcatttccaagttcagataaacccctgagtgctcaccca

SEQ ID NO: 419453 - DNA, 8192 bp, Homo sapiens
  misc_feature (1942)..(1942): n is a, c, g, or t
agcggataagctccagccttcctgtggccacagcaggaccagagtggaccagcacaccccaggagagaggactggggtcccaggagtaggaggagcccgagcaccatgagctccggagaccctgcacacctcggcctctgcctctggctgtggctgggcgccaccctgggaagagagcaagttcaagcaagcggtctcctgaggctggctgtgctgcctgaggaccggctgcagatgaagtggagagagtcggaggggagcggcctcggctacctggtgcaggtgaagcccatggcaggggactcggaacaggaggtgatactgaccaccaagacccctaaggccacagtggggggcctgagcccctccaagggctacaccttgcagatcttcgagctcactggctctgggcgcttcctgctagctcggagggagtttgtgattgaggatctgaagagtagctccctggacaggagcagccagaggcccctcggctctggagccccggagcccaccccctcacacacacggggagcccagaccctgagcaggcttctgagccccaagttgccttcaaaccaagccaggatccgcgcactcctgccggcccccagtaccgctgcctgccccccgtgcctgctgacatggtcttcctggtggacgggtcctggagcattggccacagtcacttccagcaggtcaaggacttcctggccagtgtcatcgcaccctttgaaatcgggccggataaggtccaagtaggcctgactcagtacagcggggatgctcagactgagtgggacctgaactccctcagcaccaaggaacaggtgctggcagctgtgcgccgcctccgctacaagggggggaacacgttcacaggccttgccctgacccacgtgctggggcagaacctgcagccggcggctggcctccgtccagaggcagccaaggtggtgattctggtgacggacggcaagtcccaggacgatgtgcacactgctgcccgtgtcctcaaggacctgggcgtgaacgtcttcgctgtgggtgtgaagaacgccgatgaggctgagctgaggctcctggcgtccccgccgagggacatcaccgtccacagcgtgctggacttcctgcagctcggcgcgctggctggcctgctcagccgtctcatctgccagaggctccagggtgggagcccgcggcagggcccagcagcggctccagccctggacaccctccctgcccccaccagcctggtcctgagccaggtgacctcctccagcatccgcctgtcctggactccagccccccggcaccccctcaagtatctgatcgtttggcgagcctctagaggtggcacccccagggaggtggtggtggaggggcccgccgcctccacggagctgcacaacctggcctcccgcacagagtacctggtctccgtgttccccatctatgagggcggggttggcgaaggcctgcggggcctggtgaccacagcacctctgcctccgccccgggcgctgaccctggccgcagtgacgcccagaaccgtccacctcacctggcagccctcggccggggccacccactacctggtgcgatgttctcctgcttcccccaagggtgaagaggaggagcgagaggtgcaggtcgggcggcccgaggtgctgctggatggcctggaacctggcagggactatgaggtctcggtgcagagcctgcgaggccctgagggcagcgaggcccggggcatccgtgccaggacccccaccctggcccccccgagacacctgggcttctcagacgtgagccacgacgcggcacgagtgttctgggagggtgccccgaggcctgtgcgcctggtcagggtcacctatgtgtccagcgagggtggacactcggggcagacagaggctcctgggaacgccacctcggccangctggggcctctctcttcctccaccacctacactgtccgtgtcacctgcctctaccctgggggtggctcctctacgctgactggccgggtgaccaccaagaaagctcccagcccaagccagctgtccatgacggagctgccaggggatgcagtccagctggcgtgggtggccgcagccccgtctggcgtgcttgtctaccagatcacgtggacgcccctgggagaggggaaggctcacgagatctctgtcccagggaacctcggcacggccgtcctgcctggcctagggaggcacacagagtacgacgtcaccatcttggcctactacagggacggggcccgcagtgaccctgtgtccctccgctataccccctccacggtgagcaggagcccaccctccaacctggccctggcctcggagacccccgacagcctgcaggtcagctggacgcccccgcttggccgcgtgctccattactggctcacctacgcccccgcctctggcttgggacccgagaaatccgtctctgtgccaggagccaggagccacgtgacactgcccgacctgcaggcagccacgaagtacagggtcctggtctcagctatctatgcagcaggcaggagtgaggctgtgtctgccacgggccagacagcctgcccagccctccgccctgacggctccctcccagggtttgacctgatggtggccttcagcctggtggaaaaggcttatgcgtccatccggggcgtggccatggagccctctgccttcggtgggaccccgaccttcacgctcttcaaggacgcccagctgacaagacgggtcagtgacgtctacccagcccccctacctccagagcacaccatcgtcttccttgtgcgcctacttcccgagacaccccgtgaggccttcgcgctgtggcagatgacagccgaggacttccagcccctccttggggttctgctggatgccgggaagaagtccctgacctacttccaccgtgaccccagggctgccttgcaggaggccaccttcgacccgcaggaagtgaggaagattttcttcgggagcttccacaaggtgcacgtggctgtgggccgctccaaggtcaggctctatgtggactgccggaaggtggctgagcggccccttggggagatgggcagcccacccgctgccggcttcgtcacgctggggaggctggccaaggccaggggcccccggagcagttcggccgcgtttcagctccagatgctgcagatcgtgtgcagtgacacctgggccgatgaggaccggtgctgtgagctccctgcctcgagggatggagagacctgccccgccttcgtgtctgcctgttcctgttcctcagagacccctgggcccccaggacctcaaggacccccaggcctccctgggaggaatggcaccccaggagagcagggcttcccagggcccaggggagagcccgggccacccggacagatgggaccagaaggtcctggaggccagcagggctcgccggggacccagggccgtgcagtccaggggcctgtgggtccaccaggggtcaaaggagagaagggagaccatgggcttccaggcttgcagggccaccccggccaccagggcatccccgggagagttggcctccagggaccaaagggaatgagaggcctggagggaactgctggcctgcctggaccccctggccccagggggttccagggcatggcaggggccaggggcactagtggagagcgaggacctccagggaccgtggggcccacaggactgccagggcccaaaggggaacgaggagagaagggcgagccgcagtcccttgccaccctctaccagcttgtgagccaggcctcacacgtgtcaaagttcgactccttccacgagaacaccaggccccccatgcccatcttggagcagaagctggagccgggcactgagcccctggggtcccctggcacccgcagcaaggccctggttcctggagaatgggggcgtggtggccgccaccttgagggcagaggggagcctggagctgttggtcagatgggcagccctgggcagcagggggctagcacccagggcctctgggagtgacaggacattttctgcactgccccgaggaacgctgagccttcctccctgggtttgtctggacaccgagagcgaccacatcctggagaagccaggagaaaagctcaggaagagcctgcaggtggaaggagagggaagcagcggcctcggccaaggcccaccccatactcttggctctgtagcatttccaagttcagataaacccctgagtgctcacccagccaagcgaggcgggagtcatttcctgggagagtgtcccccaccctggctctgtgcaccccaccttgaggccctgcagcttcagccgcagtggggaaggggaggggctgggctgatggcgaatcgggttcaggagggcagcagtgccctgtggccgtctcagtagctctaaaacaggctcaacaacatgccccgcccctttctctgggcctcatctaagcctggccagggccctgtgggcccgcctctctctgcgcctcacgcaggcaacagatggttccactgctggcccaccagtcacctgcacgatggctcctccctcagaacagcactcccaccccggccccagcaccttcacatctgggcacaggcaggtccctgcctgcctcatcgtcccctctgtccccagcccaagaaggagttcagatcctgtgtgtgaatggccacccctcacccacccagccctgtgctgagttccttgtgcagggacattgctttgagacttggcaccatcagcccctggtccttagggtctcagagcaaggtcatccctcagcaggcttctggcctgtgcgctcctcagcacctctgcccaggtctctcccaaccatcacagacgctgtgtgagcctggacttcctgccttatccccactgtggcccaaacagcatgggggcaagctcagaacacacacctgggcttctgggccttgtggcccgtgggggtgatgtgggaacttctacttcctttccaaacaaatattcagtaactagtccactgttaccacttaggcagctaagcaagaaaggtgccagaaatgaagagggaagccatatcattgaggagagaatgaaaagtattaaaaaggaacaaagagagacccttgatattgacagaaggaaaacccaccaagatcaccagtgcagcattgcgtgcaccaaagcataccccaaagaggtgagcgcaaaacagcttcagggcaaacacttcatctatgattcaactgttccaggaactgaccagacctggagaccaaatagagagtcataggcagggtcagcaggatgggagagagcgcctgcacccacaggagccacagccctgactgaggccaggaagcagccccaaatgccagctcccactgcagcatgagaacagaaacagaccactgaaaattcccaaagtctgtggacaaatcagacgtcgaagaagtcacgtggcatcgagacagattttgcactgagggacaaggagagcatgtggccaaagtaggtgcaggtaaagcagcatctggggcagagttatagccttcagtgcaggtatcagacacagttgttgagagcagcagcccaagccagcccctccgtcctgcagggaggacacctaggtcacttggcttctgttggggagctgagttgcttcagattgtgtgaccagcaaaacagcttggttgctctcacttggtttctccagggcggggaattacatgtccccagctgaactgagaaggctctttgagcagtggagtgagcaggctttgtcatgaggcaggagtggggctagaatcaagcccagagcccacagggcatccagagccttccaaaggagcccctctcctggggctctccaatttgatgaagggactgggcactgggtggctgagaccacattggcagccaggaggaggcagcctggccggggggaaccagggtggctctaatccccaccaccccctcagctgccctacccccgccacgctggtgtgacaccagtgatgctcagcctcaaaaggggagtccggctgtcttcgggaaactgactttatgctggaggccaattaaaatggcacagcaaaggcagcggccagctggtgcccaggcagcttagggactggtccctgaggccccacccgccccagcctgtgcagtggagctgagtacgaatcaaaggtgaggatggcaagggagctgagagcagcctccggatgcaccaaaccggcctggctcctgtttgcaggaaggcagcctccccgagacccagccgacctgcacgtctcccatcagccccgactccaccgcatccctctgggtccttttaggagcccccagggactgagccggggctcacgctcctggccagagcgctgggtttctggcaatgcctcccctcctgcctttacggccacagctctcccctccagaggcccctctgtagtgggcctcggtcccctctccacccccagaggcagcacagcttcagccctacgcagtgtgggggctccgggaggaaatgcagggaggtgcttggtcttggcccagagctcatggccttaggtgctgcccccagtcacccccgtgcccatgcagccggggatgttcagctcaggccagccaccgaggtggtgtgacgcaaggctgatctgacgctcagctcaggccgctggggtcatgggggttgtgggaaggtcatggaatcacggggctcacgctggggtcacagggtggtgtggctgtgtggactgtaaggggcgtgcagccatgcgtatctgacctgccctccctaggtctgcaggcagtgccgagtggctctgcctgaggccccaagagcgaccttggaagctccaggccttcacagcccctctgagagccacctgcaaggtggggagctgggaagaacggctcagtgatgagctcagagggaggggtgggcacagcgcccaggaaggcgggtgcgtgcaggcctgggaggaatgtgtagcaggaggcagggggtgctgtgcccgcaggaccagcaggtgaggcgtgtccacccacaggatggctctggcccaggcagtgtcagaaatggaagctgaggaaacccaaccccagctgtagaggagcctgccccgatgccatctgcacctggggggcgacgtatggctgccagcctcttcatctaccaaggaccagggcagtggggacgggagagctgggacacgtggactcacaccagggcagatggtgggggaagccagtgtctgtagattcagtgcatttcttggggaagggcgtggaacatttggacttgagccccagcacagagacgatgtcataatacagccccccatcgtgatctgatggtaagtacagaactccttgcccagtggagaaacactctcctctcatgtgtggaatatccacacactaaccatgaactgggccataagaaaccttacattccaaaggatcctgctgttcagaactcactcactcactgatgaaactggaaaaacaaccaatgataacaagctaaagaatgcctctagaagctaaaagacacacccatgactccacagtaattcatgggttaaagagaaaaaaggaaacgtgaagatacttgtaaccaaataatgatggatgcagcgccacgtcagaatctctgtgctgcagctgcagtggtacctagagggcaatttatagctgtaaatacagtgctttgttttgttttcttgttttttgagacaaggtcttgctctgtcacccaggctggagtacagtggcatgatctcggctcaatgcaacctctgtgccaccctgggctcaagtggtcctcctgctccggtcttctgagtagcaggaaccacaggcgtgcgccaccacgcttggctaatgttttttgtatttttttaaatagagacagggtgttgccgtgttacccaggctggtcttgaacttctgagctcaaacgatccaccctccttggcctcccaaagtggtgggattacaggtgtgagtcacctcaccggcccttaaacacagtttttagggaagattccaactcaaacaattttaaatagtagaaaataaaccctgaagcagtgtgcattcattagtactgtgtttgcctgtatttaattaaaacctgattgccattggct

SEQ ID NO: 419454 - DNA, 4510 bp, Homo sapiens
  misc_feature (1942)..(1942): n is a, c, g, or t
agcggataagctccagccttcctgtggccacagcaggaccagagtggaccagcacaccccaggagagaggactggggtcccaggagtaggaggagcccgagcaccatgagctccggagaccctgcacacctcggcctctgcctctggctgtggctgggcgccaccctgggaagagagcaagttcaagcaagcggtctcctgaggctggctgtgctgcctgaggaccggctgcagatgaagtggagagagtcggaggggagcggcctcggctacctggtgcaggtgaagcccatggcaggggactcggaacaggaggtgatactgaccaccaagacccctaaggccacagtggggggcctgagcccctccaagggctacaccttgcagatcttcgagctcactggctctgggcgcttcctgctagctcggagggagtttgtgattgaggatctgaagagtagctccctggacaggagcagccagaggcccctcggctctggagccccggagcccaccccctcacacacacggggagcccagaccctgagcaggcttctgagccccaagttgccttcaaaccaagccaggatccgcgcactcctgccggcccccagtaccgctgcctgccccccgtgcctgctgacatggtcttcctggtggacgggtcctggagcattggccacagtcacttccagcaggtcaaggacttcctggccagtgtcatcgcaccctttgaaatcgggccggataaggtccaagtaggcctgactcagtacagcggggatgctcagactgagtgggacctgaactccctcagcaccaaggaacaggtgctggcagctgtgcgccgcctccgctacaagggggggaacacgttcacaggccttgccctgacccacgtgctggggcagaacctgcagccggcggctggcctccgtccagaggcagccaaggtggtgattctggtgacggacggcaagtcccaggacgatgtgcacactgctgcccgtgtcctcaaggacctgggcgtgaacgtcttcgctgtgggtgtgaagaacgccgatgaggctgagctgaggctcctggcgtccccgccgagggacatcaccgtccacagcgtgctggacttcctgcagctcggcgcgctggctggcctgctcagccgtctcatctgccagaggctccagggtgggagcccgcggcagggcccagcagcggctccagccctggacaccctccctgcccccaccagcctggtcctgagccaggtgacctcctccagcatccgcctgtcctggactccagccccccggcaccccctcaagtatctgatcgtttggcgagcctctagaggtggcacccccagggaggtggtggtggaggggcccgccgcctccacggagctgcacaacctggcctcccgcacagagtacctggtctccgtgttccccatctatgagggcggggttggcgaaggcctgcggggcctggtgaccacagcacctctgcctccgccccgggcgctgaccctggccgcagtgacgcccagaaccgtccacctcacctggcagccctcggccggggccacccactacctggtgcgatgttctcctgcttcccccaagggtgaagaggaggagcgagaggtgcaggtcgggcggcccgaggtgctgctggatggcctggaacctggcagggactatgaggtctcggtgcagagcctgcgaggccctgagggcagcgaggcccggggcatccgtgccaggacccccaccctggcccccccgagacacctgggcttctcagacgtgagccacgacgcggcacgagtgttctgggagggtgccccgaggcctgtgcgcctggtcagggtcacctatgtgtccagcgagggtggacactcggggcagacagaggctcctgggaacgccacctcggccangctggggcctctctcttcctccaccacctacactgtccgtgtcacctgcctctaccctgggggtggctcctctacgctgactggccgggtgaccaccaagaaagctcccagcccaagccagctgtccatgacggagctgccaggggatgcagtccagctggcgtgggtggccgcagccccgtctggcgtgcttgtctaccagatcacgtggacgcccctgggagaggggaaggctcacgagatctctgtcccagggaacctcggcacggccgtcctgcctggcctagggaggcacacagagtacgacgtcaccatcttggcctactacagggacggggcccgcagtgaccctgtgtccctccgctataccccctccacggtgagcaggagcccaccctccaacctggccctggcctcggagacccccgacagcctgcaggtcagctggacgcccccgcttggccgcgtgctccattactggctcacctacgcccccgcctctggcttgggacccgagaaatccgtctctgtgccaggagccaggagccacgtgacactgcccgacctgcaggcagccacgaagtacagggtcctggtctcagctatctatgcagcaggcaggagtgaggctgtgtctgccacgggccagacagcctgcccagccctccgccctgacggctccctcccagggtttgacctgatggtggccttcagcctggtggaaaaggcttatgcgtccatccggggcgtggccatggagccctctgccttcggtgggaccccgaccttcacgctcttcaaggacgcccagctgacaagacgggtcagtgacgtctacccagcccccctacctccagagcacaccatcgtcttccttgtgcgcctacttcccgagacaccccgtgaggccttcgcgctgtggcagatgacagccgaggacttccagcccctccttggggttctgctggatgccgggaagaagtccctgacctacttccaccgtgaccccagggctgccttgcaggaggccaccttcgacccgcaggaagtgaggaagattttcttcgggagcttccacaaggtgcacgtggctgtgggccgctccaaggtcaggctctatgtggactgccggaaggtggctgagcggccccttggggagatgggcagcccacccgctgccggcttcgtcacgctggggaggctggccaaggccaggggcccccggagcagttcggccgcgtttcagctccagatgctgcagatcgtgtgcagtgacacctgggccgatgaggaccggtgctgtgagctccctgcctcggtgtgccccgtcccttgcccctgttccacgaagcaagttagggcaagtgcccactgagggtcacagtgcctgggagggatggagagacctgccccgccttcgtgtctgcctgttcctgttcctcagagacccctgggcccccaggacctcaaggacccccagttccagcgccccacaggtgacggctggggcttccagagctggctctgggaccggtcaagcacactctctctgagctcagtgtccacagccttgtctactcagggggccggggtttgaacccagaactgcctgactatgagagggcctccctgggaggaatggcaccccaggagagcagggcttcccagggcccaggggagagcccgggccacccggacagatgggaccagaaggtcctggaggccagcagggctcgccggggacccagggccgtgcagtccaggggcctgtgggtccaccaggggtcaaaggagagaagggagaccatgggcttccaggcttgcagggccaccccggccaccagggcatccccgggagagttggcctccagggaccaaagggaatgagaggcctggagggaactgctggcctgcctggaccccctggccccagggggttccagggcatggcaggggccaggggcactagtggagagcgaggacctccagggaccgtggggcccacaggactgccagggcccaaaggggaacgaggagagaagggcgagccgcagtcccttgccaccctctaccagcttgtgagccaggcctgtgagtctgccattcagacacacgtgtcaaagttcgactccttccacgagaacaccaggccccccatgcccatcttggagcagaagctggagccgggcactgagcccctggggtcccctggcacccgcagcaaggccctggttcctggagaatgggggcgtggtggccgccaccttgagggcagaggggagcctggagctgttggtcagatgggcagccctgggcagcagggggctagcacccagggcctctgggagtgacaggacattttctgcactgccccgaggaacgctgagccttcctccctgggtttgtctggacaccgagagcgaccacatcctggagaagccaggagaaaagctcaggaagagcctgcaggtggaaggagagggaagcagcggcctcggccaaggcccaccccatactcttggctctgtagcatttccaagttcagataaacccctgagtgctcaccca

SEQ ID NO: 419455 - DNA, 4017 bp, Homo sapiens
  misc_feature (1942)..(1942): n is a, c, g, or t
agcggataagctccagccttcctgtggccacagcaggaccagagtggaccagcacaccccaggagagaggactggggtcccaggagtaggaggagcccgagcaccatgagctccggagaccctgcacacctcggcctctgcctctggctgtggctgggcgccaccctgggaagagagcaagttcaagcaagcggtctcctgaggctggctgtgctgcctgaggaccggctgcagatgaagtggagagagtcggaggggagcggcctcggctacctggtgcaggtgaagcccatggcaggggactcggaacaggaggtgatactgaccaccaagacccctaaggccacagtggggggcctgagcccctccaagggctacaccttgcagatcttcgagctcactggctctgggcgcttcctgctagctcggagggagtttgtgattgaggatctgaagagtagctccctggacaggagcagccagaggcccctcggctctggagccccggagcccaccccctcacacacacggggagcccagaccctgagcaggcttctgagccccaagttgccttcaaaccaagccaggatccgcgcactcctgccggcccccagtaccgctgcctgccccccgtgcctgctgacatggtcttcctggtggacgggtcctggagcattggccacagtcacttccagcaggtcaaggacttcctggccagtgtcatcgcaccctttgaaatcgggccggataaggtccaagtaggcctgactcagtacagcggggatgctcagactgagtgggacctgaactccctcagcaccaaggaacaggtgctggcagctgtgcgccgcctccgctacaagggggggaacacgttcacaggccttgccctgacccacgtgctggggcagaacctgcagccggcggctggcctccgtccagaggcagccaaggtggtgattctggtgacggacggcaagtcccaggacgatgtgcacactgctgcccgtgtcctcaaggacctgggcgtgaacgtcttcgctgtgggtgtgaagaacgccgatgaggctgagctgaggctcctggcgtccccgccgagggacatcaccgtccacagcgtgctggacttcctgcagctcggcgcgctggctggcctgctcagccgtctcatctgccagaggctccagggtgggagcccgcggcagggcccagcagcggctccagccctggacaccctccctgcccccaccagcctggtcctgagccaggtgacctcctccagcatccgcctgtcctggactccagccccccggcaccccctcaagtatctgatcgtttggcgagcctctagaggtggcacccccagggaggtggtggtggaggggcccgccgcctccacggagctgcacaacctggcctcccgcacagagtacctggtctccgtgttccccatctatgagggcggggttggcgaaggcctgcggggcctggtgaccacagcacctctgcctccgccccgggcgctgaccctggccgcagtgacgcccagaaccgtccacctcacctggcagccctcggccggggccacccactacctggtgcgatgttctcctgcttcccccaagggtgaagaggaggagcgagaggtgcaggtcgggcggcccgaggtgctgctggatggcctggaacctggcagggactatgaggtctcggtgcagagcctgcgaggccctgagggcagcgaggcccggggcatccgtgccaggacccccaccctggcccccccgagacacctgggcttctcagacgtgagccacgacgcggcacgagtgttctgggagggtgccccgaggcctgtgcgcctggtcagggtcacctatgtgtccagcgagggtggacactcggggcagacagaggctcctgggaacgccacctcggccangctggggcctctctcttcctccaccacctacactgtccgtgtcacctgcctctaccctgggggtggctcctctacgctgactggccgggtgaccaccaagaaagctcccagcccaagccagctgtccatgacggagctgccaggggatgcagtccagctggcgtgggtggccgcagccccgtctggcgtgcttgtctaccagatcacgtggacgcccctgggagaggggaaggctcacgagatctctgtcccagggaacctcggcacggccgtcctgcctggcctagggaggcacacagagtacgacgtcaccatcttggcctactacagggacggggcccgcagtgaccctgtgtccctccgctataccccctccacggtgagcaggagcccaccctccaacctggccctggcctcggagacccccgacagcctgcaggtcagctggacgcccccgcttggccgcgtgctccattactggctcacctacgcccccgcctctggcttgggacccgagaaatccgtctctgtgccaggagccaggagccacgtgacactgcccgacctgcaggcagccacgaagtacagggtcctggtctcagctatctatgcagcaggcaggagtgaggctgtgtctgccacgggccagacagcctgcccagccctccgccctgacggctccctcccagggtttgacctgatggtggccttcagcctggtggaaaaggcttatgcgtccatccggggcgtggccatggagccctctgccttcggtgggaccccgaccttcacgctcttcaaggacgcccagctgacaagacgggtcagtgacgtctacccagcccccctacctccagagcacaccatcgtcttccttgtgcgcctacttcccgagacaccccgtgaggccttcgcgctgtggcagatgacagccgaggacttccagcccctccttggggttctgctggatgccgggaagaagtccctgacctacttccaccgtgaccccagggctgccttgcaggaggccaccttcgacccgcaggaagtgaggaagattttcttcgggagcttccacaaggtgcacgtggctgtgggccgctccaaggtcaggctctatgtggactgccggaaggtggctgagcggccccttggggagatgggcagcccacccgctgccggcttcgtcacgctggggaggctggccaaggccaggggcccccggagcagttcggccgcgtttcagctccagatgctgcagatcgtgtgcagtgacacctgggccgatgaggaccggtgctgtgagctccctgcctcgagggatggagagacctgccccgccttcgtgtctgcctgttcctgttcctcagagacccctgggcccccaggacctcaaggacccccaggcctccctgggaggaatggcaccccaggagagcagggcttcccagggcccaggggagagcccgggccacccggacagatgggaccagaaggtcctggaggccagcagggctcgccggggacccagggccgtgcagtccaggggcctgtgggtccaccaggggtcaaaggagagaagggagaccatgggcttccaggcttgcagggccaccccggccaccagggcatccccgggagagttggcctccagggaccaaagggaatgagaggcctggagggaactgctggcctgcctggaccccctggccccagggggttccagggcatggcaggggccaggggcactagtggagagcgaggacctccagggaccgtggggcccacaggactgcagggccaaagggaccaggagagaaggcgagcgagtccttgccacctctacagttgtgagcagggcctggagttgccattcgacaccgtgtccagtccggctcttcccgggaaaacagggcccccatgcccttttggggcccaacttgggacctcggacctgaagcccggggtccccggggaccgcaaaaaggcctggtctcgggcaatggggtggtggcgcacctcattggcaaggcgatacagagaggcaaacaagagccgccagcgaggacaacaag

SEQ ID NO: 419456 - DNA, 3126 bp, Homo sapiens
  misc_feature (1942)..(1942): n is a, c, g, or t
agcggataagctccagccttcctgtggccacagcaggaccagagtggaccagcacaccccaggagagaggactggggtcccaggagtaggaggagcccgagcaccatgagctccggagaccctgcacacctcggcctctgcctctggctgtggctgggcgccaccctgggaagagagcaagttcaagcaagcggtctcctgaggctggctgtgctgcctgaggaccggctgcagatgaagtggagagagtcggaggggagcggcctcggctacctggtgcaggtgaagcccatggcaggggactcggaacaggaggtgatactgaccaccaagacccctaaggccacagtggggggcctgagcccctccaagggctacaccttgcagatcttcgagctcactggctctgggcgcttcctgctagctcggagggagtttgtgattgaggatctgaagagtagctccctggacaggagcagccagaggcccctcggctctggagccccggagcccaccccctcacacacacggggagcccagaccctgagcaggcttctgagccccaagttgccttcaaaccaagccaggatccgcgcactcctgccggcccccagtaccgctgcctgccccccgtgcctgctgacatggtcttcctggtggacgggtcctggagcattggccacagtcacttccagcaggtcaaggacttcctggccagtgtcatcgcaccctttgaaatcgggccggataaggtccaagtaggcctgactcagtacagcggggatgctcagactgagtgggacctgaactccctcagcaccaaggaacaggtgctggcagctgtgcgccgcctccgctacaagggggggaacacgttcacaggccttgccctgacccacgtgctggggcagaacctgcagccggcggctggcctccgtccagaggcagccaaggtggtgattctggtgacggacggcaagtcccaggacgatgtgcacactgctgcccgtgtcctcaaggacctgggcgtgaacgtcttcgctgtgggtgtgaagaacgccgatgaggctgagctgaggctcctggcgtccccgccgagggacatcaccgtccacagcgtgctggacttcctgcagctcggcgcgctggctggcctgctcagccgtctcatctgccagaggctccagggtgggagcccgcggcagggcccagcagcggctccagccctggacaccctccctgcccccaccagcctggtcctgagccaggtgacctcctccagcatccgcctgtcctggactccagccccccggcaccccctcaagtatctgatcgtttggcgagcctctagaggtggcacccccagggaggtggtggtggaggggcccgccgcctccacggagctgcacaacctggcctcccgcacagagtacctggtctccgtgttccccatctatgagggcggggttggcgaaggcctgcggggcctggtgaccacagcacctctgcctccgccccgggcgctgaccctggccgcagtgacgcccagaaccgtccacctcacctggcagccctcggccggggccacccactacctggtgcgatgttctcctgcttcccccaagggtgaagaggaggagcgagaggtgcaggtcgggcggcccgaggtgctgctggatggcctggaacctggcagggactatgaggtctcggtgcagagcctgcgaggccctgagggcagcgaggcccggggcatccgtgccaggacccccaccctggcccccccgagacacctgggcttctcagacgtgagccacgacgcggcacgagtgttctgggagggtgccccgaggcctgtgcgcctggtcagggtcacctatgtgtccagcgagggtggacactcggggcagacagaggctcctgggaacgccacctcggccangctggggcctctctcttcctccaccacctacactgtccgtgtcacctgcctctaccctgggggtggctcctctacgctgactggccgggtgaccaccaagaaagctcccagcccaagccagctgtccatgacggagctgccaggggatgcagtccagctggcgtgggtggccgcagccccgtctggcgtgcttgtctaccagatcacgtggacgcccctgggagaggggaaggctcacgagatctctgtcccagggaacctcggcacggccgtcctgcctggcctagggaggcacacagagtacgacgtcaccatcttggcctactacagggacggggcccgcagtgaccctgtgtccctccgctataccccctccacggtgagcaggagcccaccctccaacctggccctggcctcggagacccccgacagcctgcaggtcagctggacgcccccgcttggccgcgtgctccattactggctcacctacgcccccgcctctggcttgggacccgagaaatccgtctctgtgccaggagccaggagccacgtgacactgcccgacctgcaggcagccacgaagtacagggtcctggtctcagctatctatgcagcaggcaggagtgaggctgtgtctgccacgggccagacagcctgcccagccctccgccctgacggctccctcccagggtttgacctgatggtggccttcagcctggtggaaaaggcttatgcgtccatccggggcgtggccatggagccctctgccttcggtgggaccccgaccttcacgctcttcaaggacgcccagctgacaagacgggtcagtgacgtctacccagcccccctacctccagagcacaccatcgtcttccttgtgcgcctacttcccgagacaccccgtgaggccttcgcgctgtggcagatgacagccgaggacttccagcccctccttggggttctgctggatggtgacgtgggccccgcgtcgcccccagcagtcaggaggagtaggggcagggaggccccagagccctgggaggccttcagaggaagtccagcctccaggccaggccctcagcaccctctgggtgggaggcaggtgtcccgggcagggggctgtgggccacattgagggtcacctccagcttggcaccctcagggctgctcctgtcctgtcgtgg

SEQ ID NO: 419457 - DNA, 8098 bp, Homo sapiens
  misc_feature (1926)..(1926): n is a, c, g, or t
gtcagggagaggacagacggggggacggctgaagggcatggcctcttccctgccacagcccgagcaccatgagctccggagaccctgcacacctcggcctctgcctctggctgtggctgggcgccaccctgggaagagagcaagttcaagcaagcggtctcctgaggctggctgtgctgcctgaggaccggctgcagatgaagtggagagagtcggaggggagcggcctcggctacctggtgcaggtgaagcccatggcaggggactcggaacaggaggtgatactgaccaccaagacccctaaggccacagtggggggcctgagcccctccaagggctacaccttgcagatcttcgagctcactggctctgggcgcttcctgctagctcggagggagtttgtgattgaggatctgaagagtagctccctggacaggagcagccagaggcccctcggctctggagccccggagcccaccccctcacacacacggggagcccagaccctgagcaggcttctgagccccaagttgccttcaaaccaagccaggatccgcgcactcctggtgggtcagagtggagagagaccggcccccagtaccgctgcctgccccccgtgcctgctgacatggtcttcctggtggacgggtcctggagcattggccacagtcacttccagcaggtcaaggacttcctggccagtgtcatcgcaccctttgaaatcgggccggataaggtccaagtaggcctgactcagtacagcggggatgctcagactgagtgggacctgaactccctcagcaccaaggaacaggtgctggcagctgtgcgccgcctccgctacaagggggggaacacgttcacaggccttgccctgacccacgtgctggggcagaacctgcagccggcggctggcctccgtccagaggcagccaaggtggtgattctggtgacggacggcaagtcccaggacgatgtgcacactgctgcccgtgtcctcaaggacctgggcgtgaacgtcttcgctgtgggtgtgaagaacgccgatgaggctgagctgaggctcctggcgtccccgccgagggacatcaccgtccacagcgtgctggacttcctgcagctcggcgcgctggctggcctgctcagccgtctcatctgccagaggctccagggtgggagcccgcggcagggcccagcagcggctccagccctggacaccctccctgcccccaccagcctggtcctgagccaggtgacctcctccagcatccgcctgtcctggactccagccccccggcaccccctcaagtatctgatcgtttggcgagcctctagaggtggcacccccagggaggtggtggtggaggggcccgccgcctccacggagctgcacaacctggcctcccgcacagagtacctggtctccgtgttccccatctatgagggcggggttggcgaaggcctgcggggcctggtgaccacagcacctctgcctccgccccgggcgctgaccctggccgcagtgacgcccagaaccgtccacctcacctggcagccctcggccggggccacccactacctggtgcgatgttctcctgcttcccccaagggtgaagaggaggagcgagaggtgcaggtcgggcggcccgaggtgctgctggatggcctggaacctggcagggactatgaggtctcggtgcagagcctgcgaggccctgagggcagcgaggcccggggcatccgtgccaggacccccaccctggcccccccgagacacctgggcttctcagacgtgagccacgacgcggcacgagtgttctgggagggtgccccgaggcctgtgcgcctggtcagggtcacctatgtgtccagcgagggtggacactcggggcagacagaggctcctgggaacgccacctcggccangctggggcctctctcttcctccaccacctacactgtccgtgtcacctgcctctaccctgggggtggctcctctacgctgactggccgggtgaccaccaagaaagctcccagcccaagccagctgtccatgacggagctgccaggggatgcagtccagctggcgtgggtggccgcagccccgtctggcgtgcttgtctaccagatcacgtggacgcccctgggagaggggaaggctcacgagatctctgtcccagggaacctcggcacggccgtcctgcctggcctagggaggcacacagagtacgacgtcaccatcttggcctactacagggacggggcccgcagtgaccctgtgtccctccgctataccccctccacggtgagcaggagcccaccctccaacctggccctggcctcggagacccccgacagcctgcaggtcagctggacgcccccgcttggccgcgtgctccattactggctcacctacgcccccgcctctggcttgggacccgagaaatccgtctctgtgccaggagccaggagccacgtgacactgcccgacctgcaggcagccacgaagtacagggtcctggtctcagctatctatgcagcaggcaggagtgaggctgtgtctgccacgggccagacagcctgcccagccctccgccctgacggctccctcccagggtttgacctgatggtggccttcagcctggtggaaaaggcttatgcgtccatccggggcgtggccatggagccctctgccttcggtgggaccccgaccttcacgctcttcaaggacgcccagctgacaagacgggtcagtgacgtctacccagcccccctacctccagagcacaccatcgtcttccttgtgcgcctacttcccgagacaccccgtgaggccttcgcgctgtggcagatgacagccgaggacttccagcccctccttggggttctgctggatgccgggaagaagtccctgacctacttccaccgtgaccccagggctgccttgcaggaggccaccttcgacccgcaggaagtgaggaagattttcttcgggagcttccacaaggtgcacgtggctgtgggccgctccaaggtcaggctctatgtggactgccggaaggtggctgagcggccccttggggagatgggcagcccacccgctgccggcttcgtcacgctggggaggctggccaaggccaggggcccccggagcagttcggccgcgtttcagctccagatgctgcagatcgtgtgcagtgacacctgggccgatgaggaccggtgctgtgagctccctgcctcgagggatggagagacctgccccgccttcgtgtctgcctgttcctgttcctcagagacccctgggcccccaggacctcaaggacccccaggcctccctgggaggaatggcaccccaggagagcagggcttcccagggcccaggggtccaccaggggtcaaaggagagaagggagaccatgggcttccaggcttgcagggccaccccggccaccagggcatccccgggagagttggcctccagggaccaaagggaatgagaggcctggagggaactgctggcctgcctggaccccctggccccagggggttccagggcatggcaggggccaggggcactagtggagagcgaggacctccagggaccgtggggcccacaggactgccagggcccaaaggggaacgaggagagaagggcgagccgcagtcccttgccaccctctaccagcttgtgagccaggcctgtgagtctgccattcagacacacgtgtcaaagttcgactccttccacgagaacaccaggccccccatgcccatcttggagcagaagctggagccgggcactgagcccctggggtcccctggcacccgcagcaaggccctggttcctggagaatgggggcgtggtggccgccaccttgagggcagaggggagcctggagctgttggtcagatgggcagccctgggcagcagggggctagcacccagggcctctgggagtgacaggacattttctgcactgccccgaggaacgctgagccttcctccctgggtttgtctggacaccgagagcgaccacatcctggagaagccaggagaaaagctcaggaagagcctgcaggtggaaggagagggaagcagcggcctcggccaaggcccaccccatactcttggctctgtagcatttccaagttcagataaacccctgagtgctcacccagccaagcgaggcgggagtcatttcctgggagagtgtcccccaccctggctctgtgcaccccaccttgaggccctgcagcttcagccgcagtggggaaggggaggggctgggctgatggcgaatcgggttcaggagggcagcagtgccctgtggccgtctcagtagctctaaaacaggctcaacaacatgccccgcccctttctctgggcctcatctaagcctggccagggccctgtgggcccgcctctctctgcgcctcacgcaggcaacagatggttccactgctggcccaccagtcacctgcacgatggctcctccctcagaacagcactcccaccccggccccagcaccttcacatctgggcacaggcaggtccctgcctgcctcatcgtcccctctgtccccagcccaagaaggagttcagatcctgtgtgtgaatggccacccctcacccacccagccctgtgctgagttccttgtgcagggacattgctttgagacttggcaccatcagcccctggtccttagggtctcagagcaaggtcatccctcagcaggcttctggcctgtgcgctcctcagcacctctgcccaggtctctcccaaccatcacagacgctgtgtgagcctggacttcctgccttatccccactgtggcccaaacagcatgggggcaagctcagaacacacacctgggcttctgggccttgtggcccgtgggggtgatgtgggaacttctacttcctttccaaacaaatattcagtaactagtccactgttaccacttaggcagctaagcaagaaaggtgccagaaatgaagagggaagccatatcattgaggagagaatgaaaagtattaaaaaggaacaaagagagacccttgatattgacagaaggaaaacccaccaagatcaccagtgcagcattgcgtgcaccaaagcataccccaaagaggtgagcgcaaaacagcttcagggcaaacacttcatctatgattcaactgttccaggaactgaccagacctggagaccaaatagagagtcataggcagggtcagcaggatgggagagagcgcctgcacccacaggagccacagccctgactgaggccaggaagcagccccaaatgccagctcccactgcagcatgagaacagaaacagaccactgaaaattcccaaagtctgtggacaaatcagacgtcgaagaagtcacgtggcatcgagacagattttgcactgagggacaaggagagcatgtggccaaagtaggtgcaggtaaagcagcatctggggcagagttatagccttcagtgcaggtatcagacacagttgttgagagcagcagcccaagccagcccctccgtcctgcagggaggacacctaggtcacttggcttctgttggggagctgagttgcttcagattgtgtgaccagcaaaacagcttggttgctctcacttggtttctccagggcggggaattacatgtccccagctgaactgagaaggctctttgagcagtggagtgagcaggctttgtcatgaggcaggagtggggctagaatcaagcccagagcccacagggcatccagagccttccaaaggagcccctctcctggggctctccaatttgatgaagggactgggcactgggtggctgagaccacattggcagccaggaggaggcagcctggccggggggaaccagggtggctctaatccccaccaccccctcagctgccctacccccgccacgctggtgtgacaccagtgatgctcagcctcaaaaggggagtccggctgtcttcgggaaactgactttatgctggaggccaattaaaatggcacagcaaaggcagcggccagctggtgcccaggcagcttagggactggtccctgaggccccacccgccccagcctgtgcagtggagctgagtacgaatcaaaggtgaggatggcaagggagctgagagcagcctccggatgcaccaaaccggcctggctcctgtttgcaggaaggcagcctccccgagacccagccgacctgcacgtctcccatcagccccgactccaccgcatccctctgggtccttttaggagcccccagggactgagccggggctcacgctcctggccagagcgctgggtttctggcaatgcctcccctcctgcctttacggccacagctctcccctccagaggcccctctgtagtgggcctcggtcccctctccacccccagaggcagcacagcttcagccctacgcagtgtgggggctccgggaggaaatgcagggaggtgcttggtcttggcccagagctcatggccttaggtgctgcccccagtcacccccgtgcccatgcagccggggatgttcagctcaggccagccaccgaggtggtgtgacgcaaggctgatctgacgctcagctcaggccgctggggtcatgggggttgtgggaaggtcatggaatcacggggctcacgctggggtcacagggtggtgtggctgtgtggactgtaaggggcgtgcagccatgcgtatctgacctgccctccctaggtctgcaggcagtgccgagtggctctgcctgaggccccaagagcgaccttggaagctccaggccttcacagcccctctgagagccacctgcaaggtggggagctgggaagaacggctcagtgatgagctcagagggaggggtgggcacagcgcccaggaaggcgggtgcgtgcaggcctgggaggaatgtgtagcaggaggcagggggtgctgtgcccgcaggaccagcaggtgaggcgtgtccacccacaggatggctctggcccaggcagtgtcagaaatggaagctgaggaaacccaaccccagctgtagaggagcctgccccgatgccatctgcacctggggggcgacgtatggctgccagcctcttcatctaccaaggaccagggcagtggggacgggagagctgggacacgtggactcacaccagggcagatggtgggggaagccagtgtctgtagattcagtgcatttcttggggaagggcgtggaacatttggacttgagccccagcacagagacgatgtcataatacagccccccatcgtgatctgatggtaagtacagaactccttgcccagtggagaaacactctcctctcatgtgtggaatatccacacactaaccatgaactgggccataagaaaccttacattccaaaggatcctgctgttcagaactcactcactcactgatgaaactggaaaaacaaccaatgataacaagctaaagaatgcctctagaagctaaaagacacacccatgactccacagtaattcatgggttaaagagaaaaaaggaaacgtgaagatacttgtaaccaaataatgatggatgcagcgccacgtcagaatctctgtgctgcagctgcagtggtacctagagggcaatttatagctgtaaatacagtgctttgttttgttttcttgttttttgagacaaggtcttgctctgtcacccaggctggagtacagtggcatgatctcggctcaatgcaacctctgtgccaccctgggctcaagtggtcctcctgctccggtcttctgagtagcaggaaccacaggcgtgcgccaccacgcttggctaatgttttttgtatttttttaaatagagacagggtgttgccgtgttacccaggctggtcttgaacttctgagctcaaacgatccaccctccttggcctcccaaagtggtgggattacaggtgtgagtcacctcaccggcccttaaacacagtttttagggaagattccaactcaaacaattttaaatagtagaaaataaaccctgaagcagtgtgcattcattagtactgtgtttgcctgtatttaattaaaacctgattgccattggct

SEQ ID NO: 419458 - DNA, 4197 bp, Homo sapiens
  misc_feature (1942)..(1942): n is a, c, g, or t
agcggataagctccagccttcctgtggccacagcaggaccagagtggaccagcacaccccaggagagaggactggggtcccaggagtaggaggagcccgagcaccatgagctccggagaccctgcacacctcggcctctgcctctggctgtggctgggcgccaccctgggaagagagcaagttcaagcaagcggtctcctgaggctggctgtgctgcctgaggaccggctgcagatgaagtggagagagtcggaggggagcggcctcggctacctggtgcaggtgaagcccatggcaggggactcggaacaggaggtgatactgaccaccaagacccctaaggccacagtggggggcctgagcccctccaagggctacaccttgcagatcttcgagctcactggctctgggcgcttcctgctagctcggagggagtttgtgattgaggatctgaagagtagctccctggacaggagcagccagaggcccctcggctctggagccccggagcccaccccctcacacacacggggagcccagaccctgagcaggcttctgagccccaagttgccttcaaaccaagccaggatccgcgcactcctgccggcccccagtaccgctgcctgccccccgtgcctgctgacatggtcttcctggtggacgggtcctggagcattggccacagtcacttccagcaggtcaaggacttcctggccagtgtcatcgcaccctttgaaatcgggccggataaggtccaagtaggcctgactcagtacagcggggatgctcagactgagtgggacctgaactccctcagcaccaaggaacaggtgctggcagctgtgcgccgcctccgctacaagggggggaacacgttcacaggccttgccctgacccacgtgctggggcagaacctgcagccggcggctggcctccgtccagaggcagccaaggtggtgattctggtgacggacggcaagtcccaggacgatgtgcacactgctgcccgtgtcctcaaggacctgggcgtgaacgtcttcgctgtgggtgtgaagaacgccgatgaggctgagctgaggctcctggcgtccccgccgagggacatcaccgtccacagcgtgctggacttcctgcagctcggcgcgctggctggcctgctcagccgtctcatctgccagaggctccagggtgggagcccgcggcagggcccagcagcggctccagccctggacaccctccctgcccccaccagcctggtcctgagccaggtgacctcctccagcatccgcctgtcctggactccagccccccggcaccccctcaagtatctgatcgtttggcgagcctctagaggtggcacccccagggaggtggtggtggaggggcccgccgcctccacggagctgcacaacctggcctcccgcacagagtacctggtctccgtgttccccatctatgagggcggggttggcgaaggcctgcggggcctggtgaccacagcacctctgcctccgccccgggcgctgaccctggccgcagtgacgcccagaaccgtccacctcacctggcagccctcggccggggccacccactacctggtgcgatgttctcctgcttcccccaagggtgaagaggaggagcgagaggtgcaggtcgggcggcccgaggtgctgctggatggcctggaacctggcagggactatgaggtctcggtgcagagcctgcgaggccctgagggcagcgaggcccggggcatccgtgccaggacccccaccctggcccccccgagacacctgggcttctcagacgtgagccacgacgcggcacgagtgttctgggagggtgccccgaggcctgtgcgcctggtcagggtcacctatgtgtccagcgagggtggacactcggggcagacagaggctcctgggaacgccacctcggccangctggggcctctctcttcctccaccacctacactgtccgtgtcacctgcctctaccctgggggtggctcctctacgctgactggccgggtgaccaccaagaaagctcccagcccaagccagctgtccatgacggagctgccaggggatgcagtccagctggcgtgggtggccgcagccccgtctggcgtgcttgtctaccagatcacgtggacgcccctgggagaggggaaggctcacgagatctctgtcccagggaacctcggcacggccgtcctgcctggcctagggaggcacacagagtacgacgtcaccatcttggcctactacagggacggggcccgcagtgaccctgtgtccctccgctataccccctccacggtgagcaggagcccaccctccaacctggccctggcctcggagacccccgacagcctgcaggtcagctggacgcccccgcttggccgcgtgctccattactggctcacctacgcccccgcctctggcttgggacccgagaaatccgtctctgtgccaggagccaggagccacgtgacactgcccgacctgcaggcagccacgaagtacagggtcctggtctcagctatctatgcagcaggcaggagtgaggctgtgtctgccacgggccagacagcctgcccagccctccgccctgacggctccctcccagggtttgacctgatggtggccttcagcctggtggaaaaggcttatgcgtccatccggggcgtggccatggagccctctgccttcggtgggaccccgaccttcacgctcttcaaggacgcccagctgacaagacgggtcagtgacgtctacccagcccccctacctccagagcacaccatcgtcttccttgtgcgcctacttcccgagacaccccgtgaggccttcgcgctgtggcagatgacagccgaggacttccagcccctccttggggttctgctggatgccgggaagaagtccctgacctacttccaccgtgaccccagggctgccttgcaggaggccaccttcgacccgcaggaagtgaggaagattttcttcgggagcttccacaaggtgcacgtggctgtgggccgctccaaggtcaggctctatgtggactgccggaaggtggctgagcggccccttggggagatgggcagcccacccgctgccggcttcgtcacgctggggaggctggccaaggccaggggcccccggagcagttcggccgcgtttcagctccagatgctgcagatcgtgtgcagtgacacctgggccgatgaggaccggtgctgtgagctccctgcctcgagggatggagagacctgccccgccttcgtgtctgcctgttcctgttcctcagagacccctgggcccccaggacctcaaggacccccaggcctccctgggaggaatggcaccccaggagagcagggcttcccagggcccaggggtccaccaggggtcaaaggagagaagggagaccatgggcttccaggcttgcagggccaccccggccaccagggcatccccgggagagttggcctccagggaccaaagggaatgagaggcctggagggaactgctggcctgcctggaccccctggccccagggggttccagggcatggcaggggccaggggcactagtggagagcgaggacctccagggaccgtggggcccacaggactgccagggcccaaaggggaacgaggagagaagggcgagccgcagtcccttgccaccctctaccagcttgtgagccaggcctgtgagtctgccattcagacacacgtgtcaaagttcgactccttccacgagaacaccaggccccccatgcccatcttggagcagaagctggagccgggcactgagcccctggggtcccctggcacccgcagcaaggccctggttcctggagaatgggggcgtggtggccgccaccttgagggcagaggggagcctggagctgttggtcagatgggcagccctgggcagcagggggctagcacccagggcctctgggagtgacaggacattttctgcactgccccgaggaacgctgagccttcctccctgggtttgtctggacaccgagagcgaccacatcctggagaagccaggagaaaagctcaggaagagcctgcaggtggaaggagagggaagcagcggcctcggccaaggcccaccccatactcttggctctgtagcatttccaagttcagataaacccctgagtgctcaccca

SEQ ID NO: 419459 - DNA, 4143 bp, Homo sapiens
  misc_feature (1942)..(1942): n is a, c, g, or t
agcggataagctccagccttcctgtggccacagcaggaccagagtggaccagcacaccccaggagagaggactggggtcccaggagtaggaggagcccgagcaccatgagctccggagaccctgcacacctcggcctctgcctctggctgtggctgggcgccaccctgggaagagagcaagttcaagcaagcggtctcctgaggctggctgtgctgcctgaggaccggctgcagatgaagtggagagagtcggaggggagcggcctcggctacctggtgcaggtgaagcccatggcaggggactcggaacaggaggtgatactgaccaccaagacccctaaggccacagtggggggcctgagcccctccaagggctacaccttgcagatcttcgagctcactggctctgggcgcttcctgctagctcggagggagtttgtgattgaggatctgaagagtagctccctggacaggagcagccagaggcccctcggctctggagccccggagcccaccccctcacacacacggggagcccagaccctgagcaggcttctgagccccaagttgccttcaaaccaagccaggatccgcgcactcctgccggcccccagtaccgctgcctgccccccgtgcctgctgacatggtcttcctggtggacgggtcctggagcattggccacagtcacttccagcaggtcaaggacttcctggccagtgtcatcgcaccctttgaaatcgggccggataaggtccaagtaggcctgactcagtacagcggggatgctcagactgagtgggacctgaactccctcagcaccaaggaacaggtgctggcagctgtgcgccgcctccgctacaagggggggaacacgttcacaggccttgccctgacccacgtgctggggcagaacctgcagccggcggctggcctccgtccagaggcagccaaggtggtgattctggtgacggacggcaagtcccaggacgatgtgcacactgctgcccgtgtcctcaaggacctgggcgtgaacgtcttcgctgtgggtgtgaagaacgccgatgaggctgagctgaggctcctggcgtccccgccgagggacatcaccgtccacagcgtgctggacttcctgcagctcggcgcgctggctggcctgctcagccgtctcatctgccagaggctccagggtgggagcccgcggcagggcccagcagcggctccagccctggacaccctccctgcccccaccagcctggtcctgagccaggtgacctcctccagcatccgcctgtcctggactccagccccccggcaccccctcaagtatctgatcgtttggcgagcctctagaggtggcacccccagggaggtggtggtggaggggcccgccgcctccacggagctgcacaacctggcctcccgcacagagtacctggtctccgtgttccccatctatgagggcggggttggcgaaggcctgcggggcctggtgaccacagcacctctgcctccgccccgggcgctgaccctggccgcagtgacgcccagaaccgtccacctcacctggcagccctcggccggggccacccactacctggtgcgatgttctcctgcttcccccaagggtgaagaggaggagcgagaggtgcaggtcgggcggcccgaggtgctgctggatggcctggaacctggcagggactatgaggtctcggtgcagagcctgcgaggccctgagggcagcgaggcccggggcatccgtgccaggacccccaccctggcccccccgagacacctgggcttctcagacgtgagccacgacgcggcacgagtgttctgggagggtgccccgaggcctgtgcgcctggtcagggtcacctatgtgtccagcgagggtggacactcggggcagacagaggctcctgggaacgccacctcggccangctggggcctctctcttcctccaccacctacactgtccgtgtcacctgcctctaccctgggggtggctcctctacgctgactggccgggtgaccaccaagaaagctcccagcccaagccagctgtccatgacggagctgccaggggatgcagtccagctggcgtgggtggccgcagccccgtctggcgtgcttgtctaccagatcacgtggacgcccctgggagaggggaaggctcacgagatctctgtcccagggaacctcggcacggccgtcctgcctggcctagggaggcacacagagtacgacgtcaccatcttggcctactacagggacggggcccgcagtgaccctgtgtccctccgctataccccctccacggtgagcaggagcccaccctccaacctggccctggcctcggagacccccgacagcctgcaggtcagctggacgcccccgcttggccgcgtgctccattactggctcacctacgcccccgcctctggcttgggacccgagaaatccgtctctgtgccaggagccaggagccacgtgacactgcccgacctgcaggcagccacgaagtacagggtcctggtctcagctatctatgcagcaggcaggagtgaggctgtgtctgccacgggccagacagcctgcccagccctccgccctgacggctccctcccagggtttgacctgatggtggccttcagcctggtggaaaaggcttatgcgtccatccggggcgtggccatggagccctctgccttcggtgggaccccgaccttcacgctcttcaaggacgcccagctgacaagacgggtcagtgacgtctacccagcccccctacctccagagcacaccatcgtcttccttgtgcgcctacttcccgagacaccccgtgaggccttcgcgctgtggcagatgacagccgaggacttccagcccctccttggggttctgctggatgccgggaagaagtccctgacctacttccaccgtgaccccagggctgccttgcaggaggccaccttcgacccgcaggaagtgaggaagattttcttcgggagcttccacaaggtgcacgtggctgtgggccgctccaaggtcaggctctatgtggactgccggaaggtggctgagcggccccttggggagatgggcagcccacccgctgccggcttcgtcacgctggggaggctggccaaggccaggggcccccggagcagttcggccgcgtttcagctccagatgctgcagatcgtgtgcagtgacacctgggccgatgaggaccggtgctgtgagctccctgcctcgagggatggagagacctgccccgccttcgtgtctgcctgttcctgttcctcagagacccctgggcccccaggacctcaaggacccccaggtccaccaggggtcaaaggagagaagggagaccatgggcttccaggcttgcagggccaccccggccaccagggcatccccgggagagttggcctccagggaccaaagggaatgagaggcctggagggaactgctggcctgcctggaccccctggccccagggggttccagggcatggcaggggccaggggcactagtggagagcgaggacctccagggaccgtggggcccacaggactgccagggcccaaaggggaacgaggagagaagggcgagccgcagtcccttgccaccctctaccagcttgtgagccaggcctgtgagtctgccattcagacacacgtgtcaaagttcgactccttccacgagaacaccaggccccccatgcccatcttggagcagaagctggagccgggcactgagcccctggggtcccctggcacccgcagcaaggccctggttcctggagaatgggggcgtggtggccgccaccttgagggcagaggggagcctggagctgttggtcagatgggcagccctgggcagcagggggctagcacccagggcctctgggagtgacaggacattttctgcactgccccgaggaacgctgagccttcctccctgggtttgtctggacaccgagagcgaccacatcctggagaagccaggagaaaagctcaggaagagcctgcaggtggaaggagagggaagcagcggcctcggccaaggcccaccccatactcttggctctgtagcatttccaagttcagataaacccctgagtgctcaccca

SEQ ID NO: 419460 - DNA, 4773 bp, Homo sapiens
  misc_feature (1942)..(1942): n is a, c, g, or t
agcggataagctccagccttcctgtggccacagcaggaccagagtggaccagcacaccccaggagagaggactggggtcccaggagtaggaggagcccgagcaccatgagctccggagaccctgcacacctcggcctctgcctctggctgtggctgggcgccaccctgggaagagagcaagttcaagcaagcggtctcctgaggctggctgtgctgcctgaggaccggctgcagatgaagtggagagagtcggaggggagcggcctcggctacctggtgcaggtgaagcccatggcaggggactcggaacaggaggtgatactgaccaccaagacccctaaggccacagtggggggcctgagcccctccaagggctacaccttgcagatcttcgagctcactggctctgggcgcttcctgctagctcggagggagtttgtgattgaggatctgaagagtagctccctggacaggagcagccagaggcccctcggctctggagccccggagcccaccccctcacacacacggggagcccagaccctgagcaggcttctgagccccaagttgccttcaaaccaagccaggatccgcgcactcctgccggcccccagtaccgctgcctgccccccgtgcctgctgacatggtcttcctggtggacgggtcctggagcattggccacagtcacttccagcaggtcaaggacttcctggccagtgtcatcgcaccctttgaaatcgggccggataaggtccaagtaggcctgactcagtacagcggggatgctcagactgagtgggacctgaactccctcagcaccaaggaacaggtgctggcagctgtgcgccgcctccgctacaagggggggaacacgttcacaggccttgccctgacccacgtgctggggcagaacctgcagccggcggctggcctccgtccagaggcagccaaggtggtgattctggtgacggacggcaagtcccaggacgatgtgcacactgctgcccgtgtcctcaaggacctgggcgtgaacgtcttcgctgtgggtgtgaagaacgccgatgaggctgagctgaggctcctggcgtccccgccgagggacatcaccgtccacagcgtgctggacttcctgcagctcggcgcgctggctggcctgctcagccgtctcatctgccagaggctccagggtgggagcccgcggcagggcccagcagcggctccagccctggacaccctccctgcccccaccagcctggtcctgagccaggtgacctcctccagcatccgcctgtcctggactccagccccccggcaccccctcaagtatctgatcgtttggcgagcctctagaggtggcacccccagggaggtggtggtggaggggcccgccgcctccacggagctgcacaacctggcctcccgcacagagtacctggtctccgtgttccccatctatgagggcggggttggcgaaggcctgcggggcctggtgaccacagcacctctgcctccgccccgggcgctgaccctggccgcagtgacgcccagaaccgtccacctcacctggcagccctcggccggggccacccactacctggtgcgatgttctcctgcttcccccaagggtgaagaggaggagcgagaggtgcaggtcgggcggcccgaggtgctgctggatggcctggaacctggcagggactatgaggtctcggtgcagagcctgcgaggccctgagggcagcgaggcccggggcatccgtgccaggacccccaccctggcccccccgagacacctgggcttctcagacgtgagccacgacgcggcacgagtgttctgggagggtgccccgaggcctgtgcgcctggtcagggtcacctatgtgtccagcgagggtggacactcggggcagacagaggctcctgggaacgccacctcggccangctggggcctctctcttcctccaccacctacactgtccgtgtcacctgcctctaccctgggggtggctcctctacgctgactggccgggtgaccaccaagaaagctcccagcccaagccagctgtccatgacggagctgccaggggatgcagtccagctggcgtgggtggccgcagccccgtctggcgtgcttgtctaccagatcacgtggacgcccctgggagaggggaaggctcacgagatctctgtcccagggaacctcggcacggccgtcctgcctggcctagggaggcacacagagtacgacgtcaccatcttggcctactacagggacggggcccgcagtgaccctgtgtccctccgctataccccctccacggtgagcaggagcccaccctccaacctggccctggcctcggagacccccgacagcctgcaggtcagctggacgcccccgcttggccgcgtgctccattactggctcacctacgcccccgcctctggcttgggacccgagaaatccgtctctgtgccaggagccaggagccacgtgacactgcccgacctgcaggcagccacgaagtacagggtcctggtctcagctatctatgcagcaggcaggagtgaggctgtgtctgccacgggccagacagcctgcccagccctccgccctgacggctccctcccagggtttgacctgatggtggccttcagcctggtggaaaaggcttatgcgtccatccggggcgtggccatggagccctctgccttcggtgggaccccgaccttcacgctcttcaaggacgcccagctgacaagacgggtcagtgacgtctacccagcccccctacctccagagcacaccatcgtcttccttgtgcgcctacttcccgagacaccccgtgaggccttcgcgctgtggcagatgacagccgaggacttccagcccctccttggggttctgctggatgccgggaagaagtccctgacctacttccaccgtgaccccagggctgccttgcaggaggccaccttcgacccgcaggaagtgaggaagattttcttcgggagcttccacaaggtgcacgtggctgtgggccgctccaaggtcaggctctatgtggactgccggaaggtggctgagcggccccttggggagatgggcagcccacccgctgccggcttcgtcacgctggggaggctggccaaggccaggggcccccggagcagttcggccgcgtttcagctccagatgctgcagatcgtgtgcagtgacacctgggccgatgaggaccggtgctgtgagctccctgcctcgagggatggagagacctgccccgccttcgtgtctgcctgttcctgttcctcagagacccctgggcccccaggacctcaaggacccccaggcctccctgggaggaatggcaccccaggagagcagggcttcccagggcccaggggagagcccgggccacccggacagatgggaccagaaggtcctggaggccagcagggctcgccggggacccagggccgtgcagtccaggggcctgtgggtccaccaggggtcaaaggagagaagggagaccatgggcttccaggcttgcagggccaccccggccaccagggcatccccgggagagttggcctccagggaccaaagggaatgagaggcctggagggaactgctggcctgcctggaccccctggccccagggggttccagggcatggcaggggccaggggcactagtggagagcgaggacctccagggaccgtggggcccacaggactgccagggcccaaaggggaacgaggagagaagggcgagccgcagtcccttgccaccctctaccagcttgtgagccaggcctcacacgtgtcaaagttcgactccttccacgagaacaccaggccccccatgcccatcttggagcagaagctggagccgggcactgagcccctggggtcccctggcacccgcagcaaggccctggttcctggagaatgggggcgtggtggccgccaccttgagggcagaggggagcctggagctgttggtcagatgggcagccctgggcagcagggggctagcacccagggcctctgggagtgacaggacattttctgcactgccccgaggaacgctgagccttcctccctgggtttgtctggacaccgagagcgaccacatcctggagaagccaggagaaaagctcaggaagagcctgcaggtggaaggagagggaagcagcggcctcggccaaggcccaccccatactcttggctctgtagcatttccaagttcagataaacccctgagtgctcacccaaaaaaaaaaaaaaaaaaaaaaaaaaaaaaaaaaaaaaaaaaaaaaaaaaaaaaaaaaaaaaaaaaaaaaaaaaaaaaaaaaaaaaaaagggggggggggggggaaattttctctccggggggggcgctggactttttgtagaaaagaagggggccccccctaggaggggagccgtctaataataagcaacgagcgggcgagggccgcgcgcgctttaaaaacagtggtggggcgggagagacaacacccgtcgtttgctgctgctcctttgtctggacgaaaggagacgaccacacctcctgggtggggggggagcacaaatgtggggagaacaccacccacacgaagagaagatttttaccccctcggggggagaaatacaatatccggcggggggtgatgtgggggggtgaccacacaccaggtgagtatatctgtcgtgcgcgaagaaaaactagtttgcctagaggggcattcttcataggaaaacttttcgcg

SEQ ID NO: 419461 - DNA, 4640 bp, Homo sapiens
acagacgtctcaggaaactgggggcaacctggggggagccccgtgggctgtgggaacccctgcccccggcttggaagctgcccacagtggcctggttgcagcctggcagatgaggggtacatcactactcagaataaacggccccctctgcacccacctgtctagatgagggtgacaggcactatcacagggcccccacctgacgccttcccacctggccatgcccccccagaactgtcatggagcccaggaggcgcctgtgtggagcacggggacctggcacgctgctgcccctagatctcagactcccatctaaggaccagacctgctgcctgtgcccagggaggggccctgacaccctctgtccccgtcagaacagggccccaagccactgcattgctccgtcctcacatgccctccctttcctcgcaggggagcctggagctgttggtcagatgggcagccctgggcagcagggggctagcacccagggcctctgggagtgacaggacattttctgcactgccccgaggaacgctgagccttcctccctgggtttgtctggacaccgagagcgaccacatcctggagaagccaggagaaaagctcaggaagagcctgcaggtggaaggagagggaagcagcggcctcggccaaggcccaccccatactcttggctctgtagcatttccaagttcagataaacccctgagtgctcacccagccaagcgaggcgggagtcatttcctgggagagtgtcccccaccctggctctgtgcaccccaccttgaggccctgcagcttcagccgcagtggggaaggggaggggctgggctgatggcgaatcgggttcaggagggcagcagtgccctgtggccgtctcagtagctctaaaacaggctcaacaacatgccccgcccctttctctgggcctcatctaagcctggccagggccctgtgggcccgcctctctctgcgcctcacgcaggcaacagatggttccactgctggcccaccagtcacctgcacgatggctcctccctcagaacagcactcccaccccggccccagcaccttcacatctgggcacaggcaggtccctgcctgcctcatcgtcccctctgtccccagcccaagaaggagttcagatcctgtgtgtgaatggccacccctcacccacccagccctgtgctgagttccttgtgcagggacattgctttgagacttggcaccatcagcccctggtccttagggtctcagagcaaggtcatccctcagcaggcttctggcctgtgcgctcctcagcacctctgcccaggtctctcccaaccatcacagacgctgtgtgagcctggacttcctgccttatccccactgtggcccaaacagcatgggggcaagctcagaacacacacctgggcttctgggccttgtggcccgtgggggtgatgtgggaacttctacttcctttccaaacaaatattcagtaactagtccactgttaccacttaggcagctaagcaagaaaggtgccagaaatgaagagggaagccatatcattgaggagagaatgaaaagtattaaaaaggaacaaagagagacccttgatattgacagaaggaaaacccaccaagatcaccagtgcagcattgcgtgcaccaaagcataccccaaagaggtgagcgcaaaacagcttcagggcaaacacttcatctatgattcaactgttccaggaactgaccagacctggagaccaaatagagagtcataggcagggtcagcaggatgggagagagcgcctgcacccacaggagccacagccctgactgaggccaggaagcagccccaaatgccagctcccactgcagcatgagaacagaaacagaccactgaaaattcccaaagtctgtggacaaatcagacgtcgaagaagtcacgtggcatcgagacagattttgcactgagggacaaggagagcatgtggccaaagtaggtgcaggtaaagcagcatctggggcagagttatagccttcagtgcaggtatcagacacagttgttgagagcagcagcccaagccagcccctccgtcctgcagggaggacacctaggtcacttggcttctgttggggagctgagttgcttcagattgtgtgaccagcaaaacagcttggttgctctcacttggtttctccagggcggggaattacatgtccccagctgaactgagaaggctctttgagcagtggagtgagcaggctttgtcatgaggcaggagtggggctagaatcaagcccagagcccacagggcatccagagccttccaaaggagcccctctcctggggctctccaatttgatgaagggactgggcactgggtggctgagaccacattggcagccaggaggaggcagcctggccggggggaaccagggtggctctaatccccaccaccccctcagctgccctacccccgccacgctggtgtgacaccagtgatgctcagcctcaaaaggggagtccggctgtcttcgggaaactgactttatgctggaggccaattaaaatggcacagcaaaggcagcggccagctggtgcccaggcagcttagggactggtccctgaggccccacccgccccagcctgtgcagtggagctgagtacgaatcaaaggtgaggatggcaagggagctgagagcagcctccggatgcaccaaaccggcctggctcctgtttgcaggaaggcagcctccccgagacccagccgacctgcacgtctcccatcagccccgactccaccgcatccctctgggtccttttaggagcccccagggactgagccggggctcacgctcctggccagagcgctgggtttctggcaatgcctcccctcctgcctttacggccacagctctcccctccagaggcccctctgtagtgggcctcggtcccctctccacccccagaggcagcacagcttcagccctacgcagtgtgggggctccgggaggaaatgcagggaggtgcttggtcttggcccagagctcatggccttaggtgctgcccccagtcacccccgtgcccatgcagccggggatgttcagctcaggccagccaccgaggtggtgtgacgcaaggctgatctgacgctcagctcaggccgctggggtcatgggggttgtgggaaggtcatggaatcacggggctcacgctggggtcacagggtggtgtggctgtgtggactgtaaggggcgtgcagccatgcgtatctgacctgccctccctaggtctgcaggcagtgccgagtggctctgcctgaggccccaagagcgaccttggaagctccaggccttcacagcccctctgagagccacctgcaaggtggggagctgggaagaacggctcagtgatgagctcagagggaggggtgggcacagcgcccaggaaggcgggtgcgtgcaggcctgggaggaatgtgtagcaggaggcagggggtgctgtgcccgcaggaccagcaggtgaggcgtgtccacccacaggatggctctggcccaggcagtgtcagaaatggaagctgaggaaacccaaccccagctgtagaggagcctgccccgatgccatctgcacctggggggcgacgtatggctgccagcctcttcatctaccaaggaccagggcagtggggacgggagagctgggacacgtggactcacaccagggcagatggtgggggaagccagtgtctgtagattcagtgcatttcttggggaagggcgtggaacatttggacttgagccccagcacagagacgatgtcataatacagccccccatcgtgatctgatggtaagtacagaactccttgcccagtggagaaacactctcctctcatgtgtggaatatccacacactaaccatgaactgggccataagaaaccttacattccaaaggatcctgctgttcagaactcactcactcactgatgaaactggaaaaacaaccaatgataacaagctaaagaatgcctctagaagctaaaagacacacccatgactccacagtaattcatgggttaaagagaaaaaaggaaacgtgaagatacttgtaaccaaataatgatggatgcagcgccacgtcagaatctctgtgctgcagctgcagtggtacctagagggcaatttatagctgtaaatacagtgctttgttttgttttcttgttttttgagacaaggtcttgctctgtcacccaggctggagtacagtggcatgatctcggctcaatgcaacctctgtgccaccctgggctcaagtggtcctcctgctccggtcttctgagtagcaggaaccacaggcgtgcgccaccacgcttggctaatgttttttgtatttttttaaatagagacagggtgttgccgtgttacccaggctggtcttgaacttctgagctcaaacgatccaccctccttggcctcccaaagtggtgggattacaggtgtgagtcacctcaccggcccttaaacacagtttttagggaagattccaactcaaacaattttaaatagtagaaaataaaccctgaagcagtgtgcattcattagtactgtgtttgcctgtatttaattaaaacctgattgccattggct

SEQ ID NO: 419462 - DNA, 847 bp, Homo sapiens
caattctcctgtctcagcctcccaagtagctgggattacaggtgcataccacatcacgcctggctaattttcttgtattttcagtagagatggggctttgccacgttggccaggctggtcttgaactgcagacctccagtgatccgcctgcctcggcctcccagtgctgggatcacaggcgtgagccgccgcgcctggtccatctttctagatacatgtagatatgtttatttttatatgaaactatgggaagggattctataatttcccagattctattatgctcataactgtttcaaaggtttaacagctgcaatttaaacatttcaaatgacaatacaaattcctctctcaaacagaaatggaaatgtccctttaaaagactgataatggtgaaaaacttcttcttaccattctacaggtaaaaagtatagtctagccagccaatgacactgaagatttggggaagcaatgtttttgatccctggccccagcccactcttccatccagctaatcctttagggctctactgtaccttccctagagctccgggccttcagtgatgccttctctctgatctcttcaaagatagaaatttctgtcatgctcatacgctggcttcccatgaaggttcatatgaattaccatctgctctaacaaactactgttaaattgtattttacataaaagttaaatctaattttatttcttctgaggaagctgaactaacttttgaccagaaaggggagagagtgagtggctgtatcactcatgatataattaagggtgaggggtaaaaggagtaaaaacaatcagacctcttccagaaggatttagaaccagtaa

SEQ ID NO: 419463 - DNA, 2303 bp, Homo sapiens
tggaatgcccgccagggcaagggtagggaggaggcggccgaaccgcgtcgctgggccgaaaggtgcgcgagcgctgcccgcgcggggaccacaaccaaagtcgcggccgccgcagccatgcgctgggtgtgggcgctgctgaagaatgcgtccctggcaggggcgcccaagtacatagagcacttcagcaagttctccccgtccccgctgtccatgaagcagtttctggacttcggatccagcaatgcctgtgagaaaacctccttcaccttcctcaggcaggagctgcctgtgcgcctggccaacatcatgaaagagatcaacctgcttcccgaccgagtgctgagcacaccctccgtgcagctggtgcagagctggtatgtccagagcctcctggacatcatggagttcctggacaaggatcccgaggaccatcgcaccctgagccagttcactgacgccctggtcaccatccggaaccggcacaacgacgtggtgcccaccatggcacaaggcgtgcttgagtacaaggacacctacggcgatgaccccgtctccaaccagaacatccagtacttcctggaccgcttctacctcagccgcatctccatccgcatgctcatcaaccagcacaccctcatctttgatggcagcaccaacccagcccatcccaaacacatcggcagcatcgaccccaactgcaacgtctctgaggtggtcaaagatgcctacgacatggctaagctcctgtgtgacaagtattacatggcctcacctgacctggagatccaggagatcaatgcagccaactccaaacagccgattcacatggtctacgtcccctcccacctctaccacatgctctttgagctcttcaagaatgccatgagggcgactgtggaaagccatgagtccagcctcattctcccacccatcaaggtcatggtggccttgggtgaggaagatctgtccatcaagatgagtgaccgaggtgggggtgttcccttgaggaagattgagcgactcttcagctacatgtactccacagcacccaccccccagcctggcaccgggggaacgccgctggctggctttggttatgggctccccatttcccgcctctacgccaagtacttccagggagacctgcagctcttctccatggaaggctttgggaccgatgctgtcatctatctcaaggccctgtccacggactcggtggagcgcctgcctgtctacaacaagtcagcctggcgccactaccagaccatccaggaggccggcgactggtgtgtgcccagcacggagcccaagaacacgtccacgtaccgcgtcagctaagggccgccgtgcatctgcacctgagaggacggactgccgcctctgggtccccccaccgtggtgcccctcaccatcctcctgggggagcagggggtgggttctccctgatgaccaggttctgtctctatggaagtcactgcggtgataggtctgtgatggtccctaagtgccagtccatctctgtggagacccctcggtggcctccctatctctgtgggcgatgcctgagggttagggatgtctccaccctgatggggtgtcccagagacattttcccatggcagtcctcctctctgagaccagggctgtcacttttctgccaggggtactgggtccccctcagcaccctccacagcacaggccttccaagtggatgtcccgttgccttattcccccagcccacaaaggcaccctggccttggtctgctgaagtgttaggaagagggtgggtgccctccagacctggggactgagtggggaaaggagttacacccgtgagtggggaatgaggctggtcctgcagcctctccctccgctcagggcttgaaggtcggtggcggagggggtggctctcacagggcccaactctaaagtggaagaaccttgttagaccgagagcttgccatccagccaagctgctcgaggccctgcagtggccttggcaatgtctgtgccacctcctgagccctcccagcatgtcctcacatgctcatgcccacccgctcctccacaagcctagtccatcctgcctgagctccagcccccagcccccactgtgcccagacatgtgtgctcagggtggctttctccctaggaccttctgtgtatatagttagttttataaccctgaatgcccccacccttcccctaagcacacaggggttaaagctgtgtgtccctcccagtggctgtggcagtgacagtgacacccacacccacagtaaagaggagactgaatgaga

SEQ ID NO: 419464 - DNA, 782 bp, Homo sapiens
tgggcaggggccccaggcaccgtgatgtggagtcaagccgcctatacctcccttggctgccccagggctgctaggatccagcaatgcctgtgagaaaacctccttcaccttcctcaggcaggagctgcctgtgcgcctggccaacatcatgaaagagatcaacctgcttcccgaccgagtgctgagcacaccctccgtgcagctggtgcagagctggtatgtccagagcctcctggacatcatggagttcctggacaaggatcccgaggaccatcgcaccctgagccagttcactgacgccctggtcaccatccggaaccggcacaacgacgtggtgcccaccatggcacaaggcgtgcttgagtacaaggacacctacggcgatgaccccgtctccaaccagaacatccagtacttcctggaccgcttctacctcagccgcatctccatccgcatgctcatcaaccagcacagtgggtgccggccacagcggcggggagcgggcggtggagggggcggtgctggggcccagggccgggctgctgaggggacctagaccactcttcagaaccccacaaagggagtctttgaatagttactccagtaactatggagttaatggctccaacatggaaaaataaaatttttctttctcattgattttccatttcaaaacgttttgttttcagtgtttgcaaaatgtaaaattatgtcacatctttaaaagaatgtttaatttagtatttataaaaactctcattatgttcaaaaacaaaatgttg

SEQ ID NO: 419465 - DNA, 530 bp, Homo sapiens
ttgtggcaacagctggaaggggtccccaggagctctgacacagggttttccaactgcccaacatcacggggttggggagcagagcatccagagggctccgtgtattgttttgtagtatagggtctaacttctagaaagtcgggaataggcttctgagagttttggagtcaacaggcctgaatgcagaatgatcaaaagaagatggctattcctctcagagtggtgctggttttcggggccagcagtgcagtgaaaagcccaatttcccaatcctattttgaatatttccgctcctccacaagcctagtccatcctgcctgagctccagcccccagcccccactgtgcccagacatgtgtgctcagggtggctttctccctaggaccttctgtgtatatagttagttttataaccctgaatgcccccacccttcccctaagcacacaggggttaaagctgtgtgtccctcccagtggctgtggcagtgacagtgacacccacacccacagtaaagaggagactgaatgaga

SEQ ID NO: 419466 - DNA, 469 bp, Homo sapiens
tggaatgcccgccagggcaagggtagggaggaggcggccgaaccgcgtcgctgggccgaaaggtgcgcgagcgctgcccgcgcggggaccacaaccaaagtcgcggccgccgcagccatgcgctgggtgtgggcgctgctgaagaatgcgtccctggcaggggcgcccaagtacatagagcacttcagcaagttctccccgtccccgctgtccatgaagcagtttctggacttcggtacggagtgggcgggaggcggctggcagcggaggccggcggggcgctgggaggggcagccgggggctagggggacggaggagaagaaaggccccgagtgacagagaagggttgtttggaaaggtacaggcaggaaagagttaatggggaagcaggaaccggccggggcctctcgacggggctgctgatgggaatggggggcatttacaaggacggtcccgaggtttcttcgtg

SEQ ID NO: 419467 - DNA, 2639 bp, Homo sapiens
tggaatgcccgccagggcaagggtagggaggaggcggccgaaccgcgtcgctgggccgaaaggtgcgcgagcgctgcccgcgcggggaccacaaccaaagtcgcggccgccgcagccatgcgctgggtgtgggcgctgctgaagaatgcgtccctggcaggggcgcccaagtacatagagcacttcagcaagttctccccgtccccgctgtccatgaagcagtttctggacttcggatccagcaatgcctgtgagaaaacctccttcaccttcctcaggcaggagctgcctgtgcgcctggccaacatcatgaaagagatcaacctgcttcccgaccgagtgctgagcacaccctccgtgcagctggtgcagagctggtatgtccagagcctcctggacatcatggagttcctggacaaggatcccgaggaccatcgcaccctgagccagttcactgacgccctggtcaccatccggaaccggcacaacgacgtggtgcccaccatggcacaaggcgtgcttgagtacaaggacacctacggcgatgaccccgtctccaaccagaacatccagtacttcctggaccgcttctacctcagccgcatctccatccgcatgctcatcaaccagcacaccctcatctttgatggcagcaccaacccagcccatcccaaacacatcggcagcatcgaccccaactgcaacgtctctgaggtggtcaaagatgcctacgacatggctaagctcctgtgtgacaagtattacatggcctcacctgacctggagatccaggagatcaatgcagccaactccaaacagccgattcacatggtctacgtcccctcccacctctaccacatgctctttgagctcttcaagaatgccatgagggcgactgtggaaagccatgagtccagcctcattctcccacccatcaaggtcatggtggccttgggtgaggaagatctgtccatcaagatgagtgaccgaggtgggggtgttcccttgaggaagattgagcgactcttcagctacatgtactccacagcacccaccccccagcctggcaccgggggaacgccgctggctggctttggttatgggctccccatttcccgcctctacgccaagtacttccagggagacctgcagctcttctccatggaaggctttgggaccgatgctgtcatctatctcaaggccctgtccacggactcggtggagcgcctgcctgtctacaacaagtcagcctggcgccactaccagaccatccaggaggccggcgactggtgtgtgcccagcacggagcccaagaacacgtccacgtaccgcgtcagctaagggccgccgtgcatctgcacctgagaggacggactgccgcctctgggtccccccaccgtggtgcccctcaccatcctcctgggggagcagggggtgggttctccctgatgaccaggttctgtctctatggaagtcactgcggtgataggtctgtgatggtccctaagtgccagtccatctctgtggagacccctcggtggcctccctatctctgtgggcgatgcctgagggttagggatgtctccaccctgatggggtgtcccagagacattttcccatggcagtcctcctctctgagaccagggctgtcacttttctgccaggggtactgggtccccctcagcaccctccacagcacaggccttccaagtggatgtcccgttgccttattcccccagcccacaaaggcaccctggccttggtctgctgaagtgttaggaagagggtgggtgccctccagacctggggactgagtggggaaaggagttacacccgtgagtggggaatgaggctggtcctgcagcctctccctccgctcagggcttgaaggtcggtggcggagggggtggctctcacagggcccaactctaaagtggaagaaccttgttagaccgagagcttgccatccagccaagctgctcgaggccctgcagtggccttggcaatgtctgtgccacctcctgagccctcccagcatgtcctcacatgctcatgcccacccgctcctccacaagcctagtccatcctgcctgagctccagcccccagcccccactgtgcccagacatgtgtgctcagggtggctttctccctaggaccttctgtgtatatagttagttttataaccctgaatgcccccacccttcccctaagcacacaggggttaaagctgtgtgtccctcccagtggctgtggcagtgacagtgacacccacacccacagtaaagaggagactgaatgagactggcctggctgcatccctgggggaggggacccacacgtgcgcacgtacacacgcacactgcggtgccctgtgaccaccacatgacgcaccggggacgtccggcccagctcaggactgtgagtaaaacactgggcaaagccatctgttcagaacgccggatggcccagcacctggtgacagacctgttgtcccaccatactcagggcccagcagagtccggccaacccaacaactggagcagacagaaattctggtcactggcacatcataaggatttattgaaataaattgagaactgcctccccttcacatgcaggtgggcacccactagagct

SEQ ID NO: 419468 - DNA, 1857 bp, Homo sapiens
tggaatgcccgccagggcaagggtagggaggaggcggccgaaccgcgtcgctgggccgaaaggtgcgcgagcgctgcccgcgcggggaccacaaccaaagtcgcggccgccgcagccatgcgctgggtgtgggcgctgctgaagaatgcgtccctggcaggggcgcccaagtacatagagcacttcagcaagttctccccgtccccgctgtccatgaagcagtttctggacttcggatccagcaatgcctgtgagaaaacctccttcaccttcctcaggcaggagctgcctgtgcgcctggccaacatcatgaaagagatcaacctgcttcccgaccgagtgctgagcacaccctccgtgcagctggtgcagagctggtatgtccagagcctcctggacatcatggagttcctggacaaggatcccgaggaccatcgcaccctgagccagttcactgacgccctggtcaccatccggaaccggcacaacgacgtggtgcccaccatggcacaaggcgtgcttgagtacaaggacacctacggcgatgaccccgtctccaaccagaacatccagtacttcctggaccgcttctacctcagccgcatctccatccgcatgctcatcaaccagcacaccctcatctttgatggcagcaccaacccagcccatcccaaacacatcggcagcatcgaccccaactgcaacgtctctgaggtggtcaaagatgcctacgacatggctaagctcctgtgtgacaagtattacatggcctcacctgacctggagatccaggagatcaatgcagccaactccaaacagccgattcacatggtctacgtcccctcccacctctaccacatgctctttgagctcttcaagaatgccatgagggcgactgtggaaagccatgagtccagcctcattctcccacccatcaaggtcatggtggccttgggtgaggaagatctgtccatcaagatgagtgaccgaggtgggggtgttcccttgaggaagattgagcgactcttcagctacatgtactccacagcacccaccccccagcctggcaccgggggaacgccgctggctggctttggttatgggctccccatttcccgcctctacgccaagtacttccagggagacctgcagctcttctccatggaaggctttgggaccgatgctgtcatctatctcaaggccctgtccacggactcggtggagcgcctgcctgtctacaacaagtcagcctggcgccactaccagaccatccaggaggccggcgactggtgtgtgcccagcacggagcccaagaacacgtccacgtaccgcgtcagctaagggccgccgtgcatctgcacctgagaggacggactgccgcctctgggtccccccaccgtggtgcccctcaccatccacccttcccctaagcacacaggggttaaagctgtgtgtccctcccagtggctgtggcagtgacagtgacacccacacccacagtaaagaggagactgaatgagactggcctggctgcatccctgggggaggggacccacacgtgcgcacgtacacacgcacactgcggtgccctgtgaccaccacatgacgcaccggggacgtccggcccagctcaggactgtgagtaaaacactgggcaaagccatctgttcagaacgccggatggcccagcacctggtgacagacctgttgtcccaccatactcagggcccagcagagtccggccaacccaacaactggagcagacagaaattctggtcactggcacatcataaggatttattgaaataaattgagaactgcctccccttcacatgcaggtgggcacccactagagct

SEQ ID NO: 419469 - DNA, 2227 bp, Homo sapiens
  misc_feature (1)..(1): n is a, c, g, or t
  misc_feature (17)..(17): n is a, c, g, or t
  misc_feature (19)..(19): n is a, c, g, or t
  misc_feature (21)..(21): n is a, c, g, or t
ncgtccctggcagggcnanangtgacatagagcacttcatcaagttctccccgtccccgctgctgaagaatgcgtccctggcaggggcgcccaagtacatagagcacttcagcaagttctccccgtccccgctgtccatgaagcagtttctggacttcggatccagcaatgcctgtgagaaaacctccttcaccttcctcaggcaggagctgcctgtgcgcctggccaacatcatgaaagagatcaacctgcttcccgaccgagtgctgagcacaccctccgtgcagctggtgcagagctggtatgtccagagcctcctggacatcatggagttcctggacaaggatcccgaggaccatcgcaccctgagccagttcactgacgccctggtcaccatccggaaccggcacaacgacgtggtgcccaccatggcacaaggcgtgcttgagtacaaggacacctacggcgatgaccccgtctccaaccagaacatccagtacttcctggaccgcttctacctcagccgcatctccatccgcatgctcatcaaccagcacaccctcatctttgatggcagcaccaacccagcccatcccaaacacatcggcagcatcgaccccaactgcaacgtctctgaggtggtcaaagatgcctacgacatggctaagctcctgtgtgacaagtattacatggcctcacctgacctggagatccaggagatcaatgcagccaactccaaacagccgattcacatggtctacgtcccctcccacctctaccacatgctctttgagctcttcaagaatgccatgagggcgactgtggaaagccatgagtccagcctcattctcccacccatcaaggtcatggtggccttgggtgaggaagatctgtccatcaagatgagtgaccgaggtgggggtgttcccttgaggaagattgagcgactcttcagctacatgtactccacagcacccaccccccagcctggcaccgggggaacgccgctggctggctttggttatgggctccccatttcccgcctctacgccaagtacttccagggagacctgcagctcttctccatggaaggctttgggaccgatgctgtcatctatctcaaggccctgtccacggactcggtggagcgcctgcctgtctacaacaagtcagcctggcgccactaccagaccatccaggaggccggcgactggtgtgtgcccagcacggagcccaagaacacgtccacgtaccgcgtcagctaagggccgccgtgcatctgcacctgagaggacggactgccgcctctgggtccccccaccgtggtgcccctcaccatcctcctgggggagcagggggtgggttctccctgatgaccaggttctgtctctatggaagtcactgcggtgataggtctgtgatggtccctaagtgccagtccatctctgtggagacccctcggtggcctccctatctctgtgggcgatgcctgagggttagggatgtctccaccctgatggggtgtcccagagacattttcccatggcagtcctcctctctgagaccagggctgtcacttttctgccaggggtactgggtccccctcagcaccctccacagcacaggccttccaagtggatgtcccgttgccttattcccccagcccacaaaggcaccctggccttggtctgctgaagtgttaggaagagggtgggtgccctccagacctggggactgagtggggaaaggagttacacccgtgagtggggaatgaggctggtcctgcagcctctccctccgctcagggcttgaaggtcggtggcggagggggtggctctcacagggcccaactctaaagtggaagaaccttgttagaccgagagcttgccatccagccaagctgctcgaggccctgcagtggccttggcaatgtctgtgccacctcctgagccctcccagcatgtcctcacatgctcatgcccacccgctcctccacaagcctagtccatcctgcctgagctccagcccccagcccccactgtgcccagacatgtgtgctcagggtggctttctccctaggaccttctgtgtatatagttagttttataaccctgaatgcccccacccttcccctaagcacacaggggttaaagctgtgtgtccctcccagtggctgtggcagtgacagtgacacccacacccacagtaaagaggagactgaatgaga

SEQ ID NO: 419470 - DNA, 1159 bp, Homo sapiens
tggaatgcccgccagggcaagggtagggaggaggcggccgaaccgcgtcgctgggccgaaaggtgcgcgagcgctgcccgcgcggggaccacaaccaaagtcgcggccgccgcagccatgcgctgggtgtgggcgctgctgaagaatgcgtccctggcaggggcgcccaagtacatagagcacttcagcaagttctccccgtccccgctgtccatgaagcagtttctggacttcggatccagcaatgcctgtgagaaaacctccttcaccttcctcaggcaggagctgcctgtgcgcctggccaacatcatgaaagagatcaacctgcttcccgaccgagtgctgagcacaccctccgtgcagctggtgcagagctggtatgtccagagcctcctggacatcatggagttcctggacaaggatcccgaggaccatcgcaccctgagccagttcactgacgccctggtcaccatccggaaccggcacaacgacgtggtgcccaccatggcacaaggcgtgcttgagtacaaggacacctacggcgatgaccccgtctccaaccagaacatccagtacttcctggaccgcttctacctcagccgcatctccatccgcatgctcatcaaccagcacaccctcatctttgatggcagcaccaacccagcccatcccaaacacatcggcagcatcgaccccaactgcaacgtctctgaggtggtcaaagatgcctacgacatggctaagctcctgtgtgacaagtattacatggcctcacctgacctggagatccaggagatcaatgcagccaactccaaacagccgattcacatggtctacgtcccctcccacctctaccacatgctctttgagctcttcaagaatgccatgagggcgactgtggaaagccatgagtccagcctcattctcccacccatcaaggtcatggtggccttgggtgaggaagatctgtccatcaagatgagtgaccgaggtgggggtgttcccttgaggaagattgagcgactcttcagctacatgtactccacagcacccacctcggtcactcatcttgatggacagatcttcctcacccaaggccaccatgaccttgatgggtgggagaatgaggctggactcatggctttccacagtcgtcctt

SEQ ID NO: 419471 - DNA, 2142 bp, Homo sapiens
tgggcaggggccccaggcaccgtgatgtggagtcaagccgcctatacctcccttggctgccccagggctgctaggatccagcaatgcctgtgagaaaacctccttcaccttcctcaggcaggagctgcctgtgcgcctggccaacatcatgaaagagatcaacctgcttcccgaccgagtgctgagcacaccctccgtgcagctggtgcagagctggtatgtccagagcctcctggacatcatggagttcctggacaaggatcccgaggaccatcgcaccctgagccagttcactgacgccctggtcaccatccggaaccggcacaacgacgtggtgcccaccatggcacaaggcgtgcttgagtacaaggacacctacggcgatgaccccgtctccaaccagaacatccagtacttcctggaccgcttctacctcagccgcatctccatccgcatgctcatcaaccagcacaccctcatctttgatggcagcaccaacccagcccatcccaaacacatcggcagcatcgaccccaactgcaacgtctctgaggtggtcaaagatgcctacgacatggctaagctcctgtgtgacaagtattacatggcctcacctgacctggagatccaggagatcaatgcagccaactccaaacagccgattcacatggtctacgtcccctcccacctctaccacatgctctttgagctcttcaagaatgccatgagggcgactgtggaaagccatgagtccagcctcattctcccacccatcaaggtcatggtggccttgggtgaggaagatctgtccatcaagatgagtgaccgaggtgggggtgttcccttgaggaagattgagcgactcttcagctacatgtactccacagcacccaccccccagcctggcaccgggggaacgccgctggctggctttggttatgggctccccatttcccgcctctacgccaagtacttccagggagacctgcagctcttctccatggaaggctttgggaccgatgctgtcatctatctcaaggccctgtccacggactcggtggagcgcctgcctgtctacaacaagtcagcctggcgccactaccagaccatccaggaggccggcgactggtgtgtgcccagcacggagcccaagaacacgtccacgtaccgcgtcagctaagggccgccgtgcatctgcacctgagaggacggactgccgcctctgggtccccccaccgtggtgcccctcaccatcctcctgggggagcagggggtgggttctccctgatgaccaggttctgtctctatggaagtcactgcggtgataggtctgtgatggtccctaagtgccagtccatctctgtggagacccctcggtggcctccctatctctgtgggcgatgcctgagggttagggatgtctccaccctgatggggtgtcccagagacattttcccatggcagtcctcctctctgagaccagggctgtcacttttctgccaggggtactgggtccccctcagcaccctccacagcacaggccttccaagtggatgtcccgttgccttattcccccagcccacaaaggcaccctggccttggtctgctgaagtgttaggaagagggtgggtgccctccagacctggggactgagtggggaaaggagttacacccgtgagtggggaatgaggctggtcctgcagcctctccctccgctcagggcttgaaggtcggtggcggagggggtggctctcacagggcccaactctaaagtggaagaaccttgttagaccgagagcttgccatccagccaagctgctcgaggccctgcagtggccttggcaatgtctgtgccacctcctgagccctcccagcatgtcctcacatgctcatgcccacccgctcctccacaagcctagtccatcctgcctgagctccagcccccagcccccactgtgcccagacatgtgtgctcagggtggctttctccctaggaccttctgtgtatatagttagttttataaccctgaatgcccccacccttcccctaagcacacaggggttaaagctgtgtgtccctcccagtggctgtggcagtgacagtgacacccacacccacagtaaagaggagactgaatgaga

SEQ ID NO: 419472 - DNA, 1841 bp, Homo sapiens
tagagcatccccggggcccttaaccctgacgtggtgcccaccatggcacaaggcgtgcttgagtacaaggacacctacggcgatgaccccgtctccaaccagaacatccagtacttcctggaccgcttctacctcagccgcatctccatccgcatgctcatcaaccagcacaccctcatctttgatggcagcaccaacccagcccatcccaaacacatcggcagcatcgaccccaactgcaacgtctctgaggtggtcaaagatgcctacgacatggctaagctcctgtgtgacaagtattacatggcctcacctgacctggagatccaggagatcaatgcagccaactccaaacagccgattcacatggtctacgtcccctcccacctctaccacatgctctttgagctcttcaagaatgccatgagggcgactgtggaaagccatgagtccagcctcattctcccacccatcaaggtcatggtggccttgggtgaggaagatctgtccatcaagatgagtgaccgaggtgggggtgttcccttgaggaagattgagcgactcttcagctacatgtactccacagcacccaccccccagcctggcaccgggggaacgccgctggctggctttggttatgggctccccatttcccgcctctacgccaagtacttccagggagacctgcagctcttctccatggaaggctttgggaccgatgctgtcatctatctcaaggccctgtccacggactcggtggagcgcctgcctgtctacaacaagtcagcctggcgccactaccagaccatccaggaggccggcgactggtgtgtgcccagcacggagcccaagaacacgtccacgtaccgcgtcagctaagggccgccgtgcatctgcacctgagaggacggactgccgcctctgggtccccccaccgtggtgcccctcaccatcctcctgggggagcagggggtgggttctccctgatgaccaggttctgtctctatggaagtcactgcggtgataggtctgtgatggtccctaagtgccagtccatctctgtggagacccctcggtggcctccctatctctgtgggcgatgcctgagggttagggatgtctccaccctgatggggtgtcccagagacattttcccatggcagtcctcctctctgagaccagggctgtcacttttctgccaggggtactgggtccccctcagcaccctccacagcacaggccttccaagtggatgtcccgttgccttattcccccagcccacaaaggcaccctggccttggtctgctgaagtgttaggaagagggtgggtgccctccagacctggggactgagtggggaaaggagttacacccgtgagtggggaatgaggctggtcctgcagcctctccctccgctcagggcttgaaggtcggtggcggagggggtggctctcacagggcccaactctaaagtggaagaaccttgttagaccgagagcttgccatccagccaagctgctcgaggccctgcagtggccttggcaatgtctgtgccacctcctgagccctcccagcatgtcctcacatgctcatgcccacccgctcctccacaagcctagtccatcctgcctgagctccagcccccagcccccactgtgcccagacatgtgtgctcagggtggctttctccctaggaccttctgtgtatatagttagttttataaccctgaatgcccccacccttcccctaagcacacaggggttaaagctgtgtgtccctcccagtggctgtggcagtgacagtgacacccacacccacagtaaagaggagactgaatgaga

SEQ ID NO: 419473 - DNA, 943 bp, Homo sapiens
tggaatgcccgccagggcaagggtagggaggaggcggccgaaccgcgtcgctgggccgaaaggtgcgcgagcgctgcccgcgcggggaccacaaccaaagtcgcggccgccgcagccatgcgctgggtgtgggcgctgctgaagaatgcgtccctggcaggggcgcccaagtacatagagcacttcagcaagttctccccgtccccgctgtccatgaagcagtttctggacttcggatccagcaatgcctgtgagaaaacctccttcaccttcctcaggcaggagctgcctgtgcgcctggccaacatcatgaaagagatcaacctgcttcccgaccgagtgctgagcacaccctccgtgcagctggtgcagagctggtatgtccagagcctcctggacatcatggagttcctggacaaggatcccgaggaccatcgcaccctgagccagttcactgacgccctggtcaccatccggaaccggcacaacgacgtggtgcccaccatggcacaaggcgtgcttgagtacaaggacacctacggcgatgaccccgtctccaaccagaacatccagtacttcctggaccgcttctacctcagccgcatctccatccgcatgctcatcaaccagcacagtgggtgccggccacagcggcggggagcgggcggtggagggggcggtgctggggcccagggccgggctgctgaggggacctagaccactcttcagaaccccacaaagggagtctttgaatagttactccagtaactatggagttaatggctccaacatggaaaaataaaatttttctttctcattgattttccatttcaaaacgttttgttttcagtgtttgcaaaatgtaaaattatgtcacatctttaaaagaatgtttaatttagtatttataaaaactctcattatgttcaaaaacaaaatgttg

SEQ ID NO: 419474 - DNA, 1156 bp, Homo sapiens
tggaatgcccgccagggcaagggtagggaggaggcggccgaaccgcgtcgctgggccgaaaggtgcgcgagcgctgcccgcgcggggaccacaaccaaagtcgcggccgccgcagccatgcgctgggtgtgggcgctgctgaagaatgcgtccctggcaggggcgcccaagtacatagagcacttcagcaagttctccccgtccccgctgtccatgaagcagtttctggacttcggatccagcaatgcctgtgagaaaacctccttcaccttcctcaggcaggagctgcctgtgcgcctggccaacatcatgaaagagatcaacctgcttcccgaccgagtgctgagcacaccctccgtgcagctggtgcagagctggtatgtccagagcctcctggacatcatggagttcctggacaaggatcccgaggaccatcgcaccctgagccagttcactgacgccctggtcaccatccggaaccggcacaacgacgtggtgcccaccatggcacaaggcgtgcttgagtacaaggacacctacggcgatgaccccgtctccaaccagaacatccagtacttcctggaccgcttctacctcagccgcatctccatccgcatgctcatcaaccagcacagtgggtgccggccacagcggcggggagcgggcggtggagggggcggtgctggggcccagggccgggctgctgaggggacctagaccactcttcagaaccccacaaagggagtctttgaatagttactccagtaactatggagttaatggctccaacatggaaaaataaaatttttctttctcattgaaaaaaaaaaaaaaaaaaaaaaaaaaaaaaaattgtggggcgggcctctggcgccctatcagaaaaagcttctaaaagacaattccggtggggcgcggggcgacaaggtagggaaaggacgaacatgggggccaatatcgcgtggtccccaaagagaaatccggcgccaaggacataggggcgggggttcctcccacaaataaaaaaaacgcgcgggcggggaacacgcagcggcgtgtcggagaacaaactcccgaagagggagtgtccaggggggcccataccggggctctcatcacaggagggagtctcacacgggaggcccgaaattctcaa

SEQ ID NO: 419475 - DNA, 1735 bp, Homo sapiens
cccagctcaagggaggctggggatttagtctctcgctgggcagccatgtactcagaactttgtgggagggggtgcctcctttgggtaaggtggttgagcagtgacctcctgacggtttcctgacccttggtcttgacttgccctgtagcagccaactccaaacagccgattcacatggtctacgtcccctcccacctctaccacatgctctttgagctcttcaaggtgaggaggctgggagccggtgctttgcggggagcgtgagtagggctggcttctcccatgcatctcttacctctgcccctccgcagaatgccatgagggcgactgtggaaagccatgagtccagcctcattctcccacccatcaaggtcatggtggccttgggtgaggaagatctgtccatcaagatgagtgaccgaggtgggggtgttcccttgaggaagattgagcgactcttcagctacatgtactccacagcacccaccccccagcctggcaccgggggaacgccgctggctggctttggttatgggctccccatttcccgcctctacgccaagtacttccagggagacctgcagctcttctccatggaaggctttgggaccgatgctgtcatctatctcaaggccctgtccacggactcggtggagcgcctgcctgtctacaacaagtcagcctggcgccactaccagaccatccaggaggccggcgactggtgtgtgcccagcacggagcccaagaacacgtccacgtaccgcgtcagctaagggccgccgtgcatctgcacctgagaggacggactgccgcctctgggtccccccaccgtggtgcccctcaccatcctcctgggggagcagggggtgggttctccctgatgaccaggttctgtctctatggaagtcactgcggtgataggtctgtgatggtccctaagtgccagtccatctctgtggagacccctcggtggcctccctatctctgtgggcgatgcctgagggttagggatgtctccaccctgatggggtgtcccagagacattttcccatggcagtcctcctctctgagaccagggctgtcacttttctgccaggggtactgggtccccctcagcaccctccacagcacaggccttccaagtggatgtcccgttgccttattcccccagcccacaaaggcaccctggccttggtctgctgaagtgttaggaagagggtgggtgccctccagacctggggactgagtggggaaaggagttacacccgtgagtggggaatgaggctggtcctgcagcctctccctccgctcagggcttgaaggtcggtggcggagggggtggctctcacagggcccaactctaaagtggaagaaccttgttagaccgagagcttgccatccagccaagctgctcgaggccctgcagtggccttggcaatgtctgtgccacctcctgagccctcccagcatgtcctcacatgctcatgcccacccgctcctccacaagcctagtccatcctgcctgagctccagcccccagcccccactgtgcccagacatgtgtgctcagggtggctttctccctaggaccttctgtgtatatagttagttttataaccctgaatgcccccacccttcccctaagcacacaggggttaaagctgtgtgtccctcccagtggctgtggcagtgacagtgacacccacacccacagtaaagaggagactgaatgaga

SEQ ID NO: 419476 - DNA, 1304 bp, Homo sapiens
agtgtcgtttgttcaacgattaaagtcctacgtgacctaagttcagagccaggcctggctctgaacttaggcgggggaacgccgctggctggctttggttatgggctccccatttcccgcctctacgccaagtacttccagggagacctgcagctcttctccatggaaggctttgggaccgatgctgtcatctatctcaaggccctgtccacggactcggtggagcgcctgcctgtctacaacaagtcagcctggcgccactaccagaccatccaggaggccggcgactggtgtgtgcccagcacggagcccaagaacacgtccacgtaccgcgtcagctaagggccgccgtgcatctgcacctgagaggacggactgccgcctctgggtccccccaccgtggtgcccctcaccatcctcctgggggagcagggggtgggttctccctgatgaccaggttctgtctctatggaagtcactgcggtgataggtctgtgatggtccctaagtgccagtccatctctgtggagacccctcggtggcctccctatctctgtgggcgatgcctgagggttagggatgtctccaccctgatggggtgtcccagagacattttcccatggcagtcctcctctctgagaccagggctgtcacttttctgccaggggtactgggtccccctcagcaccctccacagcacaggccttccaagtggatgtcccgttgccttattcccccagcccacaaaggcaccctggccttggtctgctgaagtgttaggaagagggtgggtgccctccagacctggggactgagtggggaaaggagttacacccgtgagtggggaatgaggctggtcctgcagcctctccctccgctcagggcttgaaggtcggtggcggagggggtggctctcacagggcccaactctaaagtggaagaaccttgttagaccgagagcttgccatccagccaagctgctcgaggccctgcagtggccttggcaatgtctgtgccacctcctgagccctcccagcatgtcctcacatgctcatgcccacccgctcctccacaagcctagtccatcctgcctgagctccagcccccagcccccactgtgcccagacatgtgtgctcagggtggctttctccctaggaccttctgtgtatatagttagttttataaccctgaatgcccccacccttcccctaagcacacaggggttaaagctgtgtgtccctcccagtggctgtggcagtgacagtgacacccacacccacagtaaagaggagactgaatgaga

SEQ ID NO: 419477 - DNA, 1389 bp, Homo sapiens
gacacctaggtcttgccattcagttcagaggagaagactgaggcccggagtccgtgacttgctcagggtcacacagcccagcctcctccccctccctctccctcccttagagggagctgcttgcttgaatgggcaggagcgggacacaggagggaccacccttttgtggtctttccaggcccccgtgtctggcagctgggccgccctggagctggggtggggtggtctgctgaggagtggacaaggcacagggaggtgggaggggctgaccctgacactccccagggccctgtccacggactcggtggagcgcctgcctgtctacaacaagtcagcctggcgccactaccagaccatccaggaggccggcgactggtgtgtgcccagcacggagcccaagaacacgtccacgtaccgcgtcagctaagggccgccgtgcatctgcacctgagaggacggactgccgcctctgggtccccccaccgtggtgcccctcaccatcctcctgggggagcagggggtgggttctccctgatgaccaggttctgtctctatggaagtcactgcggtgataggtctgtgatggtccctaagtgccagtccatctctgtggagacccctcggtggcctccctatctctgtgggcgatgcctgagggttagggatgtctccaccctgatggggtgtcccagagacattttcccatggcagtcctcctctctgagaccagggctgtcacttttctgccaggggtactgggtccccctcagcaccctccacagcacaggccttccaagtggatgtcccgttgccttattcccccagcccacaaaggcaccctggccttggtctgctgaagtgttaggaagagggtgggtgccctccagacctggggactgagtggggaaaggagttacacccgtgagtggggaatgaggctggtcctgcagcctctccctccgctcagggcttgaaggtcggtggcggagggggtggctctcacagggcccaactctaaagtggaagaaccttgttagaccgagagcttgccatccagccaagctgctcgaggccctgcagtggccttggcaatgtctgtgccacctcctgagccctcccagcatgtcctcacatgctcatgcccacccgctcctccacaagcctagtccatcctgcctgagctccagcccccagcccccactgtgcccagacatgtgtgctcagggtggctttctccctaggaccttctgtgtatatagttagttttataaccctgaatgcccccacccttcccctaagcacacaggggttaaagctgtgtgtccctcccagtggctgtggcagtgacagtgacacccacacccacagtaaagaggagactgaatgaga

SEQ ID NO: 419478 - DNA, 768 bp, Homo sapiens
tggaatgcccgccagggcaagggtagggaggaggcggccgaaccgcgtcgctgggccgaaaggtgcgcgagcgctgcccgcgcggggaccacaaccaaagtcgcggccgccgcagccatgcgctgggtgtgggcgctgctgaagaatgcgtccctggcaggggcgcccaagtacatagagcacttcagcaagttctccccgtccccgctgtccatgaagcagtttctggacttcggatccagcaatgcctgtgagaaaacctccttcaccttcctcaggcaggagctgcctgtgcgcctggccaacatcatgaaagagatcaacctgcttcccgaccgagtgctgagcacaccctccgtgcagctggtgcagagctggtatgtccagagcctcctggacatcatggagttcctggacaaggatcccgaggaccatcgcaccctgagccagttcactgacgccctggtcaccatccggaaccggcacaacgacgtggtgcccaccatggcacaaggcgtgcttgagtacaaggacacctacggcgatgaccccgtctccaaccagaacatccagtacttcctggaccgcttctacctcagccgcatctccatccgcatgctcatcaaccagcacaccctcatctttgatggcagcaccaacccacacccttcccctaagcacacaggggttaaagctgtgtgtccctcccagtggctgtggcagtgacagtgacacccacacccacagtaaagaggagactgaatgaga

SEQ ID NO: 419479 - DNA, 769 bp, Homo sapiens
  misc_feature (1)..(1): n is a, c, g, or t
  misc_feature (17)..(17): n is a, c, g, or t
  misc_feature (19)..(19): n is a, c, g, or t
  misc_feature (21)..(21): n is a, c, g, or t
ncgtccctggcagggcnanangtgacatagagcacttcatcaagttctccccgtccccgctgctgaagaatgcgtccctggcaggggcgcccaagtacatagagcacttcagcaagttctccccgtccccgctgtccatgaagcagtttctggacttcggatccagcaatgcctgtgagaaaacctccttcaccttcctcaggcaggagctgcctgtgcgcctggccaacatcatgaaagagatcaacctgcttcccgaccgagtgctgagcacagttcactgacgccctggtcaccatccggaaccggcacaacgacgtggtgcccaccatggcacaaggcgtgcttgagtacaaggacacctacggcgatgaccccgtctccaaccagaacatccagtacttcctggaccgcttctacctcagccgcatctccatccgcatgctcatcaaccagcacagtgggtgccggccacagcggcggggagcgggcggtggagggggcggtgctggggcccagggccgggctgctgaggggacctagaccactcttcagaaccccacaaagggagtctttgaatagttactccagtaactatggagttaatggctccaacatggaaaaataaaatttttctttctcattgattttccatttcaaaacgttttgttttcagtgtttgcaaaatgtaaaattatgtcacatctttaaaagaatgtttaatttagtatttataaaaactctcattatgttcaaaaacaaaatgttg

SEQ ID NO: 419480 - DNA, 2354 bp, Homo sapiens
atgacaaaattaccctgaagaaataaccttattatgtgttaaattgtattaaatgcatttaacatttggatgctaaatgataatgaaaattgctaaaggttctttaatatggttcaaatctataagacttttttcttttagtaatactcagagggtcattctgctgcttgttatgaatcatagattacattcatgtcagattgatcaatatgtatgttttatgatttaacagcaaaaacctcttcaaacggaaaatttgaaagaaaggtttcaatagaaaaattatatatatatttatacatatatatgtgtgtgtgttactctcacagttcaactactgttgaactcaatcttttaatttatagttatacgtaggctatttatgtgtccaattgtatacctagaatacttacttaaaacttagtttacaactctttttaagatgagaactaaggcaattttgatatgattcatggtctattctttaaaaaaagatttcatttatgatagtatttgtaatgtttctgctggaaatcagaggcacgttccaagaggaaaatgtatataggagtacttttaaagaatatgtcactttgtaaattacatatcatgaaactaagcttttgacaagatacttaaaacctacagctgtaaaatacaggtttaaatggtgttcgtaatgctgagtgcatctgccagcccttttttattattaagtagaagattgtatctgtgccccttttttcgtagtggaaggtatatagccgagtataaaatggttttcttttgcattatctgtattcaaaaaacagggtagttatattaaagcttaccaaattgatggtgaatttatcagattaacctttttgtggtgcagatggttctaagtatcaggtgacagggtattctactctttctagtcaattaaaattgataatgcagcatgattcataaactaaccagctgtgcctccttttattttgaggaccctgtagtcactataataaatttctaagccaaatttttcaaacaagatagttcttatagaaggagaaataataaatatgtgtgtgttgatgcatgcacacagaatgacctgtgaaaggaaacttaaattttgccggtaaaacaaacatatctctacagactgtgattatacttcataagcatttaaatacagttttatttatttccttaaatatattacttgggtaattaattttagatttgattgcaaagagcactgtatagcagttgggaccagctcttggcttggcttggcttggcttattgttaagagtttattggatcaagactaacaaataactttgtgatgaaaattcttcaaaaatatagctactcttttcaagtataccatttaaaatatttcatcaggcagagccctgaccaggaaaaaaaaaaaaaagaaagaaagaaaagaaaaaaataaataaaatgctccaaaaagtgttttcagtagtcttcactggcccttgtgggaggaaaaatacttttttaacttgcttttctaagatttgttatatttaaatccaagagaaactatgccgaaaaaaagtgttataaagaggaatgcatgtagcattaatgcaaatatcaagaaaatacttgaaagagtccttttcatttatttaattaaatttggtgttttattttgtctgaatctgaatttctcctatttaatctatgcaattatgcttgttttatatttataagcacttgactcactgggtgtggtctttttactgtgttttatttcaaaacgttgttttaagtgatagtgtccttaaattttagtgtcatttggtcaacttactggtaacaccagaacaagaaagcaaaaaagtaataaattctgctggcacagaactaacatatcatttggtaactgtaaaacctatttgcagttaaaggttgatttattggataagggactaaaagaagcatatattacctttgcctttatattttttcttcttttaagaaggagcattatggaaaaataaatataaagtcttagtgaatttttgttatggttctcaattcagcaatctactggctgcttgcgaaactgtgaaatcaaattgttcttaacctttattcagtttagtttatagcattactgttttatgaaatgtgacattttaggagccaatataatagagctctaaaaggatagtatatctttaaattctgactggggagtaagaagagaagatattcttaccctactaaataaaccaacttttgagtagtatgcaatattatgaaatgttacaacactatattaaaaataataaaatattttaaaattgcatttaaaaaaatgtgtccat

SEQ ID NO: 419481 - DNA, 5891 bp, Homo sapiens
ggacgagtcgagcctcctgcggcgccgcgggctccagaaggagctgagcctgccacgccgaggacgtggctgccgcagcgggaaccgcaagagcttggtggtaggaacgccctccccgaccctctcccggcccctgtcgccattgtcggtcccaacggcaggcagcagccccttggatagtcctcggaatttctcggctgcctctgccctaaatttcccctttgcccggagggcagacggcagaagatggtccctcgcgtctctcccatcttccggctatggaaccaacacacccagctccaccctctcgtcaagctcatcctcccgggaacgtctccaccagcttcccttccagccgacgccggacgagctgcacttcctgtccaagcacttccgcagctcagagaatgtgcttgatgaggaaggcggccggtcaccccgcctccgaccccgctctcgcagtctcagcccgggccgtgcaacggggaccttcgacaatgagattgtcatgatgaatcacgtgtaccgggagaggttccccaaggccacagcacagatggagggccgtctgcaggagttcctgacggcctacgcgcccggcgcccggctggcgctggctgatggcgtcttgggcttcatccaccaccagatcgtcgagctggcccgagactgcttggccaagtctggcgagaacctcgtcacctcccgctacttcctagagatgcaggagaagctggagcggcttctgcaggatgcccatgagcgttcggacagtgaggaggtcagcttcatcgtccagcttgtccggaaactgctgatcatcatctcacggccagctcggctgctggagtgtctggagtttgaccctgaggaattttaccacctgctggaggcggctgagggccatgcgcgggagggccaaggcattaagactgaccttccacagtacatcattgggcagctgggcctggccaaggaccccctggaggagatggtgccactgagtcacctcgaagaagaacagcccccagcacctgagtccccagagagccgcgccctggtcggccagtcacggaggaagccatgcgaaagcgactttgagaccatcaaactcattagcaacggagcctatggggccgtctacctggtgcggcaccgtgacacacggcagcgctttgccatcaagaagatcaacaaacagaacttgatcctgcgtaaccagatccagcaggtctttgtggagcgtgacattctcacctttgccgagaacccctttgtggtcagcatgttctgctcctttgagacccggcgccacctatgtatggtcatggaatacgtggaaggcggcgactgcgccacgctcctgaagaacatgggcccgctgcccgtggacatggcccgcctgtacttcgccgagacggtgttggcgctggagtacctgcataactatggcatcgtgcaccgtgacctcaaaccagacaatctgctcatcacctcgcttggccacatcaagctcacggacttcggcctgtccaagatcggcctcatgagcatggccaccaacctctatgagggccacatcgagaaggacgcccgagagttcatcgacaagcaggtgtgtgggacgccggagtacatagcccccgaggtgatcttccgccagggctatgggaagccagtggactggtgggccatgggcgtcgtcctctatgagtttctggtgggctgcgtgcctttctttggagatacccccgaggaactcttcggtcaggtggtcagcgatgagatcatgtggccagagggagatgaggcccttccagcagacgcccaggacctcatcaccaggttgctccggcagagcccgctggaccgtctgggcactggtggcacccacgaagtgaagcagcacccctttttcctggccctggactgggcagggcttctccgacacaaagccgagttcgtgccccagctcgaagccgaggatgataccagctactttgacacacgttcggaacgttaccgccatctgggctccgaggacgacgagaccaatgatgaagaatcgtccacagagatcccccagttctcctcctgctcccaccggttcagcaaggtctacagcagctctgagttcctggccgtccagcccactcctaccttcgctgaaaggagcttcagtgaagaccgggaggaggggtgggagcgcagcgaagtggactatggccgccggctgagtgctgacatccggctgaggtcctggacatcctctggatcctcctgtcagtcatcttcgtcccagcccgagcggggtcccagcccatctctcctgaataccatcagcctggacacaatgcccaagtttgccttctcatcagaggatgagggggtaggcccaggccctgcaggccccaagaggcccgtcttcattctaggggagcctgaccccccaccagcggccaccccagtgatgcccaagccctcgagcctttctgccgacacagctgctctcagccacgcccgcctacggagcaatagcatcggcgcccgacactccacaccaaggcctctggatgccagccggggccgccgccttgggggcccaagagacccagcccctgagaagtccagagcctcctccagcggtggcagtggtggcggcagtgggggccgcgtgcccaagtcagcctctgtctctgccctgtccctcatcatcacggcagatgatggcagcggcggccccctcatgagccccctttccccgcgctctctgtcctcgaacccgtcgtcccgtgactcttcgccgagccgagacccgtcccccgtgtgtggcagcctgcggccccccatcgttatccacagctctggcaagaagtacggcttcagcctgcgggcgatccgcgtctacatgggtgatagcgacgtctacactgtgcaccacgtcgtctggagtgtggaggacggaagccccgcccaggaggcgggcctgcgggctggggacctcatcacccacatcaacggggagtcagtgctggggctggtgcacatggacgtcgtggagctgctgctgaagagcggcaacaagatatccctgcggaccacagccctggagaacacctccatcaaggtgggccccgcccggaagaatgtggccaagggccgcatggcacgcaggagcaagaggagccgtcggcgggagacccaggatcggcggaagtcacttttcaagaagatctccaagcagacctccgtgctgcacaccagccgcagcttctcctccggactccaccactcactgtcatccagtgagagcctccccggctcgcccacccacagcctctcccccagccccaccactccctgccgaagcccagcccctgatgtcccagcagataccactgcatccccacccagcgcatccccgagctccagcagccccgcctccccagctgctgctggccacacccgccccagctccctgcacggcctggctgccaagcttgggccaccccgccccaagactggccgccgcaagtccaccagcagcatcccgccctccccgctggcctgcccgcccatctccgcgcccccaccccgctcgccctcgcccctgcccgggcacccgcccgcacctgcccgatccccgcggctgcgccggggccagtcagctgacaagctgggcacaggggagcggctggatggggaggcggggcggcgcactcgtgggccagaggccgagctcgtggtcatgcggcggctgcacctgtccgagcgccgagactccttcaagaagcaggaggccgtgcaggaggttagcttcgatgagccgcaggaggaggccactgggctgcccacctcagtgccacagatcgccgtggagggcgaggaagccgtgccagtagctctcgggcccaccggaagagactgatcccctgccaggtctctccctggcatcaaagttacgcgttttcttgtgcaatgttttttccgtaaagtcatgcctggatggggactgagccaccagcctgacacccagaaggcgagaagccatctcggtccttgctggaaggtggagacatcgcttgtgttctggtgtcaatcaggggctggatggggcaagaatgggggacaagggtggctttgtaaatagcagcaaatccctgcaactaatttattactttttttttcttttttttttttttttttgagacagagtctcactctgttgcccgggctggagtgcagcggcgtgatctcagctcactgcaacctccgcctcccaagttcaagcgattgtcctgcctcagcttcccaagtggctgggattacaggcgcccaccactatgcccagctaattttttgtatttttagtacagacggggtttcaccatgttggtcaggctggtctcgaactcctgacctcatgatttgcctgcctttgcctcccaaagtgctgggattacaggcgtgagccactgggcccagcctaatttattactttttataagcgatagccgtactgagccgccccctgaaggcggctgccaggtcttgccccaggcacctgggactctgtttgcaggccctgccctctgggctgagaaggatgcactttggacaagtcatctgtgtttgtgttttccagtttttctgtactttttaagtgttttgtgttacctggtctcattcccctccccacacctacccatttgaggggatggagttgaagtcacctggtcacctgtaccggcccagttcggctacaacctggagtgtccgtaaacaattcctctcacccacaaaacaatgtaatcccagcgatggactggattctgaaggccacttcccaccatcatagctgccatgcccaggcagtgcctgctctatatatagagtctgcctccaatcctgctggcttcagcctggagaagggatatgggagctggagctttgatggatgaataggtgttcaccggatctgggcagaggggtcatccgctccccaggtgggcactgataaaggaaggtacaggcctcacctggaactgccaaggcagcctccagaaatgctcggctgtctcggggcacgctccagtatgccagtcctgcgggattacgtccagctacttccagaaacactcagtgtcccctcccctcaggctctgccttggcctggccttgtccagtctaccctggacaagatgccgtgtgtttgaggcccagcagagtaagcccttggccgtgatgtgtctgaaacacctgttaggggttccctccatatgtcagagcctctctgggatgaagttcaagccagaaaacccagtcgaggctcaagtttgaatttcagcttcactgtgtggctctgggaaaatggctttcccactctgtgcctcagtttccttgtgtttacaagactaatcccattgactgtttattaagcacctactgtgtgccaagcgcttttacgtggcttctccctcagccagccttgagaaggctggaggtggtgtcatcacctccattttacagacaaagcagctgagaccccagcgaggggcggagacctgtcccacgatcacccagcaggagtcgtggcagaacggagcatcagccagaccctgttgtgggcgttgtcatcaagggagcttgaatggagggtctggtgtcagatacagccgactccagccccagctcatcccccatgatgctgtgtgacccactgggcactctggtgagggagctttccagacatcaacagcccactctgcttccctttctgagtcccctgtccagcactgcctagtgttggagggtagaccaaggctgtgcatgattcaccccctccttccatcctggagctggcagtgaataaaagcccgtatttacaaaga

SEQ ID NO: 419482 - DNA, 5607 bp, Homo sapiens
cagccccggcccctccctgggctggtgtggaggcccaagttgtggctcctccttcaccccagccctgaccctgcctgagcctagcctctgattcttgtccctcaaccctggctcagatcccccaacatcctcccctggggttggtctcaggtcccatatcacaagccagctgtcttcctttcagcccgggccgtgcaacggggaccttcgacaatgagattgtcatgatgaatcacgtgtaccgggagaggttccccaaggccacagcacagatggagggccgtctgcaggagttcctgacggcctacgcgcccggcgcccggctggcgctggctgatggcgtcttgggcttcatccaccaccagatcgtcgagctggcccgagactgcttggccaagtctggcgagaacctcgtcacctcccgctacttcctagagatgcaggagaagctggagcggcttctgcaggatgcccatgagcgttcggacagtgaggaggtcagcttcatcgtccagcttgtccggaaactgctgatcatcatctcacggccagctcggctgctggagtgtctggagtttgaccctgaggaattttaccacctgctggaggcggctgagggccatgcgcgggagggccaaggcattaagactgaccttccacagtacatcattgggcagctgggcctggccaaggaccccctggaggagatggtgccactgagtcacctcgaagaagaacagcccccagcacctgagtccccagagagccgcgccctggtcggccagtcacggaggaagccatgcgaaagcgactttgagaccatcaaactcattagcaacggagcctatggggccgtctacctggtgcggcaccgtgacacacggcagcgctttgccatcaagaagatcaacaaacagaacttgatcctgcgtaaccagatccagcaggtctttgtggagcgtgacattctcacctttgccgagaacccctttgtggtcagcatgttctgctcctttgagacccggcgccacctatgtatggtcatggaatacgtggaaggcggcgactgcgccacgctcctgaagaacatgggcccgctgcccgtggacatggcccgcctgtacttcgccgagacggtgttggcgctggagtacctgcataactatggcatcgtgcaccgtgacctcaaaccagacaatctgctcatcacctcgcttggccacatcaagctcacggacttcggcctgtccaagatcggcctcatgagcatggccaccaacctctatgagggccacatcgagaaggacgcccgagagttcatcgacaagcaggtgtgtgggacgccggagtacatagcccccgaggtgatcttccgccagggctatgggaagccagtggactggtgggccatgggcgtcgtcctctatgagtttctggtgggctgcgtgcctttctttggagatacccccgaggaactcttcggtcaggtggtcagcgatgagatcatgtggccagagggagatgaggcccttccagcagacgcccaggacctcatcaccaggttgctccggcagagcccgctggaccgtctgggcactggtggcacccacgaagtgaagcagcacccctttttcctggccctggactgggcagggcttctccgacacaaagccgagttcgtgccccagctcgaagccgaggatgataccagctactttgacacacgttcggaacgttaccgccatctgggctccgaggacgacgagaccaatgatgaagaatcgtccacagagatcccccagttctcctcctgctcccaccggttcagcaaggtctacagcagctctgagttcctggccgtccagcccactcctaccttcgctgaaaggagcttcagtgaagaccgggaggaggggtgggagcgcagcgaagtggactatggccgccggctgagtgctgacatccggctgaggtcctggacatcctctggatcctcctgtcagtcatcttcgtcccagcccgagcggggtcccagcccatctctcctgaataccatcagcctggacacaatgcccaagtttgccttctcatcagaggatgagggggtaggcccaggccctgcaggccccaagaggcccgtcttcattctaggggagcctgaccccccaccagcggccaccccagtgatgcccaagccctcgagcctttctgccgacacagctgctctcagccacgcccgcctacggagcaatagcatcggcgcccgacactccacaccaaggcctctggatgccagccggggccgccgccttgggggcccaagagacccagcccctgagaagtccagagcctcctccagcggtggcagtggtggcggcagtgggggccgcgtgcccaagtcagcctctgtctctgccctgtccctcatcatcacggcagatgatggcagcggcggccccctcatgagccccctttccccgcgctctctgtcctcgaacccgtcgtcccgtgactcttcgccgagccgagacccgtcccccgtgtgtggcagcctgcggccccccatcgttatccacagctctggcaagaagtacggcttcagcctgcgggcgatccgcgtctacatgggtgatagcgacgtctacactgtgcaccacgtcgtctggagtgtggaggacggaagccccgcccaggaggcgggcctgcgggctggggacctcatcacccacatcaacggggagtcagtgctggggctggtgcacatggacgtcgtggagctgctgctgaagagcggcaacaagatatccctgcggaccacagccctggagaacacctccatcaaggtgggccccgcccggaagaatgtggccaagggccgcatggcacgcaggagcaagaggagccgtcggcgggagacccaggatcggcggaagtcacttttcaagaagatctccaagcagacctccgtgctgcacaccagccgcagcttctcctccggactccaccactcactgtcatccagtgagagcctccccggctcgcccacccacagcctctcccccagccccaccactccctgccgaagcccagcccctgatgtcccagcagataccactgcatccccacccagcgcatccccgagctccagcagccccgcctccccagctgctgctggccacacccgccccagctccctgcacggcctggctgccaagcttgggccaccccgccccaagactggccgccgcaagtccaccagcagcatcccgccctccccgctggcctgcccgcccatctccgcgcccccaccccgctcgccctcgcccctgcccgggcacccgcccgcacctgcccgatccccgcggctgcgccggggccagtcagctgacaagctgggcacaggggagcggctggatggggaggcggggcggcgcactcgtgggccagaggccgagctcgtggtcatgcggcggctgcacctgtccgagcgccgagactccttcaagaagcaggaggccgtgcaggaggttagcttcgatgagccgcaggaggaggccactgggctgcccacctcagtgccacagatcgccgtggagggcgaggaagccgtgccagtagctctcgggcccaccggaagagactgatcccctgccaggtctctccctggcatcaaagttacgcgttttcttgtgcaatgttttttccgtaaagtcatgcctggatggggactgagccaccagcctgacacccagaaggcgagaagccatctcggtccttgctggaaggtggagacatcgcttgtgttctggtgtcaatcaggggctggatggggcaagaatgggggacaagggtggctttgtaaatagcagcaaatccctgcaactaatttattactttttttttcttttttttttttttttttgagacagagtctcactctgttgcccgggctggagtgcagcggcgtgatctcagctcactgcaacctccgcctcccaagttcaagcgattgtcctgcctcagcttcccaagtggctgggattacaggcgcccaccactatgcccagctaattttttgtatttttagtacagacggggtttcaccatgttggtcaggctggtctcgaactcctgacctcatgatttgcctgcctttgcctcccaaagtgctgggattacaggcgtgagccactgggcccagcctaatttattactttttataagcgatagccgtactgagccgccccctgaaggcggctgccaggtcttgccccaggcacctgggactctgtttgcaggccctgccctctgggctgagaaggatgcactttggacaagtcatctgtgtttgtgttttccagtttttctgtactttttaagtgttttgtgttacctggtctcattcccctccccacacctacccatttgaggggatggagttgaagtcacctggtcacctgtaccggcccagttcggctacaacctggagtgtccgtaaacaattcctctcacccacaaaacaatgtaatcccagcgatggactggattctgaaggccacttcccaccatcatagctgccatgcccaggcagtgcctgctctatatatagagtctgcctccaatcctgctggcttcagcctggagaagggatatgggagctggagctttgatggatgaataggtgttcaccggatctgggcagaggggtcatccgctccccaggtgggcactgataaaggaaggtacaggcctcacctggaactgccaaggcagcctccagaaatgctcggctgtctcggggcacgctccagtatgccagtcctgcgggattacgtccagctacttccagaaacactcagtgtcccctcccctcaggctctgccttggcctggccttgtccagtctaccctggacaagatgccgtgtgtttgaggcccagcagagtaagcccttggccgtgatgtgtctgaaacacctgttaggggttccctccatatgtcagagcctctctgggatgaagttcaagccagaaaacccagtcgaggctcaagtttgaatttcagcttcactgtgtggctctgggaaaatggctttcccactctgtgcctcagtttccttgtgtttacaagactaatcccattgactgtttattaagcacctactgtgtgccaagcgcttttacgtggcttctccctcagccagccttgagaaggctggaggtggtgtcatcacctccattttacagacaaagcagctgagaccccagcgaggggcggagacctgtcccacgatcacccagcaggagtcgtggcagaacggagcatcagccagaccctgttgtgggcgttgtcatcaagggagcttgaatggagggtctggtgtcagatacagccgactccagccccagctcatcccccatgatgctgtgtgacccactgggcactctggtgagggagctttccagacatcaacagcccactctgcttccctttctgagtcccctgtccagcactgcctagtgttggagggtagaccaaggctgtgcatgattcaccccctccttccatcctggagctggcagtgaataaaagcccgtatttacaaaga

SEQ ID NO: 419483 - DNA, 5634 bp, Homo sapiens
cagccccggcccctccctgggctggtgtggaggcccaagttgtggctcctccttcaccccagccctgaccctgcctgagcctagcctctgattcttgtccctcaaccctggctcagatcccccaacatcctcccctggggttggtctcaggtcccatatcacaagccagctgtcttcctttcagcccgggccgtgcaacggggaccttcgacaatgagattgtcatgatgaatcacgtgtaccgggagaggttccccaaggccacagcacagatggagggccgtctgcaggagttcctgacggcctacgcgcccggcgcccggctggcgctggctgatggcgtcttgggcttcatccaccaccagatcgtcgagctggcccgagactgcttggccaagtctggcgagaacctcgtcacctcccgctacttcctagagatgcaggagaagctggagcggcttctgcaggatgcccatgagcgttcggacagtgaggaggtcagcttcatcgtccagcttgtccggaaactgctgatcatcatctcacggccagctcggctgctggagtgtctggagtttgaccctgaggaattttaccacctgctggaggcggctgagggccatgcgcgggagggccaaggcattaagactgaccttccacagtacatcattgggcagctgggcctggccaaggaccccctggaggagatggtgccactgagtcacctcgaagaagaacagcccccagcacctgagtccccagagagccgcgccctggtcggccagtcacggaggaagccatgcgaaagcgactttgagaccatcaaactcattagcaacggagcctatggggccgtctacctggtgcggcaccgtgacacacggcagcgctttgccatcaagaagatcaacaaacagaacttgatcctgcgtaaccagatccagcaggtctttgtggagcgtgacattctcacctttgccgagaacccctttgtggtcagcatgttctgctcctttgagacccggcgccacctatgtatggtcatggaatacgtggaaggcggcgactgcgccacgctcctgaagaacatgggcccgctgcccgtggacatggcccgcctgtacttcgccgagacggtgttggcgctggagtacctgcataactatggcatcgtgcaccgtgacctcaaaccagacaatctgctcatcacctcgcttggccacatcaagctcacggacttcggcctgtccaagatcggcctcatgagcatggccaccaacctctatgagggccacatcgagaaggacgcccgagagttcatcgacaagcaggtgtgtgggacgccggagtacatagcccccgaggtgatcttccgccagggctatgggaagccagtggactggtgggccatgggcgtcgtcctctatgagtttctggtgggctgcgtgcctttctttggagatacccccgaggaactcttcggtcaggtggtcagcgatgagatcatgtggccagagggagatgaggcccttccagcagacgcccaggacctcatcaccaggttgctccggcagagcccgctggaccgtctgggcactggtggcacccacgaagtgaagcagcacccctttttcctggccctggactgggcagggcttctccgacacaaagccgagttcgtgccccagctcgaagccgaggatgataccagctactttgacacacgttcggaacgttaccgccatctgggctccgaggacgacgagaccaatgatgaagaatcgtccacagagatcccccagttctcctcctgctcccaccggttcagcaaggtctacagcagctctgagttcctggccgtccagcccactcctaccttcgctgaaaggagcttcagtgaagaccgggaggaggggtgggagcgcagcgaagtggactatggccgccggctgagtgctgacatccggctgaggtcctggacatcctctggatcctcctgtcagtcatcttcgtcccagcccgagcggggtcccagcccatctctcctgaataccatcagcctggacacaatgcccaagtttgccttctcatcagaggatgagggggtaggcccaggccctgcaggccccaagaggcccgtcttcattctaggggagcctgaccccccaccagcggccaccccagtgatgcccaagccctcgagcctttctgccgacacagctgctctcagccacgcccgcctacggagcaatagcatcggcgcccgacactccacaccaaggcctctggatgccagccggggccgccgccttgggggcccaagagacccagcccctgagaagtccagagcctcctccagcggtggcagtggtggcggcagtgggggccgcgtgcccaagtcagcctctgtctctgccctgtccctcatcatcacggcagatgatggcagcggcggccccctcatgagccccctttccccgcgctctctgtcctcgaacccgtcgtcccgtgactcttcgccgagccgagacccgtcccccgtgtgtggcagcctgcggccccccatcgttatccacagctctggcaagaagtacggcttcagcctgcgggcgatccgcgtctacatgggtgatagcgacgtctacactgtgcaccacgtcgtctggagtgtggaggacggaagccccgcccaggaggcgggcctgcgggctggggacctcatcacccacatcaacggggagtcagtgctggggctggtgcacatggacgtcgtggagctgctgctgaagagcggcaacaagatatccctgcggaccacagccctggagaacacctccatcaaggtgggccccgcccggaagaatgtggccaagggccgcatggcacgcaggagcaagaggagccgtcggcgggagacccaggatcggtgcgcggcagtgaccaccagggagcggcggaagtcacttttcaagaagatctccaagcagacctccgtgctgcacaccagccgcagcttctcctccggactccaccactcactgtcatccagtgagagcctccccggctcgcccacccacagcctctcccccagccccaccactccctgccgaagcccagcccctgatgtcccagcagataccactgcatccccacccagcgcatccccgagctccagcagccccgcctccccagctgctgctggccacacccgccccagctccctgcacggcctggctgccaagcttgggccaccccgccccaagactggccgccgcaagtccaccagcagcatcccgccctccccgctggcctgcccgcccatctccgcgcccccaccccgctcgccctcgcccctgcccgggcacccgcccgcacctgcccgatccccgcggctgcgccggggccagtcagctgacaagctgggcacaggggagcggctggatggggaggcggggcggcgcactcgtgggccagaggccgagctcgtggtcatgcggcggctgcacctgtccgagcgccgagactccttcaagaagcaggaggccgtgcaggaggttagcttcgatgagccgcaggaggaggccactgggctgcccacctcagtgccacagatcgccgtggagggcgaggaagccgtgccagtagctctcgggcccaccggaagagactgatcccctgccaggtctctccctggcatcaaagttacgcgttttcttgtgcaatgttttttccgtaaagtcatgcctggatggggactgagccaccagcctgacacccagaaggcgagaagccatctcggtccttgctggaaggtggagacatcgcttgtgttctggtgtcaatcaggggctggatggggcaagaatgggggacaagggtggctttgtaaatagcagcaaatccctgcaactaatttattactttttttttcttttttttttttttttttgagacagagtctcactctgttgcccgggctggagtgcagcggcgtgatctcagctcactgcaacctccgcctcccaagttcaagcgattgtcctgcctcagcttcccaagtggctgggattacaggcgcccaccactatgcccagctaattttttgtatttttagtacagacggggtttcaccatgttggtcaggctggtctcgaactcctgacctcatgatttgcctgcctttgcctcccaaagtgctgggattacaggcgtgagccactgggcccagcctaatttattactttttataagcgatagccgtactgagccgccccctgaaggcggctgccaggtcttgccccaggcacctgggactctgtttgcaggccctgccctctgggctgagaaggatgcactttggacaagtcatctgtgtttgtgttttccagtttttctgtactttttaagtgttttgtgttacctggtctcattcccctccccacacctacccatttgaggggatggagttgaagtcacctggtcacctgtaccggcccagttcggctacaacctggagtgtccgtaaacaattcctctcacccacaaaacaatgtaatcccagcgatggactggattctgaaggccacttcccaccatcatagctgccatgcccaggcagtgcctgctctatatatagagtctgcctccaatcctgctggcttcagcctggagaagggatatgggagctggagctttgatggatgaataggtgttcaccggatctgggcagaggggtcatccgctccccaggtgggcactgataaaggaaggtacaggcctcacctggaactgccaaggcagcctccagaaatgctcggctgtctcggggcacgctccagtatgccagtcctgcgggattacgtccagctacttccagaaacactcagtgtcccctcccctcaggctctgccttggcctggccttgtccagtctaccctggacaagatgccgtgtgtttgaggcccagcagagtaagcccttggccgtgatgtgtctgaaacacctgttaggggttccctccatatgtcagagcctctctgggatgaagttcaagccagaaaacccagtcgaggctcaagtttgaatttcagcttcactgtgtggctctgggaaaatggctttcccactctgtgcctcagtttccttgtgtttacaagactaatcccattgactgtttattaagcacctactgtgtgccaagcgcttttacgtggcttctccctcagccagccttgagaaggctggaggtggtgtcatcacctccattttacagacaaagcagctgagaccccagcgaggggcggagacctgtcccacgatcacccagcaggagtcgtggcagaacggagcatcagccagaccctgttgtgggcgttgtcatcaagggagcttgaatggagggtctggtgtcagatacagccgactccagccccagctcatcccccatgatgctgtgtgacccactgggcactctggtgagggagctttccagacatcaacagcccactctgcttccctttctgagtcccctgtccagcactgcctagtgttggagggtagaccaaggctgtgcatgattcaccccctccttccatcctggagctggcagtgaataaaagcccgtatttacaaaga

SEQ ID NO: 419484 - DNA, 5495 bp, Homo sapiens
cagccccggcccctccctgggctggtgtggaggcccaagttgtggctcctccttcaccccagccctgaccctgcctgagcctagcctctgattcttgtccctcaaccctggctcagatcccccaacatcctcccctggggttggtctcaggtcccatatcacaagccagctgtcttcctttcagcccgggccgtgcaacggggaccttcgacaatgagattgtcatgatgaatcacgtgtaccgggagaggttccccaaggccacagcacagatggagggccgtctgcaggagttcctgacggcctacgcgcccggcgcccggctggcgctggctgatggcgtcttgggcttcatccaccaccagatcgtcgagctggcccgagactgcttggccaagtctggcgagaacctcgtcacctcccgctacttcctagagatgcaggagaagctggagcggcttctgcaggatgcccatgagcgttcggacagtgaggaggtcagcttcatcgtccagcttgtccggaaactgctgatcatcatctcacggccagctcggctgctggagtgtctggagtttgaccctgaggaattttaccacctgctggaggcggctgagggccatgcgcgggagggccaaggcattaagactgaccttccacagtacatcattgggcagctgggcctggccaaggaccccctggaggagatggtgccactgagtcacctcgaagaagaacagcccccagcacctgagtccccagagagccgcgccctggtcggccagtcacggaggaagccatgcgaaagcgactttgagaccatcaaactcattagcaacggagcctatggggccgtctacctggtgcggcaccgtgacacacggcagcgctttgccatcaagaagatcaacaaacagaacttgatcctgcgtaaccagatccagcaggtctttgtggagcgtgacattctcacctttgccgagaacccctttgtggtcagcatgttctgctcctttgagacccggcgccacctatgtatggtcatggaatacgtggaaggcggcgactgcgccacgctcctgaagaacatgggcccgctgcccgtggacatggcccgcctgtacttcgccgagacggtgttggcgctggagtacctgcataactatggcatcgtgcaccgtgacctcaaaccagacaatctgctcatcacctcgcttggccacatcaagctcacggacttcggcctgtccaagatcggcctcatgagcatggccaccaacctctatgagggccacatcgagaaggacgcccgagagttcatcgacaagcaggtgtgtgggacgccggagtacatagcccccgaggtgatcttccgccagggctatgggaagccagtggactggtgggccatgggcgtcgtcctctatgagtttctggtgggctgcgtgcctttctttggagatacccccgaggaactcttcggtcaggtggtcagcgatgagatcatgtggccagagggagatgaggcccttccagcagacgcccaggacctcatcaccaggttgctccggcagagcccgctggaccgtctgggcactggtggcacccacgaagtgaagcagcacccctttttcctggccctggactgggcagggcttctccgacacaaagccgagttcgtgccccagctcgaagccgaggatgataccagctactttgacacacgttcggaacgttaccgccatctgggctccgaggacgacgagaccaatgatgaagaatcgtccacagagatcccccagttctcctcctgctcccaccggttcagcaaggtctacagcagctctgagttcctggccgtccagcccactcctaccttcgctgaaaggagcttcagtgaagaccgggaggaggggtgggagcgcagcgaagtggactatggccgccggctgagtgctgacatccggctgaggtcctggacatcctctggatcctcctgtcagtcatcttcgtcccagcccgagcggggtcccagcccatctctcctgaataccatcagcctggacacaatgcccaagtttgccttctcatcagaggatgagggggtaggcccaggccctgcaggccccaagaggcccgtcttcattctaggggagcctgaccccccaccagcggccaccccagtgatgcccaagccctcgagcctttctgccgacacagctgctctcagccacgcccgcctacggagcaatagcatcggcgcccgacactccacaccaaggcctctggatgccagccggggccgccgccttgggggcccaagagacccagcccctgagaagtccagagcctcctccagcggtggcagtggtggcggcagtgggggccgcgtgcccaagtcagcctctgtctctgccctgtccctcatcatcacggcagctctggcaagaagtacggcttcagcctgcgggcgatccgcgtctacatgggtgatagcgacgtctacactgtgcaccacgtcgtctggagtgtggaggacggaagccccgcccaggaggcgggcctgcgggctggggacctcatcacccacatcaacggggagtcagtgctggggctggtgcacatggacgtcgtggagctgctgctgaagagcggcaacaagatatccctgcggaccacagccctggagaacacctccatcaaggtgggccccgcccggaagaatgtggccaagggccgcatggcacgcaggagcaagaggagccgtcggcgggagacccaggatcggtgcgcggcagtgaccaccagggagcggcggaagtcacttttcaagaagatctccaagcagacctccgtgctgcacaccagccgcagcttctcctccggactccaccactcactgtcatccagtgagagcctccccggctcgcccacccacagcctctcccccagccccaccactccctgccgaagcccagcccctgatgtcccagcagataccactgcatccccacccagcgcatccccgagctccagcagccccgcctccccagctgctgctggccacacccgccccagctccctgcacggcctggctgccaagcttgggccaccccgccccaagactggccgccgcaagtccaccagcagcatcccgccctccccgctggcctgcccgcccatctccgcgcccccaccccgctcgccctcgcccctgcccgggcacccgcccgcacctgcccgatccccgcggctgcgccggggccagtcagctgacaagctgggcacaggggagcggctggatggggaggcggggcggcgcactcgtgggccagaggccgagctcgtggtcatgcggcggctgcacctgtccgagcgccgagactccttcaagaagcaggaggccgtgcaggaggttagcttcgatgagccgcaggaggaggccactgggctgcccacctcagtgccacagatcgccgtggagggcgaggaagccgtgccagtagctctcgggcccaccggaagagactgatcccctgccaggtctctccctggcatcaaagttacgcgttttcttgtgcaatgttttttccgtaaagtcatgcctggatggggactgagccaccagcctgacacccagaaggcgagaagccatctcggtccttgctggaaggtggagacatcgcttgtgttctggtgtcaatcaggggctggatggggcaagaatgggggacaagggtggctttgtaaatagcagcaaatccctgcaactaatttattactttttttttcttttttttttttttttttgagacagagtctcactctgttgcccgggctggagtgcagcggcgtgatctcagctcactgcaacctccgcctcccaagttcaagcgattgtcctgcctcagcttcccaagtggctgggattacaggcgcccaccactatgcccagctaattttttgtatttttagtacagacggggtttcaccatgttggtcaggctggtctcgaactcctgacctcatgatttgcctgcctttgcctcccaaagtgctgggattacaggcgtgagccactgggcccagcctaatttattactttttataagcgatagccgtactgagccgccccctgaaggcggctgccaggtcttgccccaggcacctgggactctgtttgcaggccctgccctctgggctgagaaggatgcactttggacaagtcatctgtgtttgtgttttccagtttttctgtactttttaagtgttttgtgttacctggtctcattcccctccccacacctacccatttgaggggatggagttgaagtcacctggtcacctgtaccggcccagttcggctacaacctggagtgtccgtaaacaattcctctcacccacaaaacaatgtaatcccagcgatggactggattctgaaggccacttcccaccatcatagctgccatgcccaggcagtgcctgctctatatatagagtctgcctccaatcctgctggcttcagcctggagaagggatatgggagctggagctttgatggatgaataggtgttcaccggatctgggcagaggggtcatccgctccccaggtgggcactgataaaggaaggtacaggcctcacctggaactgccaaggcagcctccagaaatgctcggctgtctcggggcacgctccagtatgccagtcctgcgggattacgtccagctacttccagaaacactcagtgtcccctcccctcaggctctgccttggcctggccttgtccagtctaccctggacaagatgccgtgtgtttgaggcccagcagagtaagcccttggccgtgatgtgtctgaaacacctgttaggggttccctccatatgtcagagcctctctgggatgaagttcaagccagaaaacccagtcgaggctcaagtttgaatttcagcttcactgtgtggctctgggaaaatggctttcccactctgtgcctcagtttccttgtgtttacaagactaatcccattgactgtttattaagcacctactgtgtgccaagcgcttttacgtggcttctccctcagccagccttgagaaggctggaggtggtgtcatcacctccattttacagacaaagcagctgagaccccagcgaggggcggagacctgtcccacgatcacccagcaggagtcgtggcagaacggagcatcagccagaccctgttgtgggcgttgtcatcaagggagcttgaatggagggtctggtgtcagatacagccgactccagccccagctcatcccccatgatgctgtgtgacccactgggcactctggtgagggagctttccagacatcaacagcccactctgcttccctttctgagtcccctgtccagcactgcctagtgttggagggtagaccaaggctgtgcatgattcaccccctccttccatcctggagctggcagtgaataaaagcccgtatttacaaaga

SEQ ID NO: 419485 - DNA, 5422 bp, Homo sapiens
cagccccggcccctccctgggctggtgtggaggcccaagttgtggctcctccttcaccccagccctgaccctgcctgagcctagcctctgattcttgtccctcaaccctggctcagatcccccaacatcctcccctggggttggtctcaggtcccatatcacaagccagctgtcttcctttcagcccgggccgtgcaacggggaccttcgacaatgagattgtcatgatgaatcacgtgtaccgggagaggttccccaaggccacagcacagatggagggccgtctgcaggagttcctgacggcctacgcgcccggcgcccggctggcgctggctgatggcgtcttgggcttcatccaccaccagatcgtcgagctggcccgagactgcttggccaagtctggcgagaacctcgtcacctcccgctacttcctagagatgcaggagaagctggagcggcttctgcaggatgcccatgagcgttcggacagtgaggaggtcagcttcatcgtccagcttgtccggaaactgctgatcatcatctcacggccagctcggctgctggagtgtctggagtttgaccctgaggaattttaccacctgctggaggcggctgagggccatgcgcgggagggccaaggcattaagactgaccttccacagtacatcattgggcagctgggcctggccaaggaccccctggaggagatggtgccactgagtcacctcgaagaagaacagcccccagcacctgagtccccagagagccgcgccctggtcggccagtcacggaggaagccatgcgaaagcgactttgagaccatcaaactcattagcaacggagcctatggggccgtctacctggtgcggcaccgtgacacacggcagcgctttgccatcaagaagatcaacaaacagaacttgatcctgcgtaaccagatccagcaggtctttgtggagcgtgacattctcacctttgccgagaacccctttgtggtcagcatgttctgctcctttgagacccggcgccacctatgtatggtcatggaatacgtggaaggcggcgactgcgccacgctcctgaagaacatgggcccgctgcccgtggacatggcccgcctgtacttcgccgagacggtgttggcgctggagtacctgcataactatggcatcgtgcaccgtgacctcaaaccagacaatctgctcatcacctcgcttggccacatcaagctcacggacttcggcctgtccaagatcggcctcatgagcatggccaccaacctctatgagggccacatcgagaaggacgcccgagagttcatcgacaagcaggtgtgtgggacgccggagtacatagcccccgaggtgatcttccgccagggctatgggaagccagtggactggtgggccatgggcgtcgtcctctatgagtttctggtgggctgcgtgcctttctttggagatacccccgaggaactcttcggtcaggtggtcagcgatgagatcatgtggccagagggagatgaggcccttccagcagacgcccaggacctcatcaccaggttgctccggcagagcccgctggaccgtctgggcactggtggcacccacgaagtgaagcagcacccctttttcctggccctggactgggcagggcttctccgacacaaagccgagttcgtgccccagctcgaagccgaggatgataccagctactttgacacacgttcggaacgttaccgccatctgggctccgaggacgacgagaccaatgatgaagaatcgtccacagagatcccccagttctcctcctgctcccaccggttcagcaaggtctacagcagctctgagttcctggccgtccagcccactcctaccttcgctgaaaggagcttcagtgaagaccgggaggaggggtgggagcgcagcgaagtggactatggccgccggctgagtgctgacatccggggagcctgaccccccaccagcggccaccccagtgatgcccaagccctcgagcctttctgccgacacagctgctctcagccacgcccgcctacggagcaatagcatcggcgcccgacactccacaccaaggcctctggatgccagccggggccgccgccttgggggcccaagagacccagcccctgagaagtccagagcctcctccagcggtggcagtggtggcggcagtgggggccgcgtgcccaagtcagcctctgtctctgccctgtccctcatcatcacggcagatgatggcagcggcggccccctcatgagccccctttccccgcgctctctgtcctcgaacccgtcgtcccgtgactcttcgccgagccgagacccgtcccccgtgtgtggcagcctgcggccccccatcgttatccacagctctggcaagaagtacggcttcagcctgcgggcgatccgcgtctacatgggtgatagcgacgtctacactgtgcaccacgtcgtctggagtgtggaggacggaagccccgcccaggaggcgggcctgcgggctggggacctcatcacccacatcaacggggagtcagtgctggggctggtgcacatggacgtcgtggagctgctgctgaagagcggcaacaagatatccctgcggaccacagccctggagaacacctccatcaaggtgggccccgcccggaagaatgtggccaagggccgcatggcacgcaggagcaagaggagccgtcggcgggagacccaggatcggcggaagtcacttttcaagaagatctccaagcagacctccgtgctgcacaccagccgcagcttctcctccggactccaccactcactgtcatccagtgagagcctccccggctcgcccacccacagcctctcccccagccccaccactccctgccgaagcccagcccctgatgtcccagcagataccactgcatccccacccagcgcatccccgagctccagcagccccgcctccccagctgctgctggccacacccgccccagctccctgcacggcctggctgccaagcttgggccaccccgccccaagactggccgccgcaagtccaccagcagcatcccgccctccccgctggcctgcccgcccatctccgcgcccccaccccgctcgccctcgcccctgcccgggcacccgcccgcacctgcccgatccccgcggctgcgccggggccagtcagctgacaagctgggcacaggggagcggctggatggggaggcggggcggcgcactcgtgggccagaggccgagctcgtggtcatgcggcggctgcacctgtccgagcgccgagactccttcaagaagcaggaggccgtgcaggaggttagcttcgatgagccgcaggaggaggccactgggctgcccacctcagtgccacagatcgccgtggagggcgaggaagccgtgccagtagctctcgggcccaccggaagagactgatcccctgccaggtctctccctggcatcaaagttacgcgttttcttgtgcaatgttttttccgtaaagtcatgcctggatggggactgagccaccagcctgacacccagaaggcgagaagccatctcggtccttgctggaaggtggagacatcgcttgtgttctggtgtcaatcaggggctggatggggcaagaatgggggacaagggtggctttgtaaatagcagcaaatccctgcaactaatttattactttttttttcttttttttttttttttttgagacagagtctcactctgttgcccgggctggagtgcagcggcgtgatctcagctcactgcaacctccgcctcccaagttcaagcgattgtcctgcctcagcttcccaagtggctgggattacaggcgcccaccactatgcccagctaattttttgtatttttagtacagacggggtttcaccatgttggtcaggctggtctcgaactcctgacctcatgatttgcctgcctttgcctcccaaagtgctgggattacaggcgtgagccactgggcccagcctaatttattactttttataagcgatagccgtactgagccgccccctgaaggcggctgccaggtcttgccccaggcacctgggactctgtttgcaggccctgccctctgggctgagaaggatgcactttggacaagtcatctgtgtttgtgttttccagtttttctgtactttttaagtgttttgtgttacctggtctcattcccctccccacacctacccatttgaggggatggagttgaagtcacctggtcacctgtaccggcccagttcggctacaacctggagtgtccgtaaacaattcctctcacccacaaaacaatgtaatcccagcgatggactggattctgaaggccacttcccaccatcatagctgccatgcccaggcagtgcctgctctatatatagagtctgcctccaatcctgctggcttcagcctggagaagggatatgggagctggagctttgatggatgaataggtgttcaccggatctgggcagaggggtcatccgctccccaggtgggcactgataaaggaaggtacaggcctcacctggaactgccaaggcagcctccagaaatgctcggctgtctcggggcacgctccagtatgccagtcctgcgggattacgtccagctacttccagaaacactcagtgtcccctcccctcaggctctgccttggcctggccttgtccagtctaccctggacaagatgccgtgtgtttgaggcccagcagagtaagcccttggccgtgatgtgtctgaaacacctgttaggggttccctccatatgtcagagcctctctgggatgaagttcaagccagaaaacccagtcgaggctcaagtttgaatttcagcttcactgtgtggctctgggaaaatggctttcccactctgtgcctcagtttccttgtgtttacaagactaatcccattgactgtttattaagcacctactgtgtgccaagcgcttttacgtggcttctccctcagccagccttgagaaggctggaggtggtgtcatcacctccattttacagacaaagcagctgagaccccagcgaggggcggagacctgtcccacgatcacccagcaggagtcgtggcagaacggagcatcagccagaccctgttgtgggcgttgtcatcaagggagcttgaatggagggtctggtgtcagatacagccgactccagccccagctcatcccccatgatgctgtgtgacccactgggcactctggtgagggagctttccagacatcaacagcccactctgcttccctttctgagtcccctgtccagcactgcctagtgttggagggtagaccaaggctgtgcatgattcaccccctccttccatcctggagctggcagtgaataaaagcccgtatttacaaaga

SEQ ID NO: 419486 - DNA, 3739 bp, Homo sapiens
cacgagggttcgctgccctgaagttcagttagtgcctctgagagcaccttaatgttgctctgcctcactcagctggccaaggggttggtgacacccgagctgaggtcctggacatcctctggatcctcctgtcagtcatcttcgtcccagcccgagcggggtcccagcccatctctcctgaataccatcagcctggacacaatgcccaagtttgccttctcatcagaggatgagggggtaggcccaggccctgcaggccccaagaggcccgtcttcattctaggggagcctgaccccccaccagcggccaccccagtgatgcccaagccctcgagcctttctgccgacacagctgctctcagccacgcccgcctacggagcaatagcatcggcgcccgacactccacaccaaggcctctggatgccagccggggccgccgccttgggggcccaagagacccagcccctgagaagtccagagcctcctccagcggtggcagtggtggcggcagtgggggccgcgtgcccaagtcagcctctgtctctgccctgtccctcatcatcacggcagatgatggcagcggcggccccctcatgagccccctttccccgcgctctctgtcctcgaacccgtcgtcccgtgactcttcgccgagccgagacccgtcccccgtgtgtggcagcctgcggccccccatcgttatccacagctctggcaagaagtacggcttcagcctgcgggcgatccgcgtctacatgggtgatagcgacgtctacactgtgcaccacgtcgtctggagtgtggaggacggaagccccgcccaggaggcgggcctgcgggctggggacctcatcacccacatcaacggggagtcagtgctggggctggtgcacatggacgtcgtggagctgctgctgaagagcggcaacaagatatccctgcggaccacagccctggagaacacctccatcaaggtgggccccgcccggaagaatgtggccaagggccgcatggcacgcaggagcaagaggagccgtcggcgggagacccaggatcggcggaagtcacttttcaagaagatctccaagcagacctccgtgctgcacaccagccgcagcttctcctccggactccaccactcactgtcatccagtgagagcctccccggctcgcccacccacagcctctcccccagccccaccactccctgccgaagcccagcccctgatgtcccagcagataccactgcatccccacccagcgcatccccgagctccagcagccccgcctccccagctgctgctggccacacccgccccagctccctgcacggcctggctgccaagcttgggccaccccgccccaagactggccgccgcaagtccaccagcagcatcccgccctccccgctggcctgcccgcccatctccgcgcccccaccccgctcgccctcgcccctgcccgggcacccgcccgcacctgcccgatccccgcggctgcgccggggccagtcagctgacaagctgggcacaggggagcggctggatggggaggcggggcggcgcactcgtgggccagaggccgagctcgtggtcatgcggcggctgcacctgtccgagcgccgagactccttcaagaagcaggaggccgtgcaggaggttagcttcgatgagccgcaggaggaggccactgggctgcccacctcagtgccacagatcgccgtggagggcgaggaagccgtgccagtagctctcgggcccaccggaagagactgatcccctgccaggtctctccctggcatcaaagttacgcgttttcttgtgcaatgttttttccgtaaagtcatgcctggatggggactgagccaccagcctgacacccagaaggcgagaagccatctcggtccttgctggaaggtggagacatcgcttgtgttctggtgtcaatcaggggctggatggggcaagaatgggggacaagggtggctttgtaaatagcagcaaatccctgcaactaatttattactttttttttcttttttttttttttttttgagacagagtctcactctgttgcccgggctggagtgcagcggcgtgatctcagctcactgcaacctccgcctcccaagttcaagcgattgtcctgcctcagcttcccaagtggctgggattacaggcgcccaccactatgcccagctaattttttgtatttttagtacagacggggtttcaccatgttggtcaggctggtctcgaactcctgacctcatgatttgcctgcctttgcctcccaaagtgctgggattacaggcgtgagccactgggcccagcctaatttattactttttataagcgatagccgtactgagccgccccctgaaggcggctgccaggtcttgccccaggcacctgggactctgtttgcaggccctgccctctgggctgagaaggatgcactttggacaagtcatctgtgtttgtgttttccagtttttctgtactttttaagtgttttgtgttacctggtctcattcccctccccacacctacccatttgaggggatggagttgaagtcacctggtcacctgtaccggcccagttcggctacaacctggagtgtccgtaaacaattcctctcacccacaaaacaatgtaatcccagcgatggactggattctgaaggccacttcccaccatcatagctgccatgcccaggcagtgcctgctctatatatagagtctgcctccaatcctgctggcttcagcctggagaagggatatgggagctggagctttgatggatgaataggtgttcaccggatctgggcagaggggtcatccgctccccaggtgggcactgataaaggaaggtacaggcctcacctggaactgccaaggcagcctccagaaatgctcggctgtctcggggcacgctccagtatgccagtcctgcgggattacgtccagctacttccagaaacactcagtgtcccctcccctcaggctctgccttggcctggccttgtccagtctaccctggacaagatgccgtgtgtttgaggcccagcagagtaagcccttggccgtgatgtgtctgaaacacctgttaggggttccctccatatgtcagagcctctctgggatgaagttcaagccagaaaacccagtcgaggctcaagtttgaatttcagcttcactgtgtggctctgggaaaatggctttcccactctgtgcctcagtttccttgtgtttacaagactaatcccattgactgtttattaagcacctactgtgtgccaagcgcttttacgtggcttctccctcagccagccttgagaaggctggaggtggtgtcatcacctccattttacagacaaagcagctgagaccccagcgaggggcggagacctgtcccacgatcacccagcaggagtcgtggcagaacggagcatcagccagaccctgttgtgggcgttgtcatcaagggagcttgaatggagggtctggtgtcagatacagccgactccagccccagctcatcccccatgatgctgtgtgacccactgggcactctggtgagggagctttccagacatcaacagcccactctgcttccctttctgagtcccctgtccagcactgcctagtgttggagggtagaccaaggctgtgcatgattcaccccctccttccatcctggagctggcagtgaataaaagcccgtatttacaaaga

SEQ ID NO: 419487 - DNA, 5553 bp, Homo sapiens
cagccccggcccctccctgggctggtgtggaggcccaagttgtggctcctccttcaccccagccctgaccctgcctgagcctagcctctgattcttgtccctcaaccctggctcagatcccccaacatcctcccctggggttggtctcaggtcccatatcacaagccagctgtcttcctttcagcccgggccgtgcaacggggaccttcgacaatgagattgtcatgatgaatcacgtgtaccgggagaggttccccaaggccacagcacagatggagggccgtctgcaggagttcctgacggcctacgcgcccggcgcccggctggcgctggctgatggcgtcttgggcttcatccaccaccagatcgtcgagctggcccgagactgcttggccaagtctggcgagaacctcgtcacctcccgctacttcctagagatgcaggagaagctggagcggcttctgcaggatgcccatgagcgttcggacagtgaggaggtcagcttcatcgtccagcttgtccggaaactgctgatcatcatctcacggccagctcggctgctggagtgtctggagtttgaccctgaggaattttaccacctgctggaggcggctgagggccatgcgcgggagggccaaggcattaagactgaccttccacagtacatcattgggcagctgggcctggccaaggaccccctggaggagatggtgccactgagtcacctcgaagaagaacagcccccagcacctgagtccccagagagccgcgccctggtcggccagtcacggaggaagccatgcgaaagcgactttgagaccatcaaactcattagcaacggagcctatggggccgtctacctggtgcggcaccgtgacacacggcagcgctttgccatcaagaagatcaacaaacagaacttgatcctgcgtaaccagatccagcaggtctttgtggagcgtgacattctcacctttgccgagaacccctttgtggtcagcatgttctgctcctttgagacccggcgccacctatgtatggtcatggaatacgtggaaggcggcgactgcgccacgctcctgaagaacatgggcccgctgcccgtggacatggcccgcctgtacttcgccgagacggtgttggcgctggagtacctgcataactatggcatcgtgcaccgtgacctcaaaccagacaatctgctcatcacctcgcttggccacatcaagctcacggacttcggcctgtccaagatcggcctcatgagcatggccaccaacctctatgagggccacatcgagaaggacgcccgagagttcatcgacaagcaggtgtgtgggacgccggagtacatagcccccgaggtgatcttccgccagggctatgggaagccagtggactggtgggccatgggcgtcgtcctctatgagtttctggtgggctgcgtgcctttctttggagatacccccgaggaactcttcggtcaggtggtcagcgatgagatcatgtggccagagggagatgaggcccttccagcagacgcccaggacctcatcaccaggttgctccggcagagcccgctggaccgtctgggcactggtggcacccacgaagtgaagcagcacccctttttcctggccctggactgggcagggcttctccgacacaaagccgagttcgtgccccagctcgaagccgaggatgataccagctactttgacacacgttcggaacgttaccgccatctgggctccgaggacgacgagaccaatgatgaagaatcgtccacagagatcccccagttctcctcctgctcccaccggttcagcaaggtctacagcagctctgagttcctggccgtccagcccactcctaccttcgctgaaaggagcttcagtgaagaccgggaggaggggtgggagcgcagcgaagtggactatggccgccggctgagtgctgacatccggctgaggtcctggacatcctctggatcctcctgtcagtcatcttcgtcccagcccgagcggggtcccagcccatctctcctgaataccatcagcctggacacaatgcccaagtttgccttctcatcagaggatgagggggtaggcccaggccctgcaggccccaagaggcccgtcttcattctaggggagcctgaccccccaccagcggccaccccagtgatgcccaagccctcgagcctttctgccgacacagctgctctcagccacgcccgcctacggagcaatagcatcggcgcccgacactccacaccaaggcctctggatgccagccggggccgccgccttgggggcccaagagacccagcccctgagaagtccagagcctcctccagcggtggcagtggtggcggcagtgggggccgcgtgcccaagtcagcctctgtctctgccctgtccctcatcatcacggcagatgatggcagcggcggccccctcatgagccccctttccccgcgctctctgtcctcgaacccgtcgtcccgtgactcttcgccgagccgagacccgtcccccgtgtgtggcagcctgcggccccccatcgttatccacagctctggcaagaagtacggcttcagcctgcgggcgatccgcgtctacatgggtgatagcgacgtctacactgtgcaccacgtcgtctggagtgtggaggacggaagccccgcccaggaggcgggcctgcgggctggggacctcatcacccacatcaacggggagtcagtgctggggctggtgcacatggacgtcgtggagctgctgctgaagagcggcaacaagatatccctgcggaccacagccctggagaacacctccatcaaggtgggccccgcccggaagaatgtggccaagggccgcatggcacgcaggagcaagaggagccgtcggcgggagacccaggatcggcggaagtcacttttcaagaagatctccaagcagacctccgtgctgcacaccagccgcagcttctcctccggactccaccactcactgtcatccagtgagagcctccccggctcgcccacccacagcctctcccccagccccaccactccctgccgaagcccagcccctgatgtcccagcagataccactgcatccccacccagcgcatccccgagctccagcagccccgcctccccagctgctgctggccacacccgccccagctccctgcacggcctggctgccaagcttgggccaccccgccccaagactggccgccgcaagtccaccagcagcatcccgccctccccgctggcctgcccgcccatctccgcgcccccaccccgctcgccctcgcccctgcccgggcacccgcccgcacctgcccgatccccgcggctgcgccggggccagtcagctgacaagctgggcacaggggagcggctggatggggaggcggggcggcgcactcgtgggccagaggccgagctcgtggtcatgcggcggctgcacctgtccgagcgccgagactccttcaagaagcaggaggccgtgcaggaggttagcttcgatgagccgcaggaggaggccactgggctgcccacctcagtgccacagatcgccgtggagggcgaggaagccgtgccagtagctctcgggcccaccggaagagactgatcccctgccaggtctctccctggcatcaaagttacgcgttttcttgtgcaatgttttttccgtaaagtcatgcctggatggggactgagccaccagcctgacacccagaaggcgagaagccatctcggtccttgctggaaggtggagacatcgcttgtgttctggtgtcaatcaggggctggatggggcaagaatgggggacaagggtggctttgtaaatagcagcaaatccctgcaactaatttattactttttttttcttttttttttttttttttgagacagagtctcactctgttgcccgggctggagtgcagcggcgtgatctcagctcactgcaacctccgcctcccaagttcaagcgattgtcctgcctcagcttcccaagtggctgggattacaggcgcccaccactatgcccagctaattttttgtatttttagtacagacggggtttcaccatgttggtcaggctggtctcgaactcctgacctcatgatttgcctgcctttgcctcccaaagtgctgggattacaggcgtgagccactgggcccagcctaatttattactttttataagcgatagccgtactgagccgccccctgaaggcggctgccaggtcttgccccaggcacctgggactctgtttgcaggccctgccctctgggctgagaaggatgcactttggacaagtcatctgtgtttgtgttttccagtttttctgtactttttaagtgttttgtgttacctggtctcattcccctccccacacctacccatttgaggggatggagttgaagtcacctggtcacctgtaccggcccagttcggctacaacctggagtgtccgtaaacaattcctctcacccacaaaacaatgtaatcccagcgatggactggattctgaaggccacttcccaccatcatagctgccatgcccaggcagtgcctgctctatatatagagtctgcctccaatcctgctggcttcagcctggagaagggatatgggagctggagctttgatggatgaataggtgttcaccggatctgggcagaggggtcatccgctccccaggtgggcactgataaaggaaggtacaggcctcacctggaactgccaaggcagcctccagaaatgctcggctgtctcggggcacgctccagtatgccagtcctgcgggattacgtccagctacttccagaaacactcagtgtcccctcccctcaggctctgccttggcctggccttgtccagtctaccctggacaagatgccgtgtgtttgaggcccagcagagtaagcccttggccgtgatgtgtctgaaacacctgttaggggttccctccatatgtcagagcctctctgggatgaagttcaagccagaaaacccagtcgaggctcaagtttgaatttcagcttcactgtgtggctctgggcattgactgtttattaagcacctactgtgtgccaagcgcttttacgtggcttctccctcagccagccttgagaaggctggaggtggtgtcatcacctccattttacagacaaagcagctgagaccccagcgaggggcggagacctgtcccacgatcacccagcaggagtcgtggcagaacggagcatcagccagaccctgttgtgggcgttgtcatcaagggagcttgaatggagggtctggtgtcagatacagccgactccagccccagctcatcccccatgatgctgtgtgacccactgggcactctggtgagggagctttccagacatcaacagcccactctgcttccctttctgagtcccctgtccagcactgcctagtgttggagggtagaccaaggctgtgcatgattcaccccctccttccatcctggagctggcagtgaataaaagcccgtatttacaaaga

SEQ ID NO: 419488 - DNA, 1572 bp, Homo sapiens
  misc_feature (18)..(19): n is a, c, g, or t
ggcacgaggtggcacgannctggaagaattcgcggcttttttgtatttttagtacagacggggtttcaccatgttggtcaggctggtctcgaactcctgacctcatgatttgcctgcctttgcctcccaaagtgctgggattacaggcgtgagccactgggcccagcctaatttattactttttataagcgatagccgtactgagccgccccctgaaggcggctgccaggtcttgccccaggcacctgggactctgtttgcaggccctgccctctgggctgagaaggatgcactttggacaagtcatctgtgtttgtgttttccagtttttctgtactttttaagtgttttgtgttacctggtctcattcccctccccacacctacccatttgaggggatggagttgaagtcacctggtcacctgtaccggcccagttcggctacaacctggagtgtccgtaaacaattcctctcacccacaaaacaatgtaatcccagcgatggactggattctgaaggccacttcccaccatcatagctgccatgcccaggcagtgcctgctctatatatagagtctgcctccaatcctgctggcttcagcctggagaagggatatgggagctggagctttgatggatgaataggtgttcaccggatctgggcagaggggtcatccgctccccaggtgggcactgataaaggaaggtacaggcctcacctggaactgccaaggcagcctccagaaatgctcggctgtctcggggcacgctccagtatgccagtcctgcgggattacgtccagctacttccagaaacactcagtgtcccctcccctcaggctctgccttggcctggccttgtccagtctaccctggacaagatgccgtgtgtttgaggcccagcagagtaagcccttggccgtgatgtgtctgaaacacctgttaggggttccctccatatgtcagagcctctctgggatgaagttcaagccagaaaacccagtcgaggctcaagtttgaatttcagcttcactgtgtggctctgggaaaatggctttcccactctgtgcctcagtttccttgtgtttacaagactaatcccattgactgtttattaagcacctactgtgtgccaagcgcttttacgtggcttctccctcagccagccttgagaaggctggaggtggtgtcatcacctccattttacagacaaagcagctgagaccccagcgaggggcggagacctgtcccacgatcacccagcaggagtcgtggcagaacggagcatcagccagaccctgttgtgggcgttgtcatcaagggagcttgaatggagggtctggtgtcagatacagccgactccagccccagctcatcccccatgatgctgtgtgacccactgggcactctggtgagggagctttccagacatcaacagcccactctgcttccctttctgagtcccctgtccagcactgcctagtgttggagggtagaccaaggctgtgcatgattcaccccctccttccatcctggagctggcagtgaataaaagcccgtatttacaaaga

SEQ ID NO: 419489 - DNA, 5665 bp, Homo sapiens
cagccccggcccctccctgggctggtgtggaggcccaagttgtggctcctccttcaccccagccctgaccctgcctgagcctagcctctgattcttgtccctcaaccctggctcagatcccccaacatcctcccctggggttggtctcaggtcccatatcacaagccagctgtcttcctttcagcccgggccgtgcaacggggaccttcgacaatgagattgtcatgatgaatcacgtgtaccgggagaggttccccaaggccacagcacagatggagggccgtctgcaggagttcctgacggcctacgcgcccggcgcccggctggcgctggctgatggcgtcttgggcttcatccaccaccagatcgtcgagctggcccgagactgcttggccaagtctggcgagaacctcgtcacctcccgctacttcctagagatgcaggagaagctggagcggcttctgcaggatgcccatgagcgttcggacagtgaggaggtcagcttcatcgtccagcttgtccggaaactgctgatcatcatctcacggccagctcggctgctggagtgtctggagtttgaccctgaggaattttaccacctgctggaggcggctgagggccatgcgcgggagggccaaggcattaagactgaccttccacagtacatcattgggcagctgggcctggccaaggaccccctggaggagatggtgccactgagtcacctcgaagaagaacagcccccagcacctgagtccccagagagccgcgccctggtcggccagtcacggaggaagccatgcgaaagcgactttgagaccatcaaactcattagcaacggagcctatggggccgtctacctggtgcggcaccgtgacacacggcagcgctttgccatcaagaagatcaacaaacagaacttgatcctgcgtaaccagatccagcaggtctttgtggagcgtgacattctcacctttgccgagaacccctttgtggtcagcatgttctgctcctttgagacccggcgccacctatgtatggtcatggaatacgtggaaggcggcgactgcgccacgctcctgaagaacatgggcccgctgcccgtggacatggcccgcctgtacttcgccgagacggtgttggcgctggagtacctgcataactatggcatcgtgcaccgtgacctcaaaccagacaatctgctcatcacctcgcttggccacatcaagctcacggacttcggcctgtccaagatcggcctcatgagcatggccaccaacctctatgagggccacatcgagaaggacgcccgagagttcatcgacaagcaggtgtgtgggacgccggagtacatagcccccgaggtgatcttccgccagggctatgggaagccagtggactggtgggccatgggcgtcgtcctctatgagtttctggtgggctgcgtgcctttctttggagatacccccgaggaactcttcggtcaggtggtcagcgatgagatcatgtggccagagggagatgaggcccttccagcagacgcccaggacctcatcaccaggttgctccggcagagcccgctggaccgtctgggcactggtggcacccacgaagtgaagcagcacccctttttcctggccctggactgggcagggcttctccgacacaaagccgagttcgtgccccagctcgaagccgaggatgataccagctactttgacacacgttcggaacgttaccgccatctgggctccgaggacgacgagaccaatgatgaagaatcgtccacagagatcccccagttctcctcctgctcccaccggttcagcaaggtctacagcagctctgagttcctggccgtccagcccactcctaccttcgctgaaaggagcttcagtgaagaccgggaggaggggtgggagcgcagcgaagtggactatggccgccggctgagtgctgacatccggctgaggtcctggacatcctctggatcctcctgtcagtcatcttcgtcccagcccgagcggggtcccagcccatctctcctgaataccatcagcctggacacaatgcccaagtttgccttctcatcagaggatgagggggtaggcccaggccctgcaggccccaagaggcccgtcttcattctaggggagcctgaccccccaccagcggccaccccagtgatgcccaagccctcgagcctttctgccgacacagctgctctcagccacgcccgcctacggagcaatagcatcggcgcccgacactccacaccaaggcctctggatgccagccggggccgccgccttgggggcccaagagacccagcccctgagaagtccagagcctcctccagcggtggcagtggtggcggcagtgggggccgcgtgcccaagtcagcctctgtctctgccctgtccctcatcatcacggcagatgatggcagcggcggccccctcatgagccccctttccccgcgctctctgtcctcgaacccgtcgtcccgtgactcttcgccgagccgagacccgtcccccgtgtgtggcagcctgcggccccccatcgttatccacagctctggcaagaagtacggcttcagcctgcgggcgatccgcgtctacatgggtgatagcgacgtctacactgtgcaccacgtcgtctggagtgtggaggacggaagccccgcccaggaggcgggcctgcgggctggggacctcatcacccacatcaacggggagtcagtgctggggctggtgcacatggacgtcgtggagctgctgctgaagagcggcaacaagatatccctgcggaccacagccctggagaacacctccatcaaggtgggccccgcccggaagaatgtggccaagggccgcatggcacgcaggagcaagaggagccgtcggcgggagacccaggatcggcggaagtcacttttcaagaagatctccaagcagacctccgtgctgcacaccagccgcagcttctcctccggactccaccactcactgtcatccagtgagagcctccccggctcgcccacccacagcctctcccccagccccaccactccctgccgaagcccagcccctgatgtcccagcagataccactgcatccccacccagcgcatccccgagctccagcagccccgcctccccagctgctgctggccacacccgccccagctccctgcacggcctggctgccaagcttgggccaccccgccccaagactggccgccgcaagtccaccagcagcatcccgccctccccgctggcctgcccgcccatctccgcgcccccaccccgctcgccctcgcccctgcccgggcacccgcccgcacctgcccgatccccgcggctgcgccggggccagtcagctgacaagctgggcacaggggagcggctggatggggaggcggggcggcgcactcgtgggccagaggccgagctcgtggtcatgcggcggctgcacctgtccgagcgccgagactccttcaagaagcaggaggccgtgcaggaggttagcttcgatgagccgcaggaggaggccactgggctgcccacctcagtgccacagatcgccgtggagggcgaggaagccgtgccagtagctctcgggcccaccggaagagactgatcccctgccaggtctctccctggcatcaaagttacgcgttttcttgtgcaatgttttttccgtaaagtcatgcctggatggggactgagccaccagcctgacacccagaaggcgagaagccatctcggtccttgctggaaggtggagacatcgcttgtgttctggtgtcaatcaggggctggatggggcaagaatgggggacaagggtggctttgtaaatagcagcaaatccctgcaactaatttattactttttttttcttttttttttttttttttgagacagagtctcactctgttgcccgggctggagtgcagcggcgtgatctcagctcactgcaacctccgcctcccaagttcaagcgattgtcctgcctcagcttcccaagtggctgggattacaggcgcccaccactatgcccagctaattttttgtatttttagtacagacggggtttcaccatgttggtcaggctggtctcgaactcctgacctcatgatttgcctgcctttgcctcccaaagtgctgggattacaggcgtgagccactgggcccagcctaatttattactttttataagcgatagccgtactgagccgccccctgaaggcggctgccaggtcttgccccaggcacctgggactctgtttgcaggccctgccctctgggctgagaaggatgcactttggacaagtcatctgtgtttgtgttttccagtttttctgtactttttaagtgttttgtgttacctggtctcattcccctccccacacctacccatttgaggggatggagttgaagtcacctggtcacctgtaccggcccagttcggctacaacctggagtgtccgtaaacaattcctctcacccacaaaacaatgtaatcccagcgatggactggattctgaaggccacttcccaccatcatagctgccatgcccaggcagtgcctgctctatatatagagtctgcctccaatcctgctggcttcagcctggagaagggatatgggagctggagctttgatggatgaataggtgttcaccggatctgggcagaggggtcatccgctccccaggtgggcactgataaaggaaggtacaggcctcacctggaactgccaaggcagcctccagaaatgctcggctgtctcggggcacgctccagtatgccagtcctgcgggattacgtccagctacttccagaaacactcagtgtcccctcccctcaggctctgccttggcctggccttgtccagtctaccctggacaagatgccgtgtgtttgaggcccagcagagtaagcccttggccgtgatgtgtctgaaacacctgttaggggttccctccatatgtcagagcctctctgggatgaagttcaagccagaaaacccagtcgaggctcaagtttgaatttcagcttcactgtgtggctctgggaaaatggctttcccactctgtgcctcagtttccttgtgtttacaagactaatcccattgactgtttattaagcacctactgtgtgccaagcgcttttacgtggcttctccctcagccagccttgagaaggctggaggtggtgtcatcacctccattttacagacaaagcagctgagaccccagcgaggggcggagacctgtcccacgatcacccagcaggagtcgtggcagaacggagcatcagccagaccctgttgtgggcgttgtcatcaagggagcttgaatggagggtctggtgtcagatacagccgactccagccccagctcatcccccatgatgctgtgtgacccactgggcactctggtgagggagctttccagacatcaacagcccactctgcttccctttctgagtcccctgtccagcactgcctagtgttggagggtagaccaaggctgtgcatgattcaccccctccttccatcctggagctggcagtgaataaaagcccgtatttacaaagaatgaaaaacaacaaacacaaagaaatgaaaaacaactagaacaaaaacagggcggcgg

SEQ ID NO: 419490 - DNA, 5414 bp, Homo sapiens
cagccccggcccctccctgggctggtgtggaggcccaagttgtggctcctccttcaccccagccctgaccctgcctgagcctagcctctgattcttgtccctcaaccctggctcagatcccccaacatcctcccctggggttggtctcaggtcccatatcacaagccagctgtcttcctttcagcccgggccgtgcaacggggaccttcgacaatgagattgtcatgatgaatcacgtgtaccgggagaggttccccaaggccacagcacagatggagggccgtctgcaggagttcctgacggcctacgcgcccggcgcccggctggcgctggctgatggcgtcttgggcttcatccaccaccagatcgtcgagctggcccgagactgcttggccaagtctggcgagaacctcgtcacctcccgctacttcctagagatgcaggagaagctggagcggcttctgcaggatgcccatgagcgttcggacagtgaggaggtcagcttcatcgtccagcttgtccggaaactgctgatcatcatctcacggccagctcggctgctggagtgtctggagtttgaccctgaggaattttaccacctgctggaggcggctgagggccatgcgcgggagggccaaggcattaagactgaccttccacagtacatcattgggcagctgggcctggccaaggaccccctggaggagatggtgccactgagtcacctcgaagaagaacagcccccagcacctgagtccccagagagccgcgccctggtcggccagtcacggaggaagccatgcgaaagcgactttgagaccatcaaactcattagcaacggagcctatggggccgtctacctggtgcggcaccgtgacacacggcagcgctttgccatcaagaagatcaacaaacagaacttgatcctgcgtaaccagatccagcaggtctttgtggagcgtgacattctcacctttgccgagaacccctttgtggtcagcatgttctgctcctttgagacccggcgccacctatgtatggtcatggaatacgtggaaggcggcgactgcgccacgctcctgaagaacatgggcccgctgcccgtggacatggcccgcctgtacttcgccgagacggtgttggcgctggagtacctgcataactatggcatcgtgcaccgtgacctcaaaccagacaatctgctcatcacctcgcttggccacatcaagctcacggacttcggcctgtccaagatcggcctcatgagcatggccaccaacctctatgagggccacatcgagaaggacgcccgagagttcatcgacaagcaggtgtgtgggacgccggagtacatagcccccgaggtgatcttccgccagggctatgggaagccagtggactggtgggccatgggcgtcgtcctctatgagtttctggtgggctgcgtgcctttctttggagatacccccgaggaactcttcggtcaggtggtcagcgatgagatcatgtggccagagggagatgaggcccttccagcagacgcccaggacctcatcaccaggttgctccggcagagcccgctggaccgtctgggcactggtggcacccacgaagtgaagcagcacccctttttcctggccctggactgggcagggcttctccgacacaaagccgagttcgtgccccagctcgaagccgaggatgataccagctactttgacacacgttcggaacgttaccgccatctgggctccgaggacgacgagaccaatgatgaagaatcgtccacagagatcccccagttctcctcctgctcccaccggttcagcaaggtctacagcagctctgagttcctggccgtccagcccactcctaccttcgctgaaaggagcttcagtgaagaccgggaggaggggtgggagcgcagcgaagtggactatggccgccggctgagtgctgacatccggctgaggtcctggacatcctctggatcctcctgtcagtcatcttcgtcccagcccgagcggggtcccagcccatctctcctgaataccatcagcctggacacaatgcccaagtttgccttctcatcagaggatgagggggtaggcccaggccctgcaggccccaagaggcccgtcttcattctaggggagcctgaccccccaccagcggccaccccagtgatgcccaagccctcgagcctttctgccgacacagctgctctcagccacgcccgcctacggagcaatagcatcggcgcccgacactccacaccaaggcctctggatgccagccggggccgccgccttgggggcccaagagacccagcccctgagaagtccagagcctcctccagcggtggcagtggtggcggcagtgggggccgcgtgcccaagtcagcctctgtctctgccctgtccctcatcatcacggcagatgatggcagcggcggccccctcatgagccccctttccccgcgctctctgtcctcgaacccgtcgtcccgtgactcttcgccgagccgagacccgtcccccgtgtgtggcagcctgcggccccccatcgttatccacagctctggcaagaagtacggcttcagcctgcgggcgatccgcgtctacatgggtgatagcgacgtctacactgtgcaccacgtcgtctggagtgtggaggacggaagccccgcccaggaggcgggcctgcgggctggggacctcatcacccacatcaacggggagtcagtgctggggctggtgcacatggacgtcgtggagctgctgctgaagagcggcaacaagatatccctgcggaccacagccctggagaacacctccatcaaggtgggccccgcccggaagaatgtggccaagggccgcatggcacgcaggagcaagaggagccgtcggcgggagacccaggatcggcggaagtcacttttcaagaagatctccaagcagacctccgtgctgcacaccagccgcagcttctcctccggactccaccactcactgtcatccagtgagagcctccccggctcgcccacccacagcctctcccccagccccaccactccctgccgaagcccagcccctgatgtcccagcagataccactgcatccccacccagcgcatccccgagctccagcagccccgcctccccagctgctgctggccacacccgccccagctccctgcacggcctggctgccaagcttgggccaccccgccccaagactggccgccgcaagtccaccagcagcatcccgccctccccgctggcctgcccgcccatctccgcgcccccaccccgctcgccctcgcccctgcccgggcacccgcccgcacctgcccgatccccgcggctgcgccggggccagtcagctgacaagctgggcacaggggagcggctggatggggaggcggggcggcgcactcgtgggccagaggccgagctcgtggtcatgcggcggctgcacctgtccgagcgccgagactccttcaagaagcaggaggccgtgcaggaggttagcttcgatgagccgcaggaggaggccactgggctgcccacctcagtgccacagatcgccgtggagggcgaggaagccgtgccagtagctctcgggcccaccggaagagactgatcccctgccaggtctctccctggcatcaaagttacgcgttttcttgtgcaatgttttttccgtaaagtcatgcctggatggggactgagccaccagcctgacacccagaaggcgagaagccatctcggtccttgctggaaggtggagacatcgcttgtgttctggtgtcaatcaggggctggatggggcaagaatgggggacaagggtggctttgtaaatagcagcaaatccctgcaactaatttattactttttttttcttttttttttttttttttgagacagagtctcactctgttgcccgggctggagtgcagcggcgtgatctcagctcactgcaacctccgcctcccaagttcaagcgattgtcctgcctcagcttcccaagtggctgggattacaggcgcccaccactatgcccagctaattttttgtatttttagtacagacggggtttcaccatgttggtcaggctggtctcgaactcctgacctcatgatttgcctgcctttgcctcccaaagtgctgggattacaggcgtgagccactgggcccagcctaatttattactttttataagcgatagccgtactgagccgccccctgaaggcggctgccaggtcttgccccaggcacctgggactctgtttgcaggccctgccctctgggctgagaaggatgcactttggacaagtcatctgtgtttgtgttttccagtttttctgtactttttaagtgttttgtgttacctggtctcattcccctccccacacctacccatttgaggggatggagttgaagtcacctggtcacctgtaccggcccagttcggctacaacctggagtgtccgtaaacaattcctctcacccacaaaacaatgtaatcccagcgatggactggattctgaaggccacttcccaccatcatagctgccatgcccaggcagtgcctgctctatatatagagtctgcctccaatcctgctggcttcagcctggagaagggatatgggagctggagctttgatggatgaataggtgttcaccggatctgggcagaggggtcatccgctccccaggtgggcactgataaaggaaggtacaggcctcacctggaactgccaaggcagcctccagaaatgctcggctgtctcggggcacgctccagtatgccagtcctgcgggattacgtccagctacttccagaaacactcagtgtcccctcccctcaggctctgccttggcctggccttgtccagtctaccctggacaagatgccgtgtgtttgaggcccagcagagtaagcccttggccgtgatgtgtctgaaacacctgttaggggttccctccatatgtcagagcctctctgggatgaagttcaagccagaaaacccagtcgaggctcaagtttgaatttcagcttcactgtgtggctctgggaaaatggctttcccactctgtgcctcagtttccttgtgtttacaagactaatcccattgactgtttattaagcacctactgtgtgccaagcgcttttacgtggcttctccctcagccagccttgagaaggctggaggtggtgtcatcacctccattttacagacaaagcagctgagaccccagcgaggggcggagacctgtcccacgatcacccagcaggagtcgtggcagaacggagcatcagccagaccctgttgtgggcgttgtcatcaaggagtacaaggagtgttgacgttgggtcctctaagatcgactataagcagacgtgctc

SEQ ID NO: 419491 - DNA, 991 bp, Homo sapiens
tactctagaggatctcggactacgggggaagggatatgggagctggagctttgatggatgaataggtgttcaccggatctgggcagaggggtcatccgctccccaggtgggcactgataaaggaaggtacaggcctcacctggaactgccaaggcagcctccagaaatgctcggctgtctcggggcacgctccagtatgccagtcctgcgggattacgtccagctacttccagaaacactcagtgtcccctcccctcaggctctgccttggcctggccttgtccagtctaccctggacaagatgccgtgtgtttgaggcccagcagagtaagcccttggccgtgatgtgtctgaaacacctgttaggggttccctccatatgtcagagcctctctgggatgaagttcaagccagaaaacccagtcgaggctcaagtttgaatttcagcttcactgtgtggctctgggaaaatggctttcccactctgtgcctcagtttccttgtgtttacaagactaatcccattgactgtttattaagcacctactgtgtgccaagcgcttttacgtggcttctccctcagccagccttgagaaggctggaggtggtgtcatcacctccattttacagacaaagcagctgagaccccagcgaggggcggagacctgtcccacgatcacccagcaggagtcgtggcagaacggagcatcagccagaccctgttgtgggcgttgtcatcaagggagcttgaatggagggtctggtgtcagatacagccgactccagccccagctcatcccccatgatgctgtgtgacccactgggcactctggtgagggagctttccagacatcaacagcccactctgcttccctttctgagtcccctgtccagcactgcctagtgttggagggtagaccaaggctgtgcatgattcaccccctccttccatcctggagctggcagtgaataaaagcccgtatttacaaaga

SEQ ID NO: 419492 - DNA, 2728 bp, Homo sapiens
cagccccggcccctccctgggctggtgtggaggcccaagttgtggctcctccttcaccccagccctgaccctgcctgagcctagcctctgattcttgtccctcaaccctggctcagatcccccaacatcctcccctggggttggtctcaggtcccatatcacaagccagctgtcttcctttcagcccgggccgtgcaacggggaccttcgacaatgagattgtcatgatgaatcacgtgtaccgggagaggttccccaaggccacagcacagatggagggccgtctgcaggagttcctgacggcctacgcgcccggcgcccggctggcgctggctgatggcgtcttgggcttcatccaccaccagatcgtcgagctggcccgagactgcttggccaagtctggcgagaacctcgtcacctcccgctacttcctagagatgcaggagaagctggagcggcttctgcaggatgcccatgagcgttcggacagtgaggaggtcagcttcatcgtccagcttgtccggaaactgctgatcatcatctcacggccagctcggctgctggagtgtctggagtttgaccctgaggaattttaccacctgctggaggcggctgagggccatgcgcgggagggccaaggcattaagactgaccttccacagtacatcattgggcagctgggcctggccaaggaccccctggaggagatggtgccactgagtcacctcgaagaagaacagcccccagcacctgagtccccagagagccgcgccctggtcggccagtcacggaggaagccatgcgaaagcgactttgagaccatcaaactcattagcaacggagcctatggggccgtctacctggtgcggcaccgtgacacacggcagcgctttgccatcaagaagatcaacaaacagaacttgatcctgcgtaaccagatccagcaggtctttgtggagcgtgacattctcacctttgccgagaacccctttgtggtcagcatgttctgctcctttgagacccggcgccacctatgtatggtcatggaatacgtggaaggcggcgactgcgccacgctcctgaagaacatgggcccgctgcccgtggacatggcccgcctgtacttcgccgagacggtgttggcgctggagtacctgcataactatggcatcgtgcaccgtgacctcaaaccagacaatctgctcatcacctcgcttggccacatcaagctcacggacttcggcctgtccaagatcggcctcatgagcatggccaccaacctctatgagggccacatcgagaaggacgcccgagagttcatcgacaagcaggtgtgtgggacgccggagtacatagcccccgaggtgatcttccgccagggctatgggaagccagtggactggtgggccatgggcgtcgtcctctatgagtttctggtgggctgcgtgcctttctttggagatacccccgaggaactcttcggtcaggtggtcagcgatgagatcatgtggccagagggagatgaggcccttccagcagacgcccaggacctcatcaccaggttgctccggcagagcccgctggaccgtctgggcactggtggcacccacgaagtgaagcagcacccctttttcctggccctggactgggcagggcttctccgacacaaagccgagttcgtgccccagctcgaagccgaggatgataccagctactttgacacacgttcggaacgttaccgccatctgggctccgaggacgacgagaccaatgatgaagaatcgtccacagagatcccccagttctcctcctgctcccaccggttcagcaaggtctacagcagctctgagttcctggccgtccagcccactcctaccttcgctgaaaggagcttcagtgaagaccgggaggaggggtgggagcgcagcgaagtggactatggccgccggctgagtgctgacatccggctgaggtcctggacatcctctggatcctcctgtcagtcatcttcgtcccagcccgagcggggtcccagcccatctctcctgaataccatcagcctggacacaatgcccaagtttgccttctcatcagaggatgagggggtaggcccaggccctgcaggccccaagaggcccgtcttcattctaggggagcctgaccccccaccagcggccaccccagtgatgcccaagccctcgagcctttctgccgacacagctgctctcagccacgcccgcctacggagcaatagcatcggcgcccgacactccacaccaaggcctctggatgccagccggggccgccgccttgggggcccaagagacccagcccctgagaagtccagagcctcctccattttacagacaaagcagctgagaccccagcgaggggcggagacctgtcccacgatcacccagcaggagtcgtggcagaacggagcatcagccagaccctgttgtgggcgttgtcatcaagggagcttgaatggagggtctggtgtcagatacagccgactccagccccagctcatcccccatgatgctgtgtgacccactgggcactctggtgagggagctttccagacatcaacagcccactctgcttccctttctgagtcccctgtccagcactgcctagtgttggagggtagaccaaggctgtgcatgattcaccccctccttccatcctggagctggcagtgaataaaagcccgtatttacaaaga

SEQ ID NO: 419493 - DNA, 3681 bp, Homo sapiens
cagccccggcccctccctgggctggtgtggaggcccaagttgtggctcctccttcaccccagccctgaccctgcctgagcctagcctctgattcttgtccctcaaccctggctcagatcccccaacatcctcccctggggttggtctcaggtcccatatcacaagccagctgtcttcctttcagcccgggccgtgcaacggggaccttcgacaatgagattgtcatgatgaatcacgtgtaccgggagaggttccccaaggccacagcacagatggagggccgtctgcaggagttcctgacggcctacgcgcccggcgcccggctggcgctggctgatggcgtcttgggcttcatccaccaccagatcgtcgagctggcccgagactgcttggccaagtctggcgagaacctcgtcacctcccgctacttcctagagatgcaggagaagctggagcggcttctgcaggatgcccatgagcgttcggacagtgaggaggtcagcttcatcgtccagcttgtccggaaactgctgatcatcatctcacggccagctcggctgctggagtgtctggagtttgaccctgaggaattttaccacctgctggaggcggctgagggccatgcgcgggagggccaaggcattaagactgaccttccacagtacatcattgggcagctgggcctggccaaggaccccctggaggagatggtgccactgagtcacctcgaagaagaacagcccccagcacctgagtccccagagagccgcgccctggtcggccagtcacggaggaagccatgcgaaagcgactttgagaccatcaaactcattagcaacggagcctatggggccgtctacctggtgcggcaccgtgacacacggcagcgctttgccatcaagaagatcaacaaacagaacttgatcctgcgtaaccagatccagcaggtctttgtggagcgtgacattctcacctttgccgagaacccctttgtggtcagcatgttctgctcctttgagacccggcgccacctatgtatggtcatggaatacgtggaaggcggcgactgcgccacgctcctgaagaacatgggcccgctgcccgtggacatggcccgcctgtacttcgccgagacggtgttggcgctggagtacctgcataactatggcatcgtgcaccgtgacctcaaaccagacaatctgctcatcacctcgcttggccacatcaagctcacggacttcggcctgtccaagatcggcctcatgagcatggccaccaacctctatgagggccacatcgagaaggacgcccgagagttcatcgacaagcaggtgtgtgggacgccggagtacatagcccccgaggtgatcttccgccagggctatgggaagccagtggactggtgggccatgggcgtcgtcctctatgagtttctggtgggctgcgtgcctttctttggagatacccccgaggaactcttcggtcaggtggtcagcgatgagatcatgtggccagagggagatgaggcccttccagcagacgcccaggacctcatcaccaggttgctccggcagagcccgctggaccgtctgggcactggtggcacccacgaagtgaagcagcacccctttttcctggccctggactgggcagggcttctccgacacaaagccgagttcgtgccccagctcgaagccgaggatgataccagctactttgacacacgttcggaacgttaccgccatctgggctccgaggacgacgagaccaatgatgaagaatcgtccacagagatcccccagttctcctcctgctcccaccggttcagcaaggtctacagcagctctgagttcctggccgtccagcccactcctaccttcgctgaaaggagcttcagtgaagaccgggaggaggggtgggagcgcagcgaagtggactatggccgccggctgagtgctgacatccggctgaggtcctggacatcctctggatcctcctgtcagtcatcttcgtcccagcccgagcggggtcccagcccatctctcctgaataccatcagcctggacacaatgcccaagtttgccttctcatcagaggatgagggggtaggcccaggccctgcaggccccaagaggcccgtcttcattctaggggagcctgaccccccaccagcggccaccccagtgatgcccaagccctcgagcctttctgccgacacagctgctctcagccacgcccgcctacggagcaatagcatcggcgcccgacactccacaccaaggcctctggatgccagccggggccgccgccttgggggcccaagagacccagcccctgagaagtccagagcctcctccagcggtggcagtggtggcggcagtgggggccgcgtgcccaagtcagcctctgtctctgccctgtccctcatcatcacggcagatgatggcagcggcggccccctcatgagccccctttccccgcgctctctgtcctcgaacccgtcgtcccgtgactcttcgccgagccgagacccgtcccccgtgtgtggcagcctgcggccccccatcgttatccacagctctggcaagaagtacggcttcagcctgcgggcgatccgcgtctacatgggtgatagcgacgtctacactgtgcaccacgtcgtctggagtgtggaggacggaagccccgcccaggaggcgggcctgcgggctggggacctcatcacccacatcaacggggagtcagtgctggggctggtgcacatggacgtcgtggagctgctgctgaagagcggcaacaagatatccctgcggaccacagccctggagaacacctccatcaaggtgggccccgcccggaagaatgtggccaagggccgcatggcacgcaggagcaagaggagccgtcggcgggagacccaggatcggtgcgcggcagtgaccaccagggagcggcggaagtcacttttcaagaagatctccaagcagacctccgtgctgcacaccagccgcagcttctcctccggactccaccactcactgtcatccagtgagagcctccccggctcgcccacccacagcctctcccccagccccaccactccctgccgaagcccagcccctgatgtcccagcagataccacatgcagtaccgccacccaagcgcatcccccgaagcatccaagtcaggcaacggccatcaccagagacatgcttgctggcgcacagaccgaccaagctctccgtgccacagcacatggccctgcaagcatagcgcggcacaaccaccaaccacgcagagggccagccaagacgtctcacaaacagcacatcgcgcgactatctaccatcaaaacccgagctctcaatatccaaccccacagcgaactacaccgctacccggctccgtgccgcgctccacaaatcgagcggaccagaccagccacatcgcactccccgatcctcactcacagcgagctctgacgcgcaacgcaccaccaacgcagccagacagcgcatgagtcacagtcgcgccatcccgcacaagcccacacatatcgatacttcaagctgctcccagcgcacgcaccaacaaccgacccaaaccagtagacgtcacccctccacgactccgcccgaaaaccaatcacacaatcgcgacaccacagcctgctcgcacgca

SEQ ID NO: 419494 - DNA, 690 bp, Homo sapiens
catagcaagaccttatgtctacaaaaaaaaccttagctgggtgtggtggtgtgcacctgtagttccagctacttgggaggctgagcaggaggatcgctagggcccaggagttggaggcagagctctgcccatctcaggcggagccaaggtctagggcagaaggggaggccaggcaccccagccccccagctctgagcacactcctaacctgcccacagtctgctcatcacctcgcttggccacatcaagctcacggacttcggcctgtccaagatcggcctcatgagcatggccaccaacctctatgagggccacatcgagaaggacgcccgagagttcatcgacaagcaggtgggcgggcaggtgggtgggcagccccgggatgcctcctcctctctcctgggacctctcttgggctgggggctggcctcagtttccccgttctccctggcccaggtgtgtgggacgccggagtacatagcccccgaggtgatcttccgccagggctatgggaagccagtggactggtgggccatgggcgtcgtcctctatgagtttctggtgggctgcgtgcctttctttggagatacccccgaggaactcttcggtcaggtggtcagcggtgcgtttcctccacgggcctgggtttgagctgcagccccaccagagctctgggcagcggtcctccac

SEQ ID NO: 419495 - DNA, 448 bp, Homo sapiens
agggggcctgtgtctcatcccgtcttcacaggctcaaggctcagagcctaagtttgatcatgactgagcacttcagagccagggcagcccactggcccttctagaaggttcctaagtcattgcttcatccagcctcccggatgtggcttcatgacagtgtcatgagagctggtcaggggaggcactgcatccccagcctggggtgagaactctagaggcctcaggaaattgctgggtgatgcagggtgaggcagggaggctccagctgagcctcctccctcatcttgcagagatggtgccactgagtcacctcgaagaagaacagcccccagcacctgagtccccagaggtgagtagcagaggctgggggacccccgctcatcttgttctttccagagtggaccaggcacccgcagaaagggctgggtttgccgaggtcttgcatgta

SEQ ID NO: 419496 - DNA, 414 bp, Homo sapiens
  misc_feature (137)..(137): n is a, c, g, or t
  misc_feature (150)..(150): n is a, c, g, or t
gatcttgctctgttctctttgaccttcctgctcttccctttgcaggtgctctttttgaaggtgtctcaaagttaccaccgctgctgtaacgaggctgcctgaagtcatccacaggcgaagttaatggaagctcctgnaccacttcagganccctaataaaaacaggcatcattgttcagtacactacagccctttgccagtgcactgtaatcacagagcacagccataataaacaccagcagacatctgcacgcaggtgcactcacgcgaggacttcagatgttcaacactgagcagatgcctcgttttctgcattcaatttgacagcagttcagagtcctctaatacacacaagtagtaggttccaatttaaaggggagtagccatttttataccttctaagtacaatggatc

SEQ ID NO: 419497 - DNA, 1158 bp, Homo sapiens
aggccgcgctctaggggctggactcagggcggtttgaaagatcggcgcgcaccgcaggagcaacggttggtcctgcggctgtgatgtcggtgttgaggcccctggacaagctgcccggcctgaacacggccaccatcttgctggtgggcacggaggatgctcttctgcagcagctggcggactcgatgctcaaagaggactgcgcctccgagctgaaggtccacttggcaaagtccctccctttgccctccagtgtgaatcggccccgaattgacctgatcgtgtttgtggttaatcttcacagcaaatacagtctccagaacacagaggagtccctgcgccatgtggatgccagcttcttcttggggaaggtgtgtttcctcgccacaggtgctgggcgggagagccactgcagcattcaccggcacaccgtggtgaagctggcccacacctatcaaagccccctgctctactgtgacctggaggtggaaggctttagggccaccatggcgcagcgcctggtgcgcgtgctgcagatctgtgctggccacgtgcccggtgtctcagctctgaacctgctgtccctgctgagaagctctgagggcccctccctggaggacctgtgagggtggctggcccctgggctgccccttctcatggcttcgtgctgactccataaacattctctgttgaggatgtccagtcagggcttgacaggcccaggctcagcccgccgtggctgggaaggttccctgcagtgccagtgctgcagcagggagagctgggcagaagcagcgagggggcccagctggcgagactgtagccccctcccactcccacactcactcttgcagagcctgtgtctttaagcagctggcgtgttacatctccatttaaggtttcctttgaacaaaaggtctgtggctaaaaaaagtttaaaaatcactggtctcattcaccactttgactttgtagatgaggaaactgactcagaacaattaagagtagggcagggtgggccaggtgcagaggctcacgcctgtaatcccagcactttgggaggccgaggtgggtggatcacttgaagtcaggaattcgagaccatcctggccaacatggtgtatccctgtctctacaaaaatacaaaaattagccaga

SEQ ID NO: 419498 - DNA, 904 bp, Homo sapiens
gtcaggctctggatgtctccggaggttgtttgaaggattgggcaagctgaggcagttggaagctactctgaggtgtggcatgaatgagggcgtggctgtggtgggcagtggtgacctgagctacccccaagtatccgcccccagccctgctctggcagcccctgcagctgctctgggtaagggagcagggccagcattctatctcactgctgttctctgctctccccgcaggtggaaggctttagggccaccatggcgcagcgcctggtgcgcgtgctgcagatctgtgctggccacgtgcccggtgtctcagctctgaacctgctgtccctgctgagaagctctgagggcccctccctggaggacctgtgagggtggctggcccctgggctgccccttctcatggcttcgtgctgactccataaacattctctgttgaggatgtccagtcagggcttgacaggcccaggctcagcccgccgtggctgggaaggttccctgcagtgccagtgctgcagcagggagagctgggcagaagcagcgagggggcccagctggcgagactgtagccccctcccactcccacactcactcttgcagagcctgtgtctttaagcagctggcgtgttacatctccatttaaggtttcctttgaacaaaaggtctgtggctaaaaaaagtttaaaaatcactggtctcattcaccactttgactttgtagatgaggaaactgactcagaacaattaagagtagggcagggtgggccaggtgcagaggctcacgcctgtaatcccagcactttgggaggccgaggtgggtggatcacttgaagtcaggaattcgagaccatcctggccaacatggtgtatccctgtctctacaaaaatacaaaaattagccaga

SEQ ID NO: 419499 - DNA, 827 bp, Homo sapiens
  misc_feature (751)..(751): n is a, c, g, or t
  misc_feature (758)..(758): n is a, c, g, or t
aggccgcgctctaggggctggactcagggcggtttgaaagatcggcgcgcaccgcaggagcaacggttggtcctgcggctgtgatgtcggtgttgaggcccctggacaagctgcccggcctgaacacggccaccatcttgctggtgggcacggaggatgctcttctgcagcagctggcggactcgatgctcaaagaggactgcgcctccgagctgaaggtccacttggcaaagtccctccctttgccctccagtgtgaatcggccccgaattgacctgatcgtgtttgtggttaatcttcacagcaaatacagtctccagaacacagaggagtccctgcgccatgtggatgccagcttcttcttggggaaggtgtgtttcctcgccacaggtgctgggcgggagagccactgcagcattcaccggcacaccgtggtgaagctggcccacacctatcaaagccccctgctctactgtgacctggaggtggaaggctttagggccaccatggcgcagcgcctggtgcgcgtgctgcagatctgtgctggccacgtgcccggtgtctcagctctgaacctgctgtccctgctgagaagctctgagggcccctccctggaggacctgtgagggtggctggcccctgggctgccccttctcatggcttcgtgctgactccataaacattctctgttgaggatgtccagtcagggcttgacaggcccaggctcagccgcgggtggaggtcctgcgtncgtgtgncggaagctggaacgcgggggcctggggaagtgccctctccatccctgtggcggttccagcgggtaccca

SEQ ID NO: 419500 - DNA, 993 bp, Homo sapiens
aggccgcgctctaggggctggactcagggcggtttgaaagatcggcgcgcaccgcaggagcaacggttggtcctgcggctgtgatgtcggtgttgaggcccctggacaagctgcccggcctgaacacggccaccatcttgctggtgggcacggaggatgctcttctgcagcagctggcggactcgatgctcaaagaggactgcgcctccgagctgaaggtccacttggcaaagtccctccctttgccctccagtgtgaatcggccccgaattgacctgatcgtgtttgtggttaatcttcacagcaaatacagtctccagaacacagaggagtccctgcgccatgtggatgccagcttcttcttggggaaggtgtgtttcctcgccacaggtgctgggcgggagagccactgcagcattcaccggcacaccgtggtgaagctggcccacacctatcaaagccccctgctctactgtgacctggaggtggaaggctttagggccaccatggcgcagcgcctggtgcgcgtgctgcagatctgtgctggccacgtgcccggtgtctcagctctgaacctgctgtccctgctgagaagctctgagggcccctccctggaggacctgtgagggtggctggcccctgggctgccccttctcatggcttcgtgctgactccataaacattctctgttgaggatgtccagtcagggcttgacaggcccaggctcagcccgccgtggctgggaaggttccctgcagtgccagtgctgcagcagggagagctgggcagaagcagcgagggggcccagctggcgagactgtagccccctcccactcccacactcactcttgcagagcctgtgtctttaagcagctggcgtgttacatctccatttaaggtttcctttgaacaaaaggtctgtggctaaaaaagttaacatcacaccaaacaaaacaccagagctcattattagggcggaaaaaggtatacacg

SEQ ID NO: 419501 - DNA, 1248 bp, Homo sapiens
ggtgggagcgagggtcgggtagtagagagtgcggtgcccacaggcctgcagcgggtccaaacctcaggcccccagcccgtgccgcttcgcggggtccacttctcgggaaatgtcctccgagccgcctgctggcggtgtcccgatccccccgggagtgggtcgaagggccaggccctccccagggggtgctgtgcctagggctcgactgtccgctctctctccctgcgcagctggtgggcacggaggatgctcttctgcagcagctggcggactcgatgctcaaagaggactgcgcctccgagctgaaggtccacttggcaaagtccctccctttgccctccagtgtgaatcggccccgaattgacctgatcgtgtttgtggttaatcttcacagcaaatacagtctccagaacacagaggagtccctgcgccatgtggatgccagcttcttcttggggaaggtgtgtttcctcgccacaggtgctgggcgggagagccactgcagcattcaccggcacaccgtggtgaagctggcccacacctatcaaagccccctgctctactgtgacctggaggtggaaggctttagggccaccatggcgcagcgcctggtgcgcgtgctgcagatctgtgctggccacgtgcccggtgtctcagctctgaacctgctgtccctgctgagaagctctgagggcccctccctggaggacctgtgagggtggctggcccctgggctgccccttctcatggcttcgtgctgactccataaacattctctgttgaggatgtccagtcagggcttgacaggcccaggctcagcccgccgtggctgggaaggttccctgcagtgccagtgctgcagcagggagagctgggcagaagcagcgagggggcccagctggcgagactgtagccccctcccactcccacactcactcttgcagagcctgtgtctttaagcagctggcgtgttacatctccatttaaggtttcctttgaacaaaaggtctgtggctaaaaaaagtttaaaaatcactggtctcattcaccactttgactttgtagatgaggaaactgactcagaacaattaagagtagggcagggtgggccaggtgcagaggctcacgcctgtaatcccagcactttgggaggccgaggtgggtggatcacttgaagtcaggaattcgagaccatcctggccaacatggtgtatccctgtctctacaaaaatacaaaaattagccaga

SEQ ID NO: 419502 - DNA, 1066 bp, Homo sapiens
aggccgcgctctaggggctggactcagggcggtttgaaagatcggcgcgcaccgcaggagcaacggttggtcctgcggctgtgatgtcggtgttgaggcccctggacaagctgcccggcctgaacacggccaccatcttgctggtgggcacggaggatgctcttctgcagcagctggcggactcgatgctcaaagaggactgcgcctccgagctgaaggtccacttggcaaagtccctccctttgccctccagtgtgaatcggccccgaattgacctgatcgtgtttgtggttaatcttcacagcaaatacagtctccagaacacagaggagtccctgcgccatgtggatgccagcttcttcttggggaaggtgtgtttcctcgccacaggtggtggaaggctttagggccaccatggcgcagcgcctggtgcgcgtgctgcagatctgtgctggccacgtgcccggtgtctcagctctgaacctgctgtccctgctgagaagctctgagggcccctccctggaggacctgtgagggtggctggcccctgggctgccccttctcatggcttcgtgctgactccataaacattctctgttgaggatgtccagtcagggcttgacaggcccaggctcagcccgccgtggctgggaaggttccctgcagtgccagtgctgcagcagggagagctgggcagaagcagcgagggggcccagctggcgagactgtagccccctcccactcccacactcactcttgcagagcctgtgtctttaagcagctggcgtgttacatctccatttaaggtttcctttgaacaaaaggtctgtggctaaaaaaagtttaaaaatcactggtctcattcaccactttgactttgtagatgaggaaactgactcagaacaattaagagtagggcagggtgggccaggtgcagaggctcacgcctgtaatcccagcactttgggaggccgaggtgggtggatcacttgaagtcaggaattcgagaccatcctggccaacatggtgtatccctgtctctacaaaaatacaaaaattagccaga

SEQ ID NO: 419503 - DNA, 1155 bp, Homo sapiens
ggtgggagcgagggtcgggtagtagagagtgcggtgcccacaggcctgcagcgggtccaaacctcaggcccccagcccgtgccgcttcgcggggtccacttctcgggaaatgtcctccgagccgcctgctggcggtgtcccgatccccccgggagtgggtcgaagggccaggccctccccagggggtgctgtgcctagggctcgactgtccgctctctctccctgcgcagctggtgggcacggaggatgctcttctgcagcagctggcggactcgatgctcaaagaggactgcgcctccgagctgaaggttctccagaacacagaggagtccctgcgccatgtggatgccagcttcttcttggggaaggtgtgtttcctcgccacaggtgctgggcgggagagccactgcagcattcaccggcacaccgtggtgaagctggcccacacctatcaaagccccctgctctactgtgacctggaggtggaaggctttagggccaccatggcgcagcgcctggtgcgcgtgctgcagatctgtgctggccacgtgcccggtgtctcagctctgaacctgctgtccctgctgagaagctctgagggcccctccctggaggacctgtgagggtggctggcccctgggctgccccttctcatggcttcgtgctgactccataaacattctctgttgaggatgtccagtcagggcttgacaggcccaggctcagcccgccgtggctgggaaggttccctgcagtgccagtgctgcagcagggagagctgggcagaagcagcgagggggcccagctggcgagactgtagccccctcccactcccacactcactcttgcagagcctgtgtctttaagcagctggcgtgttacatctccatttaaggtttcctttgaacaaaaggtctgtggctaaaaaaagtttaaaaatcactggtctcattcaccactttgactttgtagatgaggaaactgactcagaacaattaagagtagggcagggtgggccaggtgcagaggctcacgcctgtaatcccagcactttgggaggccgaggtgggtggatcacttgaagtcaggaattcgagaccatcctggccaacatggtgtatccctgtctctacaaaaatacaaaaattagccaga

SEQ ID NO: 419504 - DNA, 1156 bp, Homo sapiens
ggtgggagcgagggtcgggtagtagagagtgcggtgcccacaggcctgcagcgggtccaaacctcaggcccccagcccgtgccgcttcgcggggtccacttctcgggaaatgtcctccgagccgcctgctggcggtgtcccgatccccccgggagtgggtcgaagggccaggccctccccagggggtgctgtgcctagggctcgactgtccgctctctctccctgcgcagctggtgggcacggaggatgctcttctgcagcagctggcggactcgatgctcaaagaggactgcgcctccgagctgaaggtccacttggcaaagtccctccctttgccctccagtgtgaatcggccccgaattgacctgatcgtgtttgtggttaatcttcacagcaaatacagtctccagaacacagaggagtccctgcgccatgtggatgccagcttcttcttggggaaggtgtgtttcctcgccacaggtggtggaaggctttagggccaccatggcgcagcgcctggtgcgcgtgctgcagatctgtgctggccacgtgcccggtgtctcagctctgaacctgctgtccctgctgagaagctctgagggcccctccctggaggacctgtgagggtggctggcccctgggctgccccttctcatggcttcgtgctgactccataaacattctctgttgaggatgtccagtcagggcttgacaggcccaggctcagcccgccgtggctgggaaggttccctgcagtgccagtgctgcagcagggagagctgggcagaagcagcgagggggcccagctggcgagactgtagccccctcccactcccacactcactcttgcagagcctgtgtctttaagcagctggcgtgttacatctccatttaaggtttcctttgaacaaaaggtctgtggctaaaaaaagtttaaaaatcactggtctcattcaccactttgactttgtagatgaggaaactgactcagaacaattaagagtagggcagggtgggccaggtgcagaggctcacgcctgtaatcccagcactttgggaggccgaggtgggtggatcacttgaagtcaggaattcgagaccatcctggccaacatggtgtatccctgtctctacaaaaatacaaaaattagccaga

SEQ ID NO: 419505 - DNA, 901 bp, Homo sapiens
aggccgcgctctaggggctggactcagggcggtttgaaagatcggcgcgcaccgcaggagcaacggttggtcctgcggctgtgatgtcggtgttgaggcccctggacaagctgcccggcctgaacacggccaccatcttgctggtgggcacggaggatgctcttctgcagcagctggcggactcgatgctcaaagaggactgcgcctccgagctgaaggtccacttggcaaagtccctccctttgccctccagtgtgaatcggccccgaattgacctgatcgtgtttgtggttaatcttcacagcaaatacagtctccagaacacagaggagtccctgcgccatgtggatgccagcttcttcttggggaaggtgtgtttcctcgccacaggtggtggaaggctttagggccaccatggcgcagcgcctggtgcgcgtgctgcagatctgtgctggccacgtgcccggtgtctcagctctgaacctgctgtccctgctgagaagctctgagggcccctccctggaggacctgtgagggtggctggcccctgggctgccccttctcatggcttcgtgctgactccataaacattctctgttgaggatgtccagtcagggcttgacaggcccaggctcagcccgccgtggctgggaaggttccctgcagtgccagtgctgcagcagggagagctgggcagaagcagcgagggggcccagctggcgagactgtagccccctcccactcccacactcactcttgcagagcctgtgtctttaagcagctggcgtgttacatctccatttaaggtttcctttgaacaaaaggtctgtggctaaaaaagttaacatcacaccaaacaaaacaccagagctcattattagggcggaaaaaggtatacacg

SEQ ID NO: 419506 - DNA, 699 bp, Homo sapiens
aggccgcgctctaggggctggactcagggcggtttgaaagatcggcgcgcaccgcaggagcaacggttggtcctgcggctgtgatgtcggtgttgaggcccctggacaagctgcccggcctgaacacggccaccatcttgctggtgggcacggaggatgctcttctgcagcagctggcggactcgatgctcaaagaggactgcgcctccgagctgaaggtccacttggcaaagtccctccctttgccctccagtgtgaatcggccccgaattgacctgatcgtgtttgtggttaatcttcacagcaaatacagtctccagaacacagaggagtccctgcgccatgtggatgccagcttcttcttggggaaggtgtgtttcctcgccacaggtggtaagtacgttcctcgcctgttactgcccacccccagccaagggaaagctggggcggccgtaggcttcttgctgaggcaccctgggtgatggaaagagcatgtattttacacacactggggcctatcggagggtggagggcaggaagaaggagaagatctggaaaaataactaatgggtactaggcttaatacctgggtgacaatgatctgtacaacaaaccccatgacacaagttttaactacataacaaatctgcacatgtacccctgaacttaaaataaaagttaaatttaaaaaccgaaaga

SEQ ID NO: 419507 - DNA, 479 bp, Homo sapiens
caggacagggaagtgtttatgcatgaggatgtgacaaaggcttagtctccagcaaggcgtggtcataacagtcaagaaatgtcattactcgctctgggactgcactgtcatccaccatagcctccttggtcggaaagtctgtagccccctcccactcccacactcactcttgcagagcctgtgtctttaagcagctggcgtgttacatctccatttaaggtttcctttgaacaaaaggtctgtggctaaaaaaagtttaaaaatcactggtctcattcaccactttgactttgtagatgaggaaactgactcagaacaattaagagtagggcagggtgggccaggtgcagaggctcacgcctgtaatcccagcactttgggaggccgaggtgggtggatcacttgaagtcaggaattcgagaccatcctggccaacatggtgtatccctgtctctacaaaaatacaaaaattagccaga

SEQ ID NO: 419508 - DNA, 1845 bp, Homo sapiens
agatatagggaaggaagggaagtaagcagtcacagacgctggcggccaccagaagtttgagcctctttggtagcaggaggctggaagaaaggacagaagtagctctggctgtgatggggatcttactgggcctgctactcctggggcacctaacagtggacacttatggccgtcccatcctggaagtgccagagagtgtaacaggaccttggaaaggggatgtgaatcttccctgcacctatgaccccctgcaaggctacacccaagtcttggtgaagtggctggtacaacgtggctcagaccctgtcaccatctttctacgtgactcttctggagaccatatccagcaggcaaagtaccagggccgcctgcatgtgagccacaaggttccaggagatgtatccctccaattgagcaccctggagatggatgaccggagccactacacgtgtgaagtcacctggcagactcctgatggcaaccaagtcgtgagagataagattactgagctccgtgtccagaaactctctgtctccaagcccacagtgacaactggcagcggttatggcttcacggtgccccagggaatgaggattagccttcaatgccaggctcggggttctcctcccatcagttatatttggtataagcaacagactaataaccaggaacccatcaaagtagcaaccctaagtaccttactcttcaagcctgcggtgatagccgactcaggctcctatttctgcactgccaagggccaggttggctctgagcagcacagcgacattgtgaagtttgtggtcaaagactcctcaaagctactcaagaccaagactgaggcacctacaaccatgacataccccttgaaagcaacatctacagtgaagcagtcctgggactggaccactgacatggatggctaccttggagagaccagtgctgggccaggaaagagcctgcctgtctttgccatcatcctcatcatctccttgtgctgtatggtggtttttaccatggcctatatcatgctctgtcggaagacatcccaacaagagcatgtctacgaagcagccagggcacatgccagagaggccaacgactctggagaaaccatgagggtggccatcttcgcaagtggctgctccagtgatgagccaacttcccagaatctgggcaacaactactctgatgagccctgcataggacaggagtaccagatcatcgcccagatcaatggcaactacgcccgcctgctggacacagttcctctggattatgagtttctggccactgagggcaaaagtgtctgttaaaaatgccccattaggccaggatctgctgacataattgcctagtcagtccttgccttctgcatggccttcttccctgctacctctcttcctggatagcccaaagtgtccgcctaccaacactggagccgctgggagtcactggctttgccctggaatttgccagatgcatctcaagtaagccagctgctggatttggctctgggcccttctagtatctctgccgggggcttctggtactcctctctaaataccagagggaagatgcccatagcactaggacttggtcatcatgcctacagacactattcaactttggcatcttgccaccagaagacccgagggaggctcagctctgccagctcagaggaccagctatatccaggatcatttctctttcttcagggccagacagcttttaattgaaattgttatttcacaggccagggttcagttctgctcctccactataagtctaatgttctgactctctcctggtgctcaataaatatctaatcataacagcaaaaaaaaa

SEQ ID NO: 419509 - DNA, 1870 bp, Homo sapiens
caacgggaaactattagttactatagaaacgtgcgtaaagcagctgtacggtccgaattttgggatgcggccaccagaagtttgagcctctttggtagcaggaggctggaagaaaggacagaagtagctctggctgtgatggggatcttactgggcctgctactcctggggcacctaacagtggacacttatggccgtcccatcctggaagtgccagagagtgtaacaggaccttggaaaggggatgtgaatcttccctgcacctatgaccccctgcaaggctacacccaagtcttggtgaagtggctggtacaacgtggctcagaccctgtcaccatctttctacgtgactcttctggagaccatatccagcaggcaaagtaccagggccgcctgcatgtgagccacaaggttccaggagatgtatccctccaattgagcaccctggagatggatgaccggagccactacacgtgtgaagtcacctggcagactcctgatggcaaccaagtcgtgagagataagattactgagctccgtgtccagaaactctctgtctccaagcccacagtgacaactggcagcggttatggcttcacggtgccccagggaatgaggattagccttcaatgccaggctcggggttctcctcccatcagttatatttggtataagcaacagactaataaccaggaacccatcaaagtagcaaccctaagtaccttactcttcaagcctgcggtgatagccgactcaggctcctatttctgcactgccaagggccaggttggctctgagcagcacagcgacattgtgaagtttgtggtcaaagactcctcaaagctactcaagaccaagactgaggcacctacaaccatgacataccccttgaaagcaacatctacagtgaagcagtcctgggactggaccactgacatggatggctaccttggagagaccagtgctgggccaggaaagagcctgcctgtctttgccatcatcctcatcatctccttgtgctgtatggtggtttttaccatggcctatatcatgctctgtcggaagacatcccaacaagagcatgtctacgaagcagccagggcacatgccagagaggccaacgactctggagaaaccatgagggtggccatcttcgcaagtggctgctccagtgatgagccaacttcccagaatctgggcaacaactactctgatgagccctgcataggacaggagtaccagatcatcgcccagatcaatggcaactacgcccgcctgctggacacagttcctctggattatgagtttctggccactgagggcaaaagtgtctgttaaaaatgccccattaggccaggatctgctgacataattgcctagtcagtccttgccttctgcatggccttcttccctgctacctctcttcctggatagcccaaagtgtccgcctaccaacactggagccgctgggagtcactggctttgccctggaatttgccagatgcatctcaagtaagccagctgctggatttggctctgggcccttctagtatctctgccgggggcttctggtactcctctctaaataccagagggaagatgcccatagcactaggacttggtcatcatgcctacagacactattcaactttggcatcttgccaccagaagacccgagggaggctcagctctgccagctcagaggaccagctatatccaggatcatttctctttcttcagggccagacagcttttaattgaaattgttatttcacaggccagggttcagttctgctcctccactataagtctaatgttctgactctctcctggtgctcaataaatatctaatcataacagcaaaaaaaaa

SEQ ID NO: 419510 - DNA, 1845 bp, Homo sapiens; identical to SEQ ID NO: 419508

SEQ ID NO: 419511 - DNA, 1754 bp, Homo sapiens
agatatagggaaggaagggaagtaagcagtcacagacgctggcggccaccagaagtttgagcctctttggtagcaggaggctggaagaaaggacagaagtagctctggctgtgatggggatcttactgggcctgctactcctggggcacctaacagtggacacttatggccgtcccatcctggaagtgccagagagtgtaacaggaccttggaaaggggatgtgaatcttccctgcacctatgaccccctgcaaggctacacccaagtcttggtgaagtggctggtacaacgtggctcagaccctgtcaccatctttctacgtgactcttctggagaccatatccagcaggcaaagtaccagggccgcctgcatgtgagccacaaggttccaggagatgtatccctccaattgagcaccctggagatggatgaccggagccactacacgtgtgaagtcacctggcagactcctgatggcaaccaagtcgtgagagataagattactgagctccgtgtccagaaactctctgtctccaagcccacagtgacaactggcagcggttatggcttcacggtgccccagggaatgaggattagccttcaatgccaggctcggggttctcctcccatcagttatatttggtataagcaacagactaataaccaggaacccatcaaagtagcaaccctaagtaccttactcttcaagcctgcggtgatagccgactcaggctcctatttctgcactgccaagggccaggttggctctgagcagcacagcgacattgtgaagtttgtggtcaaagactcctcaaagctactcaagaccaagactgaggcacctacaaccatgacataccccttgaaagcaacatctacagtgaagcagtcctgggactggaccactgacatggatggctaccttggagagaccagtgctgggccaggaaagagcctgcctgtctttgccatcatcctcatcatctccttgtgctgtatggtggtttttaccatggcctatatcatgctctgtcggaagacatcccaacaagagcatgtctacgaagcagccagaatctgggcaacaactactctgatgagccctgcataggacaggagtaccagatcatcgcccagatcaatggcaactacgcccgcctgctggacacagttcctctggattatgagtttctggccactgagggcaaaagtgtctgttaaaaatgccccattaggccaggatctgctgacataattgcctagtcagtccttgccttctgcatggccttcttccctgctacctctcttcctggatagcccaaagtgtccgcctaccaacactggagccgctgggagtcactggctttgccctggaatttgccagatgcatctcaagtaagccagctgctggatttggctctgggcccttctagtatctctgccgggggcttctggtactcctctctaaataccagagggaagatgcccatagcactaggacttggtcatcatgcctacagacactattcaactttggcatcttgccaccagaagacccgagggaggctcagctctgccagctcagaggaccagctatatccaggatcatttctctttcttcagggccagacagcttttaattgaaattgttatttcacaggccagggttcagttctgctcctccactataagtctaatgttctgactctctcctggtgctcaataaatatctaatcataacagcaaaaaaaaa

SEQ ID NO: 419512 - DNA, 1657 bp, Homo sapiens
agatatagggaaggaagggaagtaagcagtcacagacgctggcggccaccagaagtttgagcctctttggtagcaggaggctggaagaaaggacagaagtagctctggctgtgatggggatcttactgggcctgctactcctggggcacctaacagtggacacttatggccgtcccatcctggaagtgccagagagtgtaacaggaccttggaaaggggatgtgaatcttccctgcacctatgaccccctgcaaggctacacccaagtcttggtgaagtggctggtacaacgtggctcagaccctgtcaccatctttctacgtgactcttctggagaccatatccagcaggcaaagtaccagggccgcctgcatgtgagccacaaggttccaggagatgtatccctccaattgagcaccctggagatggatgaccggagccactacacgtgtgaagtcacctggcagactcctgatggcaaccaagtcgtgagagataagattactgagctccgtgtccagaaactctctgtctccaagcccacagtgacaactggcagcggttatggcttcacggtgccccagggaatgaggattagccttcaatgccaggctcggggttctcctcccatcagttatatttggtataagcaacagactaataaccaggaacccatcaaagtagcaaccctaagtaccttactcttcaagcctgcggtgatagccgactcaggctcctatttctgcactgccaagggccaggttggctctgagcagcacagcgacattgtgaagtttgtggtcaaagactcctcaaagctactcaagaccaagactgaggcacctacaaccatgacataccccttgaaagcaacatctacagtgaagcagtcctgggactggaccactgacatggatggctaccttggagagaccagtgctgggccaggaaagagcctgcctgtctttgccatcatcctcatcatctccttgtgctgtatggtggtttttaccatggcctatatcatgctctgtcggaagacatcccaacaagagcatgtctacgaagcagccagggcacatgccagagaggccaacgactctggagaaaccatgagggtggccatcttcgcaagtggctgctccagtgatgagccaacttcccagaatctgggcaacaactactctgatgagccctgcataggacaggagtaccagatcatcgcccagatcaatggcaactacgcccgcctgctggacacagttggctttgccctggaatttgccagatgcatctcaagtaagccagctgctggatttggctctgggcccttctagtatctctgccgggggcttctggtactcctctctaaataccagagggaagatgcccatagcactaggacttggtcatcatgcctacagacactattcaactttggcatcttgccaccagaagacccgagggaggctcagctctgccagctcagaggaccagctatatccaggatcatttctctttcttcagggccagacagcttttaattgaaattgttatttcacaggccagggttcagttctgctcctccactataagtctaatgttctgactctctcctggtgctcaataaatatctaatcataacagcaaaaaaaaa

SEQ ID NO: 419513 - DNA, 1511 bp, Homo sapiens
agatatagggaaggaagggaagtaagcagtcacagacgctggcggccaccagaagtttgagcctctttggtagcaggaggctggaagaaaggacagaagtagctctggctgtgatggggatcttactgggcctgctactcctggggcacctaacagtggacacttatggccgtcccatcctggaagtgccagagagtgtaacaggaccttggaaaggggatgtgaatcttccctgcacctatgaccccctgcaaggctacacccaagtcttggtgaagtggctggtacaacgtggctcagaccctgtcaccatctttctacgtgactcttctggagaccatatccagcaggcaaagtaccagggccgcctgcatgtgagccacaaggttccaggagatgtatccctccaattgagcaccctggagatggatgaccggagccactacacgtgtgaagtcacctggcagactcctgatggcaaccaagtcgtgagagataagattactgagctccgtgtccagaaactctctgtctccaagcccacagtgacaactggcagcggttatggcttcacggtgccccagggaatgaggattagccttcaatgccaggctcggggttctcctcccatcagttatatttggtataagcaacagactaataaccaggaacccatcaaagtagcaaccctaagtaccttactcttcaagcctgcggtgatagccgactcaggctcctatttctgcactgccaagggccaggttggctctgagcagcacagcgacattgtgaagtttgtggtcaaagactcctcaaagctactcaagaccaagactgaggcacctacaaccatgacataccccttgaaagcaacatctacagtgaagcagtcctgggactggaccactgacatggatggctaccttggagagaccagtgctgggccaggaaagagcctgcctgtctttgccatcatcctcatcatctccttgtgctgtatggtggtttttaccatggcctatatcatgctctgtcggaagacatcccaacaagagcatgtctacgaagcagccagcccaaagtgtccgcctaccaacactggagccgctgggagtcactggctttgccctggaatttgccagatgcatctcaagtaagccagctgctggatttggctctgggcccttctagtatctctgccgggggcttctggtactcctctctaaataccagagggaagatgcccatagcactaggacttggtcatcatgcctacagacactattcaactttggcatcttgccaccagaagacccgagggaggctcagctctgccagctcagaggaccagctatatccaggatcatttctctttcttcagggccagacagcttttaattgaaattgttatttcacaggccagggttcagttctgctcctccactataagtctaatgttctgactctctcctggtgctcaataaatatctaatcataacagcaaaaaaaaa

SEQ ID NO: 419514 - DNA, 1588 bp, Homo sapiens
caacgggaaactattagttactatagaaacgtgcgtaaagcagctgtacggtccgaattttgggatgcggccaccagaagtttgagcctctttggtagcaggaggctggaagaaaggacagaagtagctctggctgtgatggggatcttactgggcctgctactcctggggcacctaacagtggacacttatggccgtcccatcctggaagtgccagagagtgtaacaggaccttggaaaggggatgtgaatcttccctgcacctatgaccccctgcaaggctacacccaagtcttggtgaagtggctggtacaacgtggctcagaccctgtcaccatctttctacgtgactcttctggagaccatatccagcaggcaaagtaccagggccgcctgcatgtgagccacaaggttccaggagatgtatccctccaattgagcaccctggagatggatgaccggagccactacacgtgtgaagtcacctggcagactcctgatggcaaccaagtcgtgagagataagattactgagctccgtgtccagaaacactcctcaaagctactcaagaccaagactgaggcacctacaaccatgacataccccttgaaagcaacatctacagtgaagcagtcctgggactggaccactgacatggatggctaccttggagagaccagtgctgggccaggaaagagcctgcctgtctttgccatcatcctcatcatctccttgtgctgtatggtggtttttaccatggcctatatcatgctctgtcggaagacatcccaacaagagcatgtctacgaagcagccagggcacatgccagagaggccaacgactctggagaaaccatgagggtggccatcttcgcaagtggctgctccagtgatgagccaacttcccagaatctgggcaacaactactctgatgagccctgcataggacaggagtaccagatcatcgcccagatcaatggcaactacgcccgcctgctggacacagttcctctggattatgagtttctggccactgagggcaaaagtgtctgttaaaaatgccccattaggccaggatctgctgacataattgcctagtcagtccttgccttctgcatggccttcttccctgctacctctcttcctggatagcccaaagtgtccgcctaccaacactggagccgctgggagtcactggctttgccctggaatttgccagatgcatctcaagtaagccagctgctggatttggctctgggcccttctagtatctctgccgggggcttctggtactcctctctaaataccagagggaagatgcccatagcactaggacttggtcatcatgcctacagacactattcaactttggcatcttgccaccagaagacccgagggaggctcagctctgccagctcagaggaccagctatatccaggatcatttctctttcttcagggccagacagcttttaattgaaattgttatttcacaggccagggttcagttctgctcctccactataagtctaatgttctgactctctcctggtgctcaataaatatctaatcataacagcaaaaaaaaa

SEQ ID NO: 419515 - DNA, 1600 bp, Homo sapiens
agatatagggaaggaagggaagtaagcagtcacagacgctggcggccaccagaagtttgagcctctttggtagcaggaggctggaagaaaggacagaagtagctctggctgtgatggggatcttactgggcctgctactcctggggcacctaacagtggacacttatggccgtcccatcctggaagtgccagagagtgtaacaggaccttggaaaggggatgtgaatcttccctgcacctatgaccccctgcaaggctacacccaagtcttggtgaagtggctggtacaacgtggctcagaccctgtcaccatctttctacgtgactcttctggagaccatatccagcaggcaaagtaccagggccgcctgcatgtgagccacaaggttccaggagatgtatccctccaattgagcaccctggagatggatgaccggagccactacacgtgtgaagtcacctggcagactcctgatggcaaccaagtcgtgagagataagattactgagctccgtgtccagaaactctctgtctccaagcccacagtgacaactggcagcggttatggcttcacggtgccccagggaatgaggattagccttcaatgccaggctcggggttctcctcccatcagttatatttggtataagcaacagactaataaccaggaacccatcaaagtagcaaccctaagtaccttactcttcaagcctgcggtgatagccgactcaggctcctatttctgcactgccaagggccaggttggctctgagcagcacagcgacattgtgaagtttgtggtcaaagactcctcaaagctactcaagaccaagactgaggcacctacaaccatgacataccccttgaaagcaacatctacagtgaagcagtcctgggactggaccactgacatggatggctaccttggagagaccagtgctgggccaggaaagagcctgcctgtctttgccatcatcctcatcatctccttgtgctgtatggtggtttttaccatggcctatatcatgctctgtcggaagacatcccaacaagagcatgtctacgaagcagccagggcacatgccagagaggccaacgactctggagaaaccatgagggtggccatcttcgcaagtggctgctccagtgatgagccaacttcccagaatctgggcaacaactactctgatgagccctgcataggacaggagtaccagatcatcgcccagatcaatggcaactacgcccgcctgctggacacagtctctgggcccttctagtatctctgccgggggcttctggtactcctctctaaataccagagggaagatgcccatagcactaggacttggtcatcatgcctacagacactattcaactttggcatcttgccaccagaagacccgagggaggctcagctctgccagctcagaggaccagctatatccaggatcatttctctttcttcagggccagacagcttttaattgaaattgttatttcacaggccagggttcagttctgctcctccactataagtctaatgttctgactctctcctggtgctcaataaatatctaatcataacagcaaaaaaaaa

SEQ ID NO: 419516 - DNA, 1652 bp, Homo sapiens
  misc_feature (1345)..(1345): n is a, c, g, or t
  misc_feature (1393)..(1393): n is a, c, g, or t
  misc_feature (1415)..(1415): n is a, c, g, or t
  misc_feature (1544)..(1544): n is a, c, g, or t
  misc_feature (1550)..(1551): n is a, c, g, or t
  misc_feature (1584)..(1585): n is a, c, g, or t
  misc_feature (1645)..(1645): n is a, c, g, or t
agatatagggaaggaagggaagtaagcagtcacagacgctggcggccaccagaagtttgagcctctttggtagcaggaggctggaagaaaggacagaagtagctctggctgtgatggggatcttactgggcctgctactcctggggcacctaacagtggacacttatggccgtcccatcctggaagtgccagagagtgtaacaggaccttggaaaggggatgtgaatcttccctgcacctatgaccccctgcaaggctacacccaagtcttggtgaagtggctggtacaacgtggctcagaccctgtcaccatctttctacgtgactcttctggagaccatatccagcaggcaaagtaccagggccgcctgcatgtgagccacaaggttccaggagatgtatccctccaattgagcaccctggagatggatgaccggagccactacacgtgtgaagtcacctggcagactcctgatggcaaccaagtcgtgagagataagattactgagctccgtgtccagaaactctctgtctccaagcccacagtgacaactggcagcggttatggcttcacggtgccccagggaatgaggattagccttcaatgccaggctcggggttctcctcccatcagttatatttggtataagcaacagactaataaccaggaacccatcaaagtagcaaccctaagtaccttactcttcaagcctgcggtgatagccgactcaggctcctatttctgcactgccaagggccaggttggctctgagcagcacagcgacattgtgaagtttgtggtcaaagactcctcaaagctactcaagaccaagactgaggcacctacaaccatgacataccccttgaaagcaacatctacagtgaagcagtcctgggactggaccactgacatggatggctaccttggagagaccagtgctgggccaggaaagagcctgcctgtctttgccatcatcctcatcatctccttgtgctgtatggtggtttttaccatggcctatatcatgctctgtcggaagacatcccaacaagagcatgtctacgaagcagccaggtaagaaagtctctcctcttccatttttgaccccgtccctgccctcaattttgattactggcaggaaatgtggaggaaggggggtgtggcacagacccaatcctaaggccggaggccttcagggtcaggacatagctgccttccctctctcaggcaccttctgaggttgttttggccctctgacacaaaggataatttagatccatctgccttctgcttccagaatccctgggtggtaggatcctgataattaattggcaagaatgaganaggtggaacagaccagccagtctctatgtgtgcttggcatggacatcnaagcacattgaaactagtgcantcaggtgtcggtacactcaattgacatatgtgctatgaggtcgttgcatatgatacgtgtgcatctgatagtgctggaagttaagcttcgatacatcaactgctagtcgactcgacagccactgcggtntccgtnnaactaaactgtttctattggtctacgacacgtnncttctttttcacggttcaattccattgtttttttagggctttggccctcccccttgtatntagcacc

SEQ ID NO: 419517 - DNA, 1136 bp, Homo sapiens
agatatagggaaggaagggaagtaagcagtcacagacgctggcggccaccagaagtttgagcctctttggtagcaggaggctggaagaaaggacagaagtagctctggctgtgatggggatcttactgggcctgctactcctggggcacctaacagtggacacttatggccgtcccatcctggaagtgccagagagtgtaacaggaccttggaaaggggatgtgaatcttccctgcacctatgaccccctgcaaggctacacccaagtcttggtgaagtggctggtacaacgtggctcagaccctgtcaccatctttctacgtgactcttctggagaccatatccagcaggcaaagtaccagggccgcctgcatgtgagccacaaggttccaggagatgtatccctccaattgagcaccctggagatggatgaccggagccactacacgtgtgaagtcacctggcagactcctgatggcaaccaagtcgtgagagataagattactgagctccgtgtccagaaactctctgtctccaagcccacagtgacaactggcagcggttatggcttcacggtgccccagggaatgaggattagccttcaatgccaggctcggggttctcctcccatcagttatatttggtataagcaacagactaataaccaggaacccatcaaagtagcaaccctaagtaccttactcttcaagcctgcggtgatagccgactcaggctcctatttctgcactgccaagggccaggttggctctgagcagcacagcgacattgtgaagtttgtggtcaaagactcctcaaagctactcaagaccaagactgaggcacctacaaccatgacataccccttgaaagcaacatctacagtgaagcagtcctgggactggaccactgacatggatggctaccttggagagaccagtgctgggccaggaaagagcctgcctgtctttgccatcatcctcatcatctccttgtgctgtatggtggtttttaccatggcctatatcatgctctgtcggaagacatcccaacaagagcatgtttacgaaacacccaggcacatgccagagagcccactttttttgaaaaccccatgggggggccttttctgggggggg

SEQ ID NO: 419518 - DNA, 1588 bp, Homo sapiens; identical to SEQ ID NO: 419514

SEQ ID NO: 419519 - DNA, 1343 bp, Homo sapiens
caacgggaaactattagttactatagaaacgtgcgtaaagcagctgtacggtccgaattttgggatgcggccaccagaagtttgagcctctttggtagcaggaggctggaagaaaggacagaagtagctctggctgtgatggggatcttactgggcctgctactcctggggcacctaacagtggacacttatggccgtcccatcctggaagtgccagagagtgtaacaggaccttggaaaggggatgtgaatcttccctgcacctatgaccccctgcaaggctacacccaagtcttggtgaagtggctggtacaacgtggctcagaccctgtcaccatctttctacgtgactcttctggagaccatatccagcaggcaaagtaccagggccgcctgcatgtgagccacaaggttccaggagatgtatccctccaattgagcaccctggagatggatgaccggagccactacacgtgtgaagtcacctggcagactcctgatggcaaccaagtcgtgagagataagattactgagctccgtgtccagaaacactcctcaaagctactcaagaccaagactgaggcacctacaaccatgacataccccttgaaagcaacatctacagtgaagcagtcctgggactggaccactgacatggatggctaccttggagagaccagtgctgggccaggaaagagcctgcctgtctttgccatcatcctcatcatctccttgtgctgtatggtggtttttaccatggcctatatcatgctctgtcggaagacatcccaacaagagcatgtctacgaagcagccagggcacatgccagagaggccaacgactctggagaaaccatgagggtggccatcttcgcaagtggctgctccagtgatgagccaacttcccagaatctgggcaacaactactctgatgagccctgcataggacaggagtaccagatcatcgcccagatcaatggcaactacgcccgcctgctggacacagtctctgggcccttctagtatctctgccgggggcttctggtactcctctctaaataccagagggaagatgcccatagcactaggacttggtcatcatgcctacagacactattcaactttggcatcttgccaccagaagacccgagggaggctcagctctgccagctcagaggaccagctatatccaggatcatttctctttcttcagggccagacagcttttaattgaaattgttatttcacaggccagggttcagttctgctcctccactataagtctaatgttctgactctctcctggtgctcaataaatatctaatcataacagcaaaaaaaaa

SEQ ID NO: 419520 - DNA, 1278 bp, Homo sapiens
  misc_feature (1184)..(1184): n is a, c, g, or t
  misc_feature (1195)..(1195): n is a, c, g, or t
  misc_feature (1219)..(1219): n is a, c, g, or t
  misc_feature (1273)..(1273): n is a, c, g, or t
agatatagggaaggaagggaagtaagcagtcacagacgctggcggccaccagaagtttgagcctctttggtagcaggaggctggaagaaaggacagaagtagctctggctgtgatggggatcttactgggcctgctactcctggggcacctaacagtggacacttatggccgtcccatcctggaagtgccagagagtgtaacaggaccttggaaaggggatgtgaatcttccctgcacctatgaccccctgcaaggctacacccaagtcttggtgaagtggctggtacaacgtggctcagaccctgtcaccatctttctacgtgactcttctggagaccatatccagcaggcaaagtaccagggccgcctgcatgtgagccacaaggttccaggagatgtatccctccaattgagcaccctggagatggatgaccggagccactacacgtgtgaagtcacctggcagactcctgatggcaaccaagtcgtgagagataagattactgagctccgtgtccagaaactctctgtctccaagcccacagtgacaactggcagcggttatggcttcacggtgccccagggaatgaggattagccttcaatgccaggctcggggttctcctcccatcagttatatttggtataagcaacagactaataaccaggaacccatcaaagtagcaaccctaagtaccttactcttcaagcctgcggtgatagccgactcaggctcctatttctgcactgccaagggccaggttggctctgagcagcacagcgacattgtgaagtttgtggtcaaagactcctcaaagctactcaagaccaagactgaggcacctacaaccatgacataccccttgaaagcaacatctacagtgaagcagtcctgggactggaccactgacatggatggctaccttggagagaccagtgctgggccaggaaagagcctgcctgtctttgccatcatcctcatcatctccttgtgctgtatggtggtttttaccatggcctatatcatgctctgtcggaagacatcccaacaagagcatgtctacgaagcagccaggtaagaaagtctctcctcttccatttttgaccccgtccctgccctcaattttgattactggcaggaaatgtggaggaaggtgctttcctttttcagcaacctctgagtngttttgccttntgacacaaagataattagatcatnggcctttgcttcacaaatcctgggtgtagatcttggtattgccaggatgggccnggttg

SEQ ID NO: 419521 - DNA, 878 bp, Homo sapiens
caacgggaaactattagttactatagaaacgtgcgtaaagcagctgtacggtccgaattttgggatgcggccaccagaagtttgagcctctttggtagcaggaggctggaagaaaggacagaagtagctctggctgtgatggggatcttactgggcctgctactcctggggcacctaacagtggacacttatggccgtcccatcctggaagtgccagagagtgtaacaggaccttggaaaggggatgtgaatcttccctgcacctatgaccccctgcaaggctacacccaagtcttggtgaagtggctggtacaacgtggctcagaccctgtcaccatctttctacgtgactcttctggagaccatatccagcaggcaaagtaccagggccgcctgcatgtgagccacaaggttccaggagatgtatccctccaattgagcaccctggagatggatgaccggagccactacacgtgtgaagtcactggctttgccctggaatttgccagatgcatctcaagtaagccagctgctggatttggctctgggcccttctagtatctctgccgggggcttctggtactcctctctaaataccagagggaagatgcccatagcactaggacttggtcatcatgcctacagacactattcaactttggcatcttgccaccagaagacccgagggaggctcagctctgccagctcagaggaccagctatatccaggatcatttctctttcttcagggccagacagcttttaattgaaattgttatttcacaggccagggttcagttctgctcctccactataagtctaatgttctgactctctcctggtgctcaataaatatctaatcataacagcaaaaaaaaa

SEQ ID NO: 419522 - DNA, 2125 bp, Homo sapiens
ctggaggggccagcaagtagagtgttggtggcccaagcaaaccagtgttgccaataccattgccaaaagggcctttggatcctggacaaagcttggctgccggcttcatttattcctgctgatggctgagaagcaatctggtcttgccatcccacttgcctggtcccaagtttggttccatttgttaaaaatttgttgtaaactgcatgttttataaaataaatataaatatcgtttgttatttatctcattagagaactgcttagtgtgggttctctggcttcagtcttcctctccttcctttgaaggtaaaggtccggaatccaaagttatggatatgaaagggtataattaggccgggcgcggtggctcacttctgtaatcctagcactttgggaggcagaggtgggtggaacacgaggtcaggagttaaagaccagcctgaccaagatggtgaaaccccgtctctactaaaaatacaaaaattagctgggagtggtggatggcgactgtaaccctagctgaggcagaaaattgcttcaacccgggaggcggaggttgcagtgagccgagatcacgccactgtatgccagcctgggcgatagggcgagactccgtctcaaaaaaaggggaaaaaggtataatttatgccttttctgggcaatgctgggtctttgctatagctgcccagtaccctaagtcagactgaagatgtacagtatggtttccgttaattgtgtaagccgacaaactacaggtcccaggatagcttgagacttgtagttgctcacaaagatgggtccggtgctgcggtgcttcctgggagatgtagtttcctgtgtattgaaacctggactgctcgctggccggcagcgcaccgttttgaaggtcctagcccacctgggctggctcacgcgcacgactagccgctcccatacagcacgcccggactctgtcgtcgcttaaggccactcctattctacggctgacccctggtggtcacgtggatctgttcgccacgcaagtctgggtccttcggcgattgaccggggtccttgctgttcgggagcctctcctaagctgcctgttcgcgcgagagtttggaggggcgggtttggggtcggtgtctgattggggctcgcaccgcagcacgctggagtcccgcttaggtaccagttagcgtcaggggagctgggtcaggcggtcgccgggacaccccgtgtgtggcaggcggcgaagcgctctggagaatcccggacagccctgctccctgcagccaggtgtagtttcgggagccactggggccaaagtgagagtccagcggtcttccagcgcttgggccacggcggcggccctgggagcagaggtggagcgaccccattacgctaaagatgaaaggctggggttggctggccctgcttctgggggccctgctgggaaccgcctgggctcggaggagccaggatctccactgtggagcatgcagggctctggtggatgaactagaatgggaaattgcccaggtggaccccaagaagaccattcagatgggatctttccggatcaatccagatggcagccagtcagtggtggaggtaactgttactgttcccccaaacaaagtagctcactctggctttggatgaaattcgactgcttaaaaaggaccttggtttaatagaaatgaagaaaacagactcagaaaaaagatttggctctgtctcatttggaagaagctgcaggcttattccccatgcacttgcttcctggctgcaaaccttaatactttgtttctgctgtagaatttgttagcaaacagggagtcctgatcagcacccttctccacatccacatgactggtttttaatgtagcactgtggtatacatgcaaacatccgttcaaaatctgagtcggagctaactaaaatgatctccaccgagcagctaactctggcatcctagcctgttgtccacatgatgtcacctccatggccgtgaagccattaaccaaagacattcctcaagaaagcgcgccaaggcggtagaaggatcaggcaatgatcagtttccatgatcatattacggaattggctccaaggaccttcagaggtcgagtcctggagcg

SEQ ID NO: 419523 - DNA, 843 bp, Homo sapiens
  misc_feature (794)..(794): n is a, c, g, or t
  misc_feature (796)..(797): n is a, c, g, or t
gctagtagggcatgggtgttaatcggccgagggtcaggcggtcgccgggacaccccgtgtgtggcaggcggcgaagcgctctggagaatcccggacagccctgctccctgcagccaggtgtagtttcgggagccactggggccaaagtgagagtccagcggtcttccagcgcttgggccacggcggcggccctgggagcagaggtggagcgaccccattacgctaaagatgaaaggctggggttggctggccctgcttctgggggccctgctgggaaccgcctgggctcggaggagccaggatctccactgtggagcatgcagggctctggtggatgaactagaatgggaaattgcccaggtggaccccaagaagaccattcagatgggatctttccggatcaatccagatggcagccagtcagtggtggaggtaactgttactgttcccccaaacaaagtagctcactctggctttggatgaaattcgactgcttaaaaaggaccttggtttaatagaaatgaagaaaacagactcagaaaaaagatttggctctgtctcatttggaagaagctgcaggcttattccccatgcacttgcttcctggctgcaaaccttaatactttgtttctgctgtagaatttgttagcaaacagggagtcctgatcagcacccttctccacatccacatgactggtttttaatgtagcactgtggtatacatgcaaacatccgttcaaaatctgagtcggagctaaaaataaaaaatgaaaaaacagaaataagaataaaanannaacaaaaaaaaaaactccggaaaaaatttccccaaaaccaggaaaa

SEQ ID NO: 419524 - DNA, 1983 bp, Homo sapiens
ctggaggggccagcaagtagagtgttggtggcccaagcaaaccagtgttgccaataccattgccaaaagggcctttggatcctggacaaagcttggctgccggcttcatttattcctgctgatggctgagaagcaatctggtcttgccatcccacttgcctggtcccaagtttggttccatttgttaaaaatttgttgtaaactgcatgttttataaaataaatataaatatcgtttgttatttatctcattagagaactgcttagtgtgggttctctggcttcagtcttcctctccttcctttgaaggtaaaggtccggaatccaaagttatggatatgaaagggtataattaggccgggcgcggtggctcacttctgtaatcctagcactttgggaggcagaggtgggtggaacacgaggtcaggagttaaagaccagcctgaccaagatggtgaaaccccgtctctactaaaaatacaaaaattagctgggagtggtggatggcgactgtaaccctagctgaggcagaaaattgcttcaacccgggaggcggaggttgcagtgagccgagatcacgccactgtatgccagcctgggcgatagggcgagactccgtctcaaaaaaaggggaaaaaggtataatttatgccttttctgggcaatgctgggtctttgctatagctgcccagtaccctaagtcagactgaagatgtacagtatggtttccgttaattgtgtaagccgacaaactacaggtcccaggatagcttgagacttgtagttgctcacaaagatgggtccggtgctgcggtgcttcctgggagatgtagtttcctgtgtattgaaacctggactgctcgctggccggcagcgcaccgttttgaaggtcctagcccacctgggctggctcacgcgcacgactagccgctcccatacagcacgcccggactctgtcgtcgcttaaggccactcctattctacggctgacccctggtggtcacgtggatctgttcgccacgcaagtctgggtccttcggcgattgaccggggtccttgctgttcgggagcctctcctaagctgcctgttcgcgcgagagtttggaggggcgggtttggggtcggtgtctgattggggctcgcaccgcagcacgctggagtcccgcttaggtaccagttagcgtcaggggagctgggtcaggcggtcgccgggacaccccgtgtgtggcaggcggcgaagcgctctggagaatcccggacagccctgctccctgcagccaggtgtagtttcgggagccactggggccaaagtgagagtccagcggtcttccagcgcttgggccacggcggcggccctgggagcagaggtggagcgaccccattacgctaaagatgaaaggctggggttggctggccctgcttctgggggccctgctgggaaccgcctgggctcggaggagccaggatctccactgtggagcatgcagggctctggtggatgaactagaatgggaaattgcccaggtggaccccaagaagaccattcagatgggatctttccggatcaatccagatggcagccagtcagtggtggaggtaaatgaggtgccgggcacggtggttcatgcctgtagtcccagcactttgggaggctgaggcgggtggattacctgaagttgggagtttgagaccagcctgaccaacatggagaaaccccgtctctactaaaaatacaaaattagctgggcgtggtggcacatgcctgtaatcccaactactcgggaagctgaggcaggagaatcacttgaacccgggaggtggagcttgcggtgagccgagatcgcgccattgcactccagcctgggcaacaagagtgaaactccatctcaaaaaaaatatacgacaacacacaggcattgttccatgcggtacacctcaacctcctttttcttggaaccaaaaaaaacagaaacctctccggggt

SEQ ID NO: 419525 - DNA, 1993 bp, Homo sapiens
ctggaggggccagcaagtagagtgttggtggcccaagcaaaccagtgttgccaataccattgccaaaagggcctttggatcctggacaaagcttggctgccggcttcatttattcctgctgatggctgagaagcaatctggtcttgccatcccacttgcctggtcccaagtttggttccatttgttaaaaatttgttgtaaactgcatgttttataaaataaatataaatatcgtttgttatttatctcattagagaactgcttagtgtgggttctctggcttcagtcttcctctccttcctttgaaggtaaaggtccggaatccaaagttatggatatgaaagggtataattaggccgggcgcggtggctcacttctgtaatcctagcactttgggaggcagaggtgggtggaacacgaggtcaggagttaaagaccagcctgaccaagatggtgaaaccccgtctctactaaaaatacaaaaattagctgggagtggtggatggcgactgtaaccctagctgaggcagaaaattgcttcaacccgggaggcggaggttgcagtgagccgagatcacgccactgtatgccagcctgggcgatagggcgagactccgtctcaaaaaaaggggaaaaaggtataatttatgccttttctgggcaatgctgggtctttgctatagctgcccagtaccctaagtcagactgaagatgtacagtatggtttccgttaattgtgtaagccgacaaactacaggtcccaggatagcttgagacttgtagttgctcacaaagatgggtccggtgctgcggtgcttcctgggagatgtagtttcctgtgtattgaaacctggactgctcgctggccggcagcgcaccgttttgaaggtcctagcccacctgggctggctcacgcgcacgactagccgctcccatacagcacgcccggactctgtcgtcgcttaaggccactcctattctacggctgacccctggtggtcacgtggatctgttcgccacgcaagtctgggtccttcggcgattgaccggggtccttgctgttcgggagcctctcctaagctgcctgttcgcgcgagagtttggaggggcgggtttggggtcggtgtctgattggggctcgcaccgcagcacgctggagtcccgcttaggtaccagttagcgtcaggggagctgggtcaggcggtcgccgggacaccccgtgtgtggcaggcggcgaagcgctctggagaatcccggacagccctgctccctgcagccaggtgtagtttcgggagtggagcgaccccattacgctaaagatgaaaggctggggttggctggccctgcttctgggggccctgctgggaaccgcctgggctcggaggagccaggatctccactgtggagcatgcagggctctggtggatgaactagaatgggaaattgcccaggtggaccccaagaagaccattcagatgggatctttccggatcaatccagatggcagccagtcagtggtggaggtaaatgaggtgccgggcacggtggttcatgcctgtagtcccagcactttgggaggctgaggcgggtggattacctgaagttgggagtttgagaccagcctgaccaacatggagaaaccccgtctctactaaaaatacaaaattagctgggcgtggtggcacatgcctgtaatcccaactactcgggaagctgaggcaggagaatcacttgaacccgggaggtggagcttgcggtgagccgagatcgcgccattgcactccagcctgggcaacaagagtgaaactccatctcaaaaaaaagaacaagattgtcctgggcgtaataactcttttgtcgaccttccaaaaaaaaaaaaaaaaaatttgggggcggcccgaaattttaacacttttgggccggcccagaagaagccgttccaaaacgcaaggggttcccaaacggcggtgaacgggttgttcttgcaaccccg

SEQ ID NO: 419526 - DNA, 2723 bp, Homo sapiens
  misc_feature (2702)..(2702): n is a, c, g, or t
  misc_feature (2704)..(2705): n is a, c, g, or t
  misc_feature (2713)..(2713): n is a, c, g, or t
  misc_feature (2718)..(2718): n is a, c, g, or t
ctggaggggccagcaagtagagtgttggtggcccaagcaaaccagtgttgccaataccattgccaaaagggcctttggatcctggacaaagcttggctgccggcttcatttattcctgctgatggctgagaagcaatctggtcttgccatcccacttgcctggtcccaagtttggttccatttgttaaaaatttgttgtaaactgcatgttttataaaataaatataaatatcgtttgttatttatctcattagagaactgcttagtgtgggttctctggcttcagtcttcctctccttcctttgaaggtaaaggtccggaatccaaagttatggatatgaaagggtataattaggccgggcgcggtggctcacttctgtaatcctagcactttgggaggcagaggtgggtggaacacgaggtcaggagttaaagaccagcctgaccaagatggtgaaaccccgtctctactaaaaatacaaaaattagctgggagtggtggatggcgactgtaaccctagctgaggcagaaaattgcttcaacccgggaggcggaggttgcagtgagccgagatcacgccactgtatgccagcctgggcgatagggcgagactccgtctcaaaaaaaggggaaaaaggtataatttatgccttttctgggcaatgctgggtctttgctatagctgcccagtaccctaagtcagactgaagatgtacagtatggtttccgttaattgtgtaagccgacaaactacaggtcccaggatagcttgagacttgtagttgctcacaaagatgggtccggtgctgcggtgcttcctgggagatgtagtttcctgtgtattgaaacctggactgctcgctggccggcagcgcaccgttttgaaggtcctagcccacctgggctggctcacgcgcacgactagccgctcccatacagcacgcccggactctgtcgtcgcttaaggccactcctattctacggctgacccctggtggtcacgtggatctgttcgccacgcaagtctgggtccttcggcgattgaccggggtccttgctgttcgggagcctctcctaagctgcctgttcgcgcgagagtttggaggggcgggtttggggtcggtgtctgattggggctcgcaccgcagcacgctggagtcccgcttaggtaccagttagcgtcaggggagctgggtcaggcggtcgccgggacaccccgtgtgtggcaggcggcgaagcgctctggagaatcccggacagccctgctccctgcagccaggtgtagtttcgggagccactggggccaaagtgagagtccagcggtcttccagcgcttgggccacggcggcggccctgggagcagaggtggagcgaccccattacgctaaagatgaaaggctggggttggctggccctgcttctgggggccctgctgggaaccgcctgggctcggaggagccaggatctccactgtggagcatgcagggctctggtggatgaactagaatgggaaattgcccaggtggaccccaagaagaccattcagatgggatctttccggatcaatccagatggcagccagtcagtggtggaggtaagtgccttatgcccgctcagaggcccacctcacagagctgctggaggagatatgtgaccggatgaaggagtatggggaacagattgatccttccacccatcgcaagaactacgtacgtgtagtgggccggaatggagaatccagtgaactggacctacaaggcatccgaatcgactcagatattagcggcaccctcaagtttgcgtgtgagagcattgtggaggaatacgaggatgaactcattgaattcttttcccgagaggctgacaatgttaaagacaaactttgcagtaagcgaacagatctttgtgaccatgccctgcacatatcgcatgatgagctatgaaccactggagcagcccacactggcttgatggatcacccccaggaggggaaaatggtggcaatgccttttatatattatgtttttactgaaattaactgaaaaaatatgaaaccaaaagtaaaaactgtgttgtcttttcatgcctggaattgcccttacattaagcttgaagataaggagttatatagacaggaaagataatggaggagaaagaagagttttgggattgatacaggataaaggtaggagaatggagggaccagcaagaacagagacaggaaggggaaaatggatgtgaccaactcagctgaaaagtaagggctttatcggatagggacagacgaggtaaggaaggttgtttaatgagaggccttgcttgccagcctaagcttttaaatttgatgccagtggcaacaataaagtgtatctatcactagcacattgtcaatctggactataagtctgtccacaattctgtgtgtagagattccagactggggcatagggatgaaaacctaaaggataccttcttttgggaaattctttttttctttttttttctgagatggagtcccgctctgtcgcccaggctggagtacagtggcgcgatctcggctcactacaagctctgcctcccaggttcacgccattatcctgactcagcctcccgagtagctgggattacgggcgcatgccaccacactcagctaatttttgtatttttagtagagacaaggtttcactatgttggccaggtngnncactgcanctggncctaa

SEQ ID NO: 419527 - DNA, 2101 bp, Homo sapiens
ctggaggggccagcaagtagagtgttggtggcccaagcaaaccagtgttgccaataccattgccaaaagggcctttggatcctggacaaagcttggctgccggcttcatttattcctgctgatggctgagaagcaatctggtcttgccatcccacttgcctggtcccaagtttggttccatttgttaaaaatttgttgtaaactgcatgttttataaaataaatataaatatcgtttgttatttatctcattagagaactgcttagtgtgggttctctggcttcagtcttcctctccttcctttgaaggtaaaggtccggaatccaaagttatggatatgaaagggtataattaggccgggcgcggtggctcacttctgtaatcctagcactttgggaggcagaggtgggtggaacacgaggtcaggagttaaagaccagcctgaccaagatggtgaaaccccgtctctactaaaaatacaaaaattagctgggagtggtggatggcgactgtaaccctagctgaggcagaaaattgcttcaacccgggaggcggaggttgcagtgagccgagatcacgccactgtatgccagcctgggcgatagggcgagactccgtctcaaaaaaaggggaaaaaggtataatttatgccttttctgggcaatgctgggtctttgctatagctgcccagtaccctaagtcagactgaagatgtacagtatggtttccgttaattgtgtaagccgacaaactacaggtcccaggatagcttgagacttgtagttgctcacaaagatgggtccggtgctgcggtgcttcctgggagatgtagtttcctgtgtattgaaacctggactgctcgctggccggcagcgcaccgttttgaaggtcctagcccacctgggctggctcacgcgcacgactagccgctcccatacagcacgcccggactctgtcgtcgcttaaggccactcctattctacggctgacccctggtggtcacgtggatctgttcgccacgcaagtctgggtccttcggcgattgaccggggtccttgctgttcgggagcctctcctaagctgcctgttcgcgcgagagtttggaggggcgggtttggggtcggtgtctgattggggctcgcaccgcagcacgctggagtcccgcttaggtaccagttagcgtcaggggagctgggtcaggcggtcgccgggacaccccgtgtgtggcaggcggcgaagcgctctggagaatcccggacagccctgctccctgcagccaggtgtagtttcgggagccactggggccaaagtgagagtccagcggtcttccagcgcttgggccacggcggcggccctgggagcagaggtggagcgaccccattacgctaaagatgaaaggctggggttggctggccctgcttctgggggccctgctgggaaccgcctgggctcggaggagccaggatctccactgtggagcatgcagggctctggtggatgaactagaatgggaaattgcccaggtggaccccaagaagaccattcagatgggatctttccggatcaatccagatggcagccagtcagtggtggaggtaagtgccttatgcccgctcagaggcccacctcacagagctgctggaggagatatgtgaccggatgaaggagtatggggaacagattgatccttccacccatcgcaagaactacgtacgtgtagtgggccggaatggagaatccagtgaactggacctacaaggcatccgaatcgactcagatattagcggcaccctcaagtttgcgtgtgagagcattgtggaggaatacgaggatgaactcattgaattcttttcccgagaggctgacaatgttaaagacaaactttgcagtaagcgaacagatctttgtgaccatgccctgcacatatcgcatgatgagctatgaaccactggagcagcccacactggcttgatggatcacccccaggaggggaaaatggtggcaatgccttttatatattatgtttttactgaaattaactgaaaaaatatgaaaccaaacgttttaaaaaattataaaatttggtgtttaaactccggca

SEQ ID NO: 419528 - DNA, 2083 bp, Homo sapiens
ctggaggggccagcaagtagagtgttggtggcccaagcaaaccagtgttgccaataccattgccaaaagggcctttggatcctggacaaagcttggctgccggcttcatttattcctgctgatggctgagaagcaatctggtcttgccatcccacttgcctggtcccaagtttggttccatttgttaaaaatttgttgtaaactgcatgttttataaaataaatataaatatcgtttgttatttatctcattagagaactgcttagtgtgggttctctggcttcagtcttcctctccttcctttgaaggtaaaggtccggaatccaaagttatggatatgaaagggtataattaggccgggcgcggtggctcacttctgtaatcctagcactttgggaggcagaggtgggtggaacacgaggtcaggagttaaagaccagcctgaccaagatggtgaaaccccgtctctactaaaaatacaaaaattagctgggagtggtggatggcgactgtaaccctagctgaggcagaaaattgcttcaacccgggaggcggaggttgcagtgagccgagatcacgccactgtatgccagcctgggcgatagggcgagactccgtctcaaaaaaaggggaaaaaggtataatttatgccttttctgggcaatgctgggtctttgctatagctgcccagtaccctaagtcagactgaagatgtacagtatggtttccgttaattgtgtaagccgacaaactacaggtcccaggatagcttgagacttgtagttgctcacaaagatgggtccggtgctgcggtgcttcctgggagatgtagtttcctgtgtattgaaacctggactgctcgctggccggcagcgcaccgttttgaaggtcctagcccacctgggctggctcacgcgcacgactagccgctcccatacagcacgcccggactctgtcgtcgcttaaggccactcctattctacggctgacccctggtggtcacgtggatctgttcgccacgcaagtctgggtccttcggcgattgaccggggtccttgctgttcgggagcctctcctaagctgcctgttcgcgcgagagtttggaggggcgggtttggggtcggtgtctgattggggctcgcaccgcagcacgctggagtcccgcttaggtaccagttagcgtcaggggagctgggtcaggcggtcgccgggacaccccgtgtgtggcaggcggcgaagcgctctggagaatcccggacagccctgctccctgcagccaggtgtagtttcgggagccactggggccaaagtgagagtccagcggtcttccagcgcttgggccacggcggcggccctgggagcagaggtggagcgaccccattacgctaaagatgaaaggctggggttggctggccctgcttctgggggccctgctgggaaccgcctgggctcggaggagccaggatctccactgtggagcatgcagggctctggtggatgaactagaatgggaaattgcccaggtggaccccaagaagaccattcagatgggatctttccggatcaatccagatggcagccagtcagtggtggaggtaagtgccttatgcccgctcagaggcccacctcacagagctgctggaggagatatgtgaccggatgaaggagtatggggaacagattgatccttccacccatcgcaagaactacgtacgtgtagtgggccggaatggagaatccagtgaactggacctacaaggcatccgaatcgactcagatattagcggcaccctcaagtttgcgtgtgagagcattgtggaggaatacgaggatgaactcattgaattcttttcccgagaggctgacaatgttaaagacaaactttgcagtaagcgaacagatctttgtgaccatgccctgcacatatcgcatgatgagctatgaaccactggagcagcccacactggcttgatggatcacccccaggaggggaaaatggtggcaatgccttttatatattatgtttttactgaaattatgaaaattgaaccaaaaaaaaaaaaggggggcggcaaaaaaccag

SEQ ID NO: 419529 - DNA, 1722 bp, Homo sapiens
  misc_feature (1701)..(1701): n is a, c, g, or t
  misc_feature (1703)..(1704): n is a, c, g, or t
  misc_feature (1712)..(1712): n is a, c, g, or t
  misc_feature (1717)..(1717): n is a, c, g, or t
acccacgcgtccggggtattggccactggggccaaagtgagagtccagcggtcttccagcgcttgggccacggcggcggccctgggagcagaggtggagcgaccccattacgctaaagatgaaaggctggggttggctggccctgcttctgggggccctgctgggaaccgcctgggctcggaggagccaggatctccactgtggagcatgcagggctctggtggatgaactagaatgggaaattgcccaggtggaccccaagaagaccattcagatgggatctttccggatcaatccagatggcagccagtcagtggtggaggtaagtgccttatgcccgctcagaggcccacctcacagagctgctggaggagatatgtgaccggatgaaggagtatggggaacagattgatccttccacccatcgcaagaactacgtacgtgtagtgggccggaatggagaatccagtgaactggacctacaaggcatccgaatcgactcagatattagcggcaccctcaagtttgcgtgtgagagcattgtggaggaatacgaggatgaactcattgaattcttttcccgagaggctgacaatgttaaagacaaactttgcagtaagcgaacagatctttgtgaccatgccctgcacatatcgcatgatgagctatgaaccactggagcagcccacactggcttgatggatcacccccaggaggggaaaatggtggcaatgccttttatatattatgtttttactgaaattaactgaaaaaatatgaaaccaaaagtaaaaactgtgttgtcttttcatgcctggaattgcccttacattaagcttgaagataaggagttatatagacaggaaagataatggaggagaaagaagagttttgggattgatacaggataaaggtaggagaggcctgaacctttaattcttctaccttctgagattccactccactcataaactagataagctttcagtcagtgcccactcaataccacgtctttagagtctaattgtggagaatagaggaacctccatgaggaagcaggggaacatagtgtatggtagtgtagaattctagaaatcccttgtgttcatggctgttgaaacataaagtaagacagggcttggtcttgaaggaaataacggatatgcattattcttccttccctgcccatccagatggagggaccagcaagaacagagacaggaaggggaaaatggatgtgaccaactcagctgaaaagtaagggctttatcggatagggacagacgaggtaaggaaggttgtttaatgagaggccttgcttgccagcctaagcttttaaatttgatgccagtggcaacaataaagtgtatctatcactagcacattgtcaatctggactataagtctgtccacaattctgtgtgtagagattccagactggggcatagggatgaaaacctaaaggataccttcttttgggaaattctttttttctttttttttctgagatggagtcccgctctgtcgcccaggctggagtacagtggcgcgatctcggctcactacaagctctgcctcccaggttcacgccattatcctgactcagcctcccgagtagctgggattacgggcgcatgccaccacactcagctaatttttgtatttttagtagagacaaggtttcactatgttggccaggtngnncactgcanctggncctaa

SEQ ID NO: 419530 - DNA, 2183 bp, Homo sapiens
ctggaggggccagcaagtagagtgttggtggcccaagcaaaccagtgttgccaataccattgccaaaagggcctttggatcctggacaaagcttggctgccggcttcatttattcctgctgatggctgagaagcaatctggtcttgccatcccacttgcctggtcccaagtttggttccatttgttaaaaatttgttgtaaactgcatgttttataaaataaatataaatatcgtttgttatttatctcattagagaactgcttagtgtgggttctctggcttcagtcttcctctccttcctttgaaggtaaaggtccggaatccaaagttatggatatgaaagggtataattaggccgggcgcggtggctcacttctgtaatcctagcactttgggaggcagaggtgggtggaacacgaggtcaggagttaaagaccagcctgaccaagatggtgaaaccccgtctctactaaaaatacaaaaattagctgggagtggtggatggcgactgtaaccctagctgaggcagaaaattgcttcaacccgggaggcggaggttgcagtgagccgagatcacgccactgtatgccagcctgggcgatagggcgagactccgtctcaaaaaaaggggaaaaaggtataatttatgccttttctgggcaatgctgggtctttgctatagctgcccagtaccctaagtcagactgaagatgtacagtatggtttccgttaattgtgtaagccgacaaactacaggtcccaggatagcttgagacttgtagttgctcacaaagatgggtccggtgctgcggtgcttcctgggagatgtagtttcctgtgtattgaaacctggactgctcgctggccggcagcgcaccgttttgaaggtcctagcccacctgggctggctcacgcgcacgactagccgctcccatacagcacgcccggactctgtcgtcgcttaaggccactcctattctacggctgacccctggtggtcacgtggatctgttcgccacgcaagtctgggtccttcggcgattgaccggggtccttgctgttcgggagcctctcctaagctgcctgttcgcgcgagagtttggaggggcgggtttggggtcggtgtctgattggggctcgcaccgcagcacgctggagtcccgcttaggtaccagttagcgtcaggggagctgggtcaggcggtcgccgggacaccccgtgtgtggcaggcggcgaagcgctctggagaatcccggacagccctgctccctgcagccaggtgtagtttcgggagccactggggccaaagtgagagtccagcggtcttccagcgcttgggccacggcggcggccctgggagcagaggtggagcgaccccattacgctaaagatgaaaggctggggttggctggccctgcttctgggggccctgctgggaaccgcctgggctcggaggagccaggatctccactgtggagcatgcagggctctggtggatgaactagaatgggaaattgcccaggtggaccccaagaagaccattcagatgggatctttccggatcaatccagatggcagccagtcagtggtggaggtaactgttactgttcccccaaacaaagtagctcactctggctttggatgaaattcgactgcttaaaaaggaccttggtttaatagaaatgaagaaaacagactcagaaaaaagatttggctctgtctcatttggaagaagctgcaggcttattccccatgcacttgcttcctggctgcaaaccttaatactttgtttctgctgtagaatttgttagcaaacagggagtcctgatcagcacccttctccacatccacatgactggtttttaatgtagcactgtggtatacatgcaaacatccgttcaaaatctgagtcggagctaaaaataaaaaatgaaaaaacagaaataagaataaaaggtcttatcctcataattaggaaattttaatcgaaaacaacacacatgtacacaaaggtgtatctaataagcaatatataaggcagtgttaagattacagtgctagcctgggcatcatggcaaaacaccaactctacaaaaaaatgcaaaagttagcagtgcatggtggcatgtgcctgtagtgacagctgcttggaaggctgaggtgggaggatcacttgagccca

SEQ ID NO: 419531 - DNA, 2923 bp, Homo sapiens
  misc_feature (2902)..(2902): n is a, c, g, or t
  misc_feature (2904)..(2905): n is a, c, g, or t
  misc_feature (2913)..(2913): n is a, c, g, or t
  misc_feature (2918)..(2918): n is a, c, g, or t
ctggaggggccagcaagtagagtgttggtggcccaagcaaaccagtgttgccaataccattgccaaaagggcctttggatcctggacaaagcttggctgccggcttcatttattcctgctgatggctgagaagcaatctggtcttgccatcccacttgcctggtcccaagtttggttccatttgttaaaaatttgttgtaaactgcatgttttataaaataaatataaatatcgtttgttatttatctcattagagaactgcttagtgtgggttctctggcttcagtcttcctctccttcctttgaaggtaaaggtccggaatccaaagttatggatatgaaagggtataattaggccgggcgcggtggctcacttctgtaatcctagcactttgggaggcagaggtgggtggaacacgaggtcaggagttaaagaccagcctgaccaagatggtgaaaccccgtctctactaaaaatacaaaaattagctgggagtggtggatggcgactgtaaccctagctgaggcagaaaattgcttcaacccgggaggcggaggttgcagtgagccgagatcacgccactgtatgccagcctgggcgatagggcgagactccgtctcaaaaaaaggggaaaaaggtataatttatgccttttctgggcaatgctgggtctttgctatagctgcccagtaccctaagtcagactgaagatgtacagtatggtttccgttaattgtgtaagccgacaaactacaggtcccaggatagcttgagacttgtagttgctcacaaagatgggtccggtgctgcggtgcttcctgggagatgtagtttcctgtgtattgaaacctggactgctcgctggccggcagcgcaccgttttgaaggtcctagcccacctgggctggctcacgcgcacgactagccgctcccatacagcacgcccggactctgtcgtcgcttaaggccactcctattctacggctgacccctggtggtcacgtggatctgttcgccacgcaagtctgggtccttcggcgattgaccggggtccttgctgttcgggagcctctcctaagctgcctgttcgcgcgagagtttggaggggcgggtttggggtcggtgtctgattggggctcgcaccgcagcacgctggagtcccgcttaggtaccagttagcgtcaggggagctgggtcaggcggtcgccgggacaccccgtgtgtggcaggcggcgaagcgctctggagaatcccggacagccctgctccctgcagccaggtgtagtttcgggagtggagcgaccccattacgctaaagatgaaaggctggggttggctggccctgcttctgggggccctgctgggaaccgcctgggctcggaggagccaggatctccactgtggagcatgcagggctctggtggatgaactagaatgggaaattgcccaggtggaccccaagaagaccattcagatgggatctttccggatcaatccagatggcagccagtcagtggtggaggtaagtgccttatgcccgctcagaggcccacctcacagagctgctggaggagatatgtgaccggatgaaggagtatggggaacagattgatccttccacccatcgcaagaactacgtacgtgtagtgggccggaatggagaatccagtgaactggacctacaaggcatccgaatcgactcagatattagcggcaccctcaagtttgcgtgtgagagcattgtggaggaatacgaggatgaactcattgaattcttttcccgagaggctgacaatgttaaagacaaactttgcagtaagcgaacagatctttgtgaccatgccctgcacatatcgcatgatgagctatgaaccactggagcagcccacactggcttgatggatcacccccaggaggggaaaatggtggcaatgccttttatatattatgtttttactgaaattaactgaaaaaatatgaaaccaaaagtaaaaactgtgttgtcttttcatgcctggaattgcccttacattaagcttgaagataaggagttatatagacaggaaagataatggaggagaaagaagagttttgggattgatacaggataaaggtaggagaggcctgaacctttaattcttctaccttctgagattccactccactcataaactagataagctttcagtcagtgcccactcaataccacgtctttagagtctaattgtggagaatagaggaacctccatgaggaagcaggggaacatagtgtatggtagtgtagaattctagaaatcccttgtgttcatggctgttgaaacataaagtaagacagggcttggtcttgaaggaaataacggatatgcattattcttccttccctgcccatccagatggagggaccagcaagaacagagacaggaaggggaaaatggatgtgaccaactcagctgaaaagtaagggctttatcggatagggacagacgaggtaaggaaggttgtttaatgagaggccttgcttgccagcctaagcttttaaatttgatgccagtggcaacaataaagtgtatctatcactagcacattgtcaatctggactataagtctgtccacaattctgtgtgtagagattccagactggggcatagggatgaaaacctaaaggataccttcttttgggaaattctttttttctttttttttctgagatggagtcccgctctgtcgcccaggctggagtacagtggcgcgatctcggctcactacaagctctgcctcccaggttcacgccattatcctgactcagcctcccgagtagctgggattacgggcgcatgccaccacactcagctaatttttgtatttttagtagagacaaggtttcactatgttggccaggtngnncactgcanctggncctaa

SEQ ID NO: 419532 - DNA, 3515 bp, Homo sapiens
  misc_feature (3494)..(3494): n is a, c, g, or t
  misc_feature (3496)..(3497): n is a, c, g, or t
  misc_feature (3505)..(3505): n is a, c, g, or t
  misc_feature (3510)..(3510): n is a, c, g, or t
ctggaggggccagcaagtagagtgttggtggcccaagcaaaccagtgttgccaataccattgccaaaagggcctttggatcctggacaaagcttggctgccggcttcatttattcctgctgatggctgagaagcaatctggtcttgccatcccacttgcctggtcccaagtttggttccatttgttaaaaatttgttgtaaactgcatgttttataaaataaatataaatatcgtttgttatttatctcattagagaactgcttagtgtgggttctctggcttcagtcttcctctccttcctttgaaggtaaaggtccggaatccaaagttatggatatgaaagggtataattaggccgggcgcggtggctcacttctgtaatcctagcactttgggaggcagaggtgggtggaacacgaggtcaggagttaaagaccagcctgaccaagatggtgaaaccccgtctctactaaaaatacaaaaattagctgggagtggtggatggcgactgtaaccctagctgaggcagaaaattgcttcaacccgggaggcggaggttgcagtgagccgagatcacgccactgtatgccagcctgggcgatagggcgagactccgtctcaaaaaaaggggaaaaaggtataatttatgccttttctgggcaatgctgggtctttgctatagctgcccagtaccctaagtcagactgaagatgtacagtatggtttccgttaattgtgtaagccgacaaactacaggtcccaggatagcttgagacttgtagttgctcacaaagatgggtccggtgctgcggtgcttcctgggagatgtagtttcctgtgtattgaaacctggactgctcgctggccggcagcgcaccgttttgaaggtcctagcccacctgggctggctcacgcgcacgactagccgctcccatacagcacgcccggactctgtcgtcgcttaaggccactcctattctacggctgacccctggtggtcacgtggatctgttcgccacgcaagtctgggtccttcggcgattgaccggggtccttgctgttcgggagcctctcctaagctgcctgttcgcgcgagagtttggaggggcgggtttggggtcggtgtctgattggggctcgcaccgcagcacgctggagtcccgcttaggtaccagttagcgtcaggggagctgggtcaggcggtcgccgggacaccccgtgtgtggcaggcggcgaagcgctctggagaatcccggacagccctgctccctgcagccaggtgtagtttcgggagccactggggccaaagtgagagtccagcggtcttccagcgcttgggccacggcggcggccctgggagcagaggtggagcgaccccattacgctaaagatgaaaggctggggttggctggccctgcttctgggggccctgctgggaaccgcctgggctcggaggagccaggatctccactgtggagcatgcagggctctggtggatgaactagaatgggaaattgcccaggtggaccccaagaagaccattcagatgggatctttccggatcaatccagatggcagccagtcagtggtggaggtaactgttactgttcccccaaacaaagtagctcactctggctttggatgaaattcgactgcttaaaaaggaccttggtttaatagaaatgaagaaaacagactcagaaaaaagatttggctctgtctcatttggaagaagctgcaggcttattccccatgcacttgcttcctggctgcaaaccttaataccttctccacatccacatgactggtttttaatgtagcactgtggtatacatgcaaacatccgttcaaaatctgagtcggagctaactgtaatcccagcactcttggaggccaaggcaggcagatcacttgagcacaggagttcgagaccagcctgggcaacatgagcaaaaccccatctcaaaaaacaaacaaacaaacaaaactaattaaaatcaattagggaaagctttttagaataggttgttggagctagatttggaaagaaaagtaaggatataaattactaatgtacagaggtagaagagagtgacccaaggctgaggacatttctaggtgccttatgcccgctcagaggcccacctcacagagctgctggaggagatatgtgaccggatgaaggagtatggggaacagattgatccttccacccatcgcaagaactacgtacgtgtagtgggccggaatggagaatccagtgaactggacctacaaggcatccgaatcgactcagatattagcggcaccctcaagtttgcgtgtgagagcattgtggaggaatacgaggatgaactcattgaattcttttcccgagaggctgacaatgttaaagacaaactttgcagtaagcgaacagatctttgtgaccatgccctgcacatatcgcatgatgagctatgaaccactggagcagcccacactggcttgatggatcacccccaggaggggaaaatggtggcaatgccttttatatattatgtttttactgaaattaactgaaaaaatatgaaaccaaaagtaaaaactgtgttgtcttttcatgcctggaattgcccttacattaagcttgaagataaggagttatatagacaggaaagataatggaggagaaagaagagttttgggattgatacaggataaaggtaggagaggcctgaacctttaattcttctaccttctgagattccactccactcataaactagataagctttcagtcagtgcccactcaataccacgtctttagagtctaattgtggagaatagaggaacctccatgaggaagcaggggaacatagtgtatggtagtgtagaattctagaaatcccttgtgttcatggctgttgaaacataaagtaagacagggcttggtcttgaaggaaataacggatatgcattattcttccttccctgcccatccagatggagggaccagcaagaacagagacaggaaggggaaaatggatgtgaccaactcagctgaaaagtaagggctttatcggatagggacagacgaggtaaggaaggttgtttaatgagaggccttgcttgccagcctaagcttttaaatttgatgccagtggcaacaataaagtgtatctatcactagcacattgtcaatctggactataagtctgtccacaattctgtgtgtagagattccagactggggcatagggatgaaaacctaaaggataccttcttttgggaaattctttttttctttttttttctgagatggagtcccgctctgtcgcccaggctggagtacagtggcgcgatctcggctcactacaagctctgcctcccaggttcacgccattatcctgactcagcctcccgagtagctgggattacgggcgcatgccaccacactcagctaatttttgtatttttagtagagacaaggtttcactatgttggccaggtngnncactgcanctggncctaa

SEQ ID NO: 419533 - DNA, 2006 bp, Homo sapiens
  misc_feature (1957)..(1957): n is a, c, g, or t
  misc_feature (1959)..(1960): n is a, c, g, or t
ctggaggggccagcaagtagagtgttggtggcccaagcaaaccagtgttgccaataccattgccaaaagggcctttggatcctggacaaagcttggctgccggcttcatttattcctgctgatggctgagaagcaatctggtcttgccatcccacttgcctggtcccaagtttggttccatttgttaaaaatttgttgtaaactgcatgttttataaaataaatataaatatcgtttgttatttatctcattagagaactgcttagtgtgggttctctggcttcagtcttcctctccttcctttgaaggtaaaggtccggaatccaaagttatggatatgaaagggtataattaggccgggcgcggtggctcacttctgtaatcctagcactttgggaggcagaggtgggtggaacacgaggtcaggagttaaagaccagcctgaccaagatggtgaaaccccgtctctactaaaaatacaaaaattagctgggagtggtggatggcgactgtaaccctagctgaggcagaaaattgcttcaacccgggaggcggaggttgcagtgagccgagatcacgccactgtatgccagcctgggcgatagggcgagactccgtctcaaaaaaaggggaaaaaggtataatttatgccttttctgggcaatgctgggtctttgctatagctgcccagtaccctaagtcagactgaagatgtacagtatggtttccgttaattgtgtaagccgacaaactacaggtcccaggatagcttgagacttgtagttgctcacaaagatgggtccggtgctgcggtgcttcctgggagatgtagtttcctgtgtattgaaacctggactgctcgctggccggcagcgcaccgttttgaaggtcctagcccacctgggctggctcacgcgcacgactagccgctcccatacagcacgcccggactctgtcgtcgcttaaggccactcctattctacggctgacccctggtggtcacgtggatctgttcgccacgcaagtctgggtccttcggcgattgaccggggtccttgctgttcgggagcctctcctaagctgcctgttcgcgcgagagtttggaggggcgggtttggggtcggtgtctgattggggctcgcaccgcagcacgctggagtcccgcttaggtaccagttagcgtcaggggagctgggtcaggcggtcgccgggacaccccgtgtgtggcaggcggcgaagcgctctggagaatcccggacagccctgctccctgcagccaggtgtagtttcgggagccactggggccaaagtgagagtccagcggtcttccagcgcttgggccacggcggcggccctgggagcagaggtggagcgaccccattacgctaaagatgaaaggctggggttggctggccctgcttctgggggccctgctgggaaccgcctgggctcggaggagccaggatctccactgtggagcatgcagggctctggtggatgaactagaatgggaaattgcccaggtggaccccaagaagaccattcagatgggatctttccggatcaatccagatggcagccagtcagtggtggaggtaactgttactgttcccccaaacaaagtagctcactctggctttggatgaaattcgactgcttaaaaaggaccttggtttaatagaaatgaagaaaacagactcagaaaaaagatttggctctgtctcatttggaagaagctgcaggcttattccccatgcacttgcttcctggctgcaaaccttaatactttgtttctgctgtagaatttgttagcaaacagggagtcctgatcagcacccttctccacatccacatgactggtttttaatgtagcactgtggtatacatgcaaacatccgttcaaaatctgagtcggagctaaaaataaaaaatgaaaaaacagaaataagaataaaanannaacaaaaaaaaaaactccggaaaaaatttccccaaaaccaggaaaa

SEQ ID NO: 419534 - DNA, 1657 bp, Homo sapiens
  misc_feature (1636)..(1636): n is a, c, g, or t
  misc_feature (1638)..(1639): n is a, c, g, or t
  misc_feature (1647)..(1647): n is a, c, g, or t
  misc_feature (1652)..(1652): n is a, c, g, or t
gataacctaaatccagtgccagcgttatgtggagcgaccccattacgctaaagatgaaaggctggggttggctggccctgcttctgggggccctgctgggaaccgcctgggctcggaggagccaggatctccactgtggagcatgcagggctctggtggatgaactagaatgggaaattgcccaggtggaccccaagaagaccattcagatgggatctttccggatcaatccagatggcagccagtcagtggtggaggtaagtgccttatgcccgctcagaggcccacctcacagagctgctggaggagatatgtgaccggatgaaggagtatggggaacagattgatccttccacccatcgcaagaactacgtacgtgtagtgggccggaatggagaatccagtgaactggacctacaaggcatccgaatcgactcagatattagcggcaccctcaagtttgcgtgtgagagcattgtggaggaatacgaggatgaactcattgaattcttttcccgagaggctgacaatgttaaagacaaactttgcagtaagcgaacagatctttgtgaccatgccctgcacatatcgcatgatgagctatgaaccactggagcagcccacactggcttgatggatcacccccaggaggggaaaatggtggcaatgccttttatatattatgtttttactgaaattaactgaaaaaatatgaaaccaaaagtaaaaactgtgttgtcttttcatgcctggaattgcccttacattaagcttgaagataaggagttatatagacaggaaagataatggaggagaaagaagagttttgggattgatacaggataaaggtaggagaggcctgaacctttaattcttctaccttctgagattccactccactcataaactagataagctttcagtcagtgcccactcaataccacgtctttagagtctaattgtggagaatagaggaacctccatgaggaagcaggggaacatagtgtatggtagtgtagaattctagaaatcccttgtgttcatggctgttgaaacataaagtaagacagggcttggtcttgaaggaaataacggatatgcattattcttccttccctgcccatccagatggagggaccagcaagaacagagacaggaaggggaaaatggatgtgaccaactcagctgaaaagtaagggctttatcggatagggacagacgaggtaaggaaggttgtttaatgagaggccttgcttgccagcctaagcttttaaatttgatgccagtggcaacaataaagtgtatctatcactagcacattgtcaatctggactataagtctgtccacaattctgtgtgtagagattccagactggggcatagggatgaaaacctaaaggataccttcttttgggaaattctttttttctttttttttctgagatggagtcccgctctgtcgcccaggctggagtacagtggcgcgatctcggctcactacaagctctgcctcccaggttcacgccattatcctgactcagcctcccgagtagctgggattacgggcgcatgccaccacactcagctaatttttgtatttttagtagagacaaggtttcactatgttggccaggtngnncactgcanctggncctaa

SEQ ID NO: 419535 - DNA, 3494 bp, Homo sapiens
  misc_feature (3473)..(3473): n is a, c, g, or t
  misc_feature (3475)..(3476): n is a, c, g, or t
  misc_feature (3484)..(3484): n is a, c, g, or t
  misc_feature (3489)..(3489): n is a, c, g, or t
ctggaggggccagcaagtagagtgttggtggcccaagcaaaccagtgttgccaataccattgccaaaagggcctttggatcctggacaaagcttggctgccggcttcatttattcctgctgatggctgagaagcaatctggtcttgccatcccacttgcctggtcccaagtttggttccatttgttaaaaatttgttgtaaactgcatgttttataaaataaatataaatatcgtttgttatttatctcattagagaactgcttagtgtgggttctctggcttcagtcttcctctccttcctttgaaggtaaaggtccggaatccaaagttatggatatgaaagggtataattaggccgggcgcggtggctcacttctgtaatcctagcactttgggaggcagaggtgggtggaacacgaggtcaggagttaaagaccagcctgaccaagatggtgaaaccccgtctctactaaaaatacaaaaattagctgggagtggtggatggcgactgtaaccctagctgaggcagaaaattgcttcaacccgggaggcggaggttgcagtgagccgagatcacgccactgtatgccagcctgggcgatagggcgagactccgtctcaaaaaaaggggaaaaaggtataatttatgccttttctgggcaatgctgggtctttgctatagctgcccagtaccctaagtcagactgaagatgtacagtatggtttccgttaattgtgtaagccgacaaactacaggtcccaggatagcttgagacttgtagttgctcacaaagatgggtccggtgctgcggtgcttcctgggagatgtagtttcctgtgtattgaaacctggactgctcgctggccggcagcgcaccgttttgaaggtcctagcccacctgggctggctcacgcgcacgactagccgctcccatacagcacgcccggactctgtcgtcgcttaaggccactcctattctacggctgacccctggtggtcacgtggatctgttcgccacgcaagtctgggtccttcggcgattgaccggggtccttgctgttcgggagcctctcctaagctgcctgttcgcgcgagagtttggaggggcgggtttggggtcggtgtctgattggggctcgcaccgcagcacgctggagtcccgcttaggtaccagttagcgtcaggggagctgggtcaggcggtcgccgggacaccccgtgtgtggcaggcggcgaagcgctctggagaatcccggacagccctgctccctgcagccaggtgtagtttcgggagtggagcgaccccattacgctaaagatgaaaggctggggttggctggccctgcttctgggggccctgctgggaaccgcctgggctcggaggagccaggatctccactgtggagcatgcagggctctggtggatgaactagaatgggaaattgcccaggtggaccccaagaagaccattcagatgggatctttccggatcaatccagatggcagccagtcagtggtggaggtaactgttactgttcccccaaacaaagtagctcactctggctttggatgaaattcgactgcttaaaaaggaccttggtttaatagaaatgaagaaaacagactcagaaaaaagatttggctctgtctcatttggaagaagctgcaggcttattccccatgcacttgcttcctggctgcaaaccttaatactttgtttctgctgtagaatttgttagcaaacagggagtcctgatcagcacccttctccacatccacatgactggtttttaatgtagcactgtggtatacatgcaaacatccgttcaaaatctgagtcggagctaactgtaatcccagcactcttggaggccaaggcaggcagatcacttgagcacaggagttcgagaccagcctgggcaacatgagcaaaaccccatctcaaaaaacaaacaaacaaacaaaactaattaaaatcaattagggaaagctttttagaataggttgttggagctagatttggaaagaaaagtaaggatataaattactaatgtacagaggtagaagagagtgacccaaggctgaggacatttctaggtgccttatgcccgctcagaggcccacctcacagagctgctggaggagatatgtgaccggatgaaggagtatggggaacagattgatccttccacccatcgcaagaactacgtacgtgtagtgggccggaatggagaatccagtgaactggacctacaaggcatccgaatcgactcagatattagcggcaccctcaagtttgcgtgtgagagcattgtggaggaatacgaggatgaactcattgaattcttttcccgagaggctgacaatgttaaagacaaactttgcagtaagcgaacagatctttgtgaccatgccctgcacatatcgcatgatgagctatgaaccactggagcagcccacactggcttgatggatcacccccaggaggggaaaatggtggcaatgccttttatatattatgtttttactgaaattaactgaaaaaatatgaaaccaaaagtaaaaactgtgttgtcttttcatgcctggaattgcccttacattaagcttgaagataaggagttatatagacaggaaagataatggaggagaaagaagagttttgggattgatacaggataaaggtaggagaggcctgaacctttaattcttctaccttctgagattccactccactcataaactagataagctttcagtcagtgcccactcaataccacgtctttagagtctaattgtggagaatagaggaacctccatgaggaagcaggggaacatagtgtatggtagtgtagaattctagaaatcccttgtgttcatggctgttgaaacataaagtaagacagggcttggtcttgaaggaaataacggatatgcattattcttccttccctgcccatccagatggagggaccagcaagaacagagacaggaaggggaaaatggatgtgaccaactcagctgaaaagtaagggctttatcggatagggacagacgaggtaaggaaggttgtttaatgagaggccttgcttgccagcctaagcttttaaatttgatgccagtggcaacaataaagtgtatctatcactagcacattgtcaatctggactataagtctgtccacaattctgtgtgtagagattccagactggggcatagggatgaaaacctaaaggataccttcttttgggaaattctttttttctttttttttctgagatggagtcccgctctgtcgcccaggctggagtacagtggcgcgatctcggctcactacaagctctgcctcccaggttcacgccattatcctgactcagcctcccgagtagctgggattacgggcgcatgccaccacactcagctaatttttgtatttttagtagagacaaggtttcactatgttggccaggtngnncactgcanctggncctaa

SEQ ID NO: 419536 - DNA, 1903 bp, Homo sapiens
  misc_feature (1882)..(1882): n is a, c, g, or t
  misc_feature (1884)..(1885): n is a, c, g, or t
  misc_feature (1893)..(1893): n is a, c, g, or t
  misc_feature (1898)..(1898): n is a, c, g, or t
gcgaaagagtgagactccgtctcaaaaaaataaataaataaataaaataaaataaatgaaaaccacactaggccaggcacagtggctcacgtctgtaatcccagcactttgggatgccgaggcaggcagatcacctgaggtctggagtttgagaccagcccgaccaacacagagaaaccccatctctactaaaaatacaaaagttagctgggtgtggtggtgcatgcctgtagtcccagctactcaggaggctgaggcaggagaatcacttgaacccaggaggcagaggttgcaataagccgagatggcgccaatgcactccagcctgggcaacaagagcaaaaccccatctcaaaaaacaaacaaacaaacaaaactaattaaaatcaattagggaaagctttttagaataggttgttggagctagatttggaaagaaaagtaaggatataaattactaatgtacagaggtagaagagagtgacccaaggctgaggacatttctaggtgccttatgcccgctcagaggcccacctcacagagctgctggaggagatatgtgaccggatgaaggagtatggggaacagattgatccttccacccatcgcaagaactacgtacgtgtagtgggccggaatggagaatccagtgaactggacctacaaggcatccgaatcgactcagatattagcggcaccctcaagtttgcgtgtgagagcattgtggaggaatacgaggatgaactcattgaattcttttcccgagaggctgacaatgttaaagacaaactttgcagtaagcgaacagatctttgtgaccatgccctgcacatatcgcatgatgagctatgaaccactggagcagcccacactggcttgatggatcacccccaggaggggaaaatggtggcaatgccttttatatattatgtttttactgaaattaactgaaaaaatatgaaaccaaaagtaaaaactgtgttgtcttttcatgcctggaattgcccttacattaagcttgaagataaggagttatatagacaggaaagataatggaggagaaagaagagttttgggattgatacaggataaaggtaggagaggcctgaacctttaattcttctaccttctgagattccactccactcataaactagataagctttcagtcagtgcccactcaataccacgtctttagagtctaattgtggagaatagaggaacctccatgaggaagcaggggaacatagtgtatggtagtgtagaattctagaaatcccttgtgttcatggctgttgaaacataaagtaagacagggcttggtcttgaaggaaataacggatatgcattattcttccttccctgcccatccagatggagggaccagcaagaacagagacaggaaggggaaaatggatgtgaccaactcagctgaaaagtaagggctttatcggatagggacagacgaggtaaggaaggttgtttaatgagaggccttgcttgccagcctaagcttttaaatttgatgccagtggcaacaataaagtgtatctatcactagcacattgtcaatctggactataagtctgtccacaattctgtgtgtagagattccagactggggcatagggatgaaaacctaaaggataccttcttttgggaaattctttttttctttttttttctgagatggagtcccgctctgtcgcccaggctggagtacagtggcgcgatctcggctcactacaagctctgcctcccaggttcacgccattatcctgactcagcctcccgagtagctgggattacgggcgcatgccaccacactcagctaatttttgtatttttagtagagacaaggtttcactatgttggccaggtngnncactgcanctggncctaa

SEQ ID NO: 419537 - DNA, 2180 bp, Homo sapiens
  misc_feature (2159)..(2159): n is a, c, g, or t
  misc_feature (2161)..(2162): n is a, c, g, or t
  misc_feature (2170)..(2170): n is a, c, g, or t
  misc_feature (2175)..(2175): n is a, c, g, or t
agaaggatgaatggaaatcctgggttgatcccattctcctcacaccctaccccctaccctgtcccctgctctcattctctcctcttccaccagcatgcagggctctggtggatgaactagaatgggaaattgcccaggtggaccccaagaagaccattcagatgggatctttccggatcaatccagatggcagccagtcagtggtggaggtaactgttactgttcccccaaacaaagtagctcactctggctttggatgaaattcgactgcttaaaaaggaccttggtttaatagaaatgaagaaaacagactcagaaaaaagatttggctctgtctcatttggaagaagctgcaggcttattccccatgcacttgcttcctggctgcaaaccttaatactttgtttctgctgtagaatttgttagcaaacagggagtcctgatcagcacccttctccacatccacatgactggtttttaatgtagcactgtggtatacatgcaaacatccgttcaaaatctgagtcggagctaactgtaatcccagcactcttggaggccaaggcaggcagatcacttgagcacaggagttcgagaccagcctgggcaacatgagcaaaaccccatctcaaaaaacaaacaaacaaacaaaactaattaaaatcaattagggaaagctttttagaataggttgttggagctagatttggaaagaaaagtaaggatataaattactaatgtacagaggtagaagagagtgacccaaggctgaggacatttctaggtgccttatgcccgctcagaggcccacctcacagagctgctggaggagatatgtgaccggatgaaggagtatggggaacagattgatccttccacccatcgcaagaactacgtacgtgtagtgggccggaatggagaatccagtgaactggacctacaaggcatccgaatcgactcagatattagcggcaccctcaagtttgcgtgtgagagcattgtggaggaatacgaggatgaactcattgaattcttttcccgagaggctgacaatgttaaagacaaactttgcagtaagcgaacagatctttgtgaccatgccctgcacatatcgcatgatgagctatgaaccactggagcagcccacactggcttgatggatcacccccaggaggggaaaatggtggcaatgccttttatatattatgtttttactgaaattaactgaaaaaatatgaaaccaaaagtaaaaactgtgttgtcttttcatgcctggaattgcccttacattaagcttgaagataaggagttatatagacaggaaagataatggaggagaaagaagagttttgggattgatacaggataaaggtaggagaggcctgaacctttaattcttctaccttctgagattccactccactcataaactagataagctttcagtcagtgcccactcaataccacgtctttagagtctaattgtggagaatagaggaacctccatgaggaagcaggggaacatagtgtatggtagtgtagaattctagaaatcccttgtgttcatggctgttgaaacataaagtaagacagggcttggtcttgaaggaaataacggatatgcattattcttccttccctgcccatccagatggagggaccagcaagaacagagacaggaaggggaaaatggatgtgaccaactcagctgaaaagtaagggctttatcggatagggacagacgaggtaaggaaggttgtttaatgagaggccttgcttgccagcctaagcttttaaatttgatgccagtggcaacaataaagtgtatctatcactagcacattgtcaatctggactataagtctgtccacaattctgtgtgtagagattccagactggggcatagggatgaaaacctaaaggataccttcttttgggaaattctttttttctttttttttctgagatggagtcccgctctgtcgcccaggctggagtacagtggcgcgatctcggctcactacaagctctgcctcccaggttcacgccattatcctgactcagcctcccgagtagctgggattacgggcgcatgccaccacactcagctaatttttgtatttttagtagagacaaggtttcactatgttggccaggtngnncactgcanctggncctaa

SEQ ID NO: 419538 - DNA, 1878 bp, Homo sapiens
  misc_feature (1857)..(1857): n is a, c, g, or t
  misc_feature (1859)..(1860): n is a, c, g, or t
  misc_feature (1868)..(1868): n is a, c, g, or t
  misc_feature (1873)..(1873): n is a, c, g, or t
taagccagtgttaagattacagtgctagcctgggcatcatggcaaaacaccaactctacaaaaaaatgcacttgcttcctggctgcaaaccttaatactttgtttctgctgtagaatttgttagcaaacagggagtcctgatcagcacccttctccacatccacatgactggtttttaatgtagcactgtggtatacatgcaaacatccgttcaaaatctgagtcggagctaactgtaatcccagcactcttggaggccaaggcaggcagatcacttgagcacaggagttcgagaccagcctgggcaacatgagcaaaaccccatctcaaaaaacaaacaaacaaacaaaactaattaaaatcaattagggaaagctttttagaataggttgttggagctagatttggaaagaaaagtaaggatataaattactaatgtacagaggtagaagagagtgacccaaggctgaggacatttctaggtgccttatgcccgctcagaggcccacctcacagagctgctggaggagatatgtgaccggatgaaggagtatggggaacagattgatccttccacccatcgcaagaactacgtacgtgtagtgggccggaatggagaatccagtgaactggacctacaaggcatccgaatcgactcagatattagcggcaccctcaagtttgcgtgtgagagcattgtggaggaatacgaggatgaactcattgaattcttttcccgagaggctgacaatgttaaagacaaactttgcagtaagcgaacagatctttgtgaccatgccctgcacatatcgcatgatgagctatgaaccactggagcagcccacactggcttgatggatcacccccaggaggggaaaatggtggcaatgccttttatatattatgtttttactgaaattaactgaaaaaatatgaaaccaaaagtaaaaactgtgttgtcttttcatgcctggaattgcccttacattaagcttgaagataaggagttatatagacaggaaagataatggaggagaaagaagagttttgggattgatacaggataaaggtaggagaggcctgaacctttaattcttctaccttctgagattccactccactcataaactagataagctttcagtcagtgcccactcaataccacgtctttagagtctaattgtggagaatagaggaacctccatgaggaagcaggggaacatagtgtatggtagtgtagaattctagaaatcccttgtgttcatggctgttgaaacataaagtaagacagggcttggtcttgaaggaaataacggatatgcattattcttccttccctgcccatccagatggagggaccagcaagaacagagacaggaaggggaaaatggatgtgaccaactcagctgaaaagtaagggctttatcggatagggacagacgaggtaaggaaggttgtttaatgagaggccttgcttgccagcctaagcttttaaatttgatgccagtggcaacaataaagtgtatctatcactagcacattgtcaatctggactataagtctgtccacaattctgtgtgtagagattccagactggggcatagggatgaaaacctaaaggataccttcttttgggaaattctttttttctttttttttctgagatggagtcccgctctgtcgcccaggctggagtacagtggcgcgatctcggctcactacaagctctgcctcccaggttcacgccattatcctgactcagcctcccgagtagctgggattacgggcgcatgccaccacactcagctaatttttgtatttttagtagagacaaggtttcactatgttggccaggtngnncactgcanctggncctaa

SEQ ID NO: 419539 - DNA, 1462 bp, Homo sapiens
  misc_feature (1441)..(1441): n is a, c, g, or t
  misc_feature (1443)..(1444): n is a, c, g, or t
  misc_feature (1452)..(1452): n is a, c, g, or t
  misc_feature (1457)..(1457): n is a, c, g, or t
tggtgctctcgaggatcgcatgcgcgacgcttcatcaatccagatggcagcagtcagtggtggatggtgccttatgcccgctcagaggcccacctcacagagctgctggaggagatatgtgaccggatgaaggagtatggggaacagattgatccttccacccatcgcaagaactacgtacgtgtagtgggccggaatggagaatccagtgaactggacctacaaggcatccgaatcgactcagatattagcggcaccctcaagtttgcgtgtgagagcattgtggaggaatacgaggatgaactcattgaattcttttcccgagaggctgacaatgttaaagacaaactttgcagtaagcgaacagatctttgtgaccatgccctgcacatatcgcatgatgagctatgaaccactggagcagcccacactggcttgatggatcacccccaggaggggaaaatggtggcaatgccttttatatattatgtttttactgaaattaactgaaaaaatatgaaaccaaaagtaaaaactgtgttgtcttttcatgcctggaattgcccttacattaagcttgaagataaggagttatatagacaggaaagataatggaggagaaagaagagttttgggattgatacaggataaaggtaggagaggcctgaacctttaattcttctaccttctgagattccactccactcataaactagataagctttcagtcagtgcccactcaataccacgtctttagagtctaattgtggagaatagaggaacctccatgaggaagcaggggaacatagtgtatggtagtgtagaattctagaaatcccttgtgttcatggctgttgaaacataaagtaagacagggcttggtcttgaaggaaataacggatatgcattattcttccttccctgcccatccagatggagggaccagcaagaacagagacaggaaggggaaaatggatgtgaccaactcagctgaaaagtaagggctttatcggatagggacagacgaggtaaggaaggttgtttaatgagaggccttgcttgccagcctaagcttttaaatttgatgccagtggcaacaataaagtgtatctatcactagcacattgtcaatctggactataagtctgtccacaattctgtgtgtagagattccagactggggcatagggatgaaaacctaaaggataccttcttttgggaaattctttttttctttttttttctgagatggagtcccgctctgtcgcccaggctggagtacagtggcgcgatctcggctcactacaagctctgcctcccaggttcacgccattatcctgactcagcctcccgagtagctgggattacgggcgcatgccaccacactcagctaatttttgtatttttagtagagacaaggtttcactatgttggccaggtngnncactgcanctggncctaa

SEQ ID NO: 419540 - DNA, 1951 bp, Homo sapiens
ctggaggggccagcaagtagagtgttggtggcccaagcaaaccagtgttgccaataccattgccaaaagggcctttggatcctggacaaagcttggctgccggcttcatttattcctgctgatggctgagaagcaatctggtcttgccatcccacttgcctggtcccaagtttggttccatttgttaaaaatttgttgtaaactgcatgttttataaaataaatataaatatcgtttgttatttatctcattagagaactgcttagtgtgggttctctggcttcagtcttcctctccttcctttgaaggtaaaggtccggaatccaaagttatggatatgaaagggtataattaggccgggcgcggtggctcacttctgtaatcctagcactttgggaggcagaggtgggtggaacacgaggtcaggagttaaagaccagcctgaccaagatggtgaaaccccgtctctactaaaaatacaaaaattagctgggagtggtggatggcgactgtaaccctagctgaggcagaaaattgcttcaacccgggaggcggaggttgcagtgagccgagatcacgccactgtatgccagcctgggcgatagggcgagactccgtctcaaaaaaaggggaaaaaggtataatttatgccttttctgggcaatgctgggtctttgctatagctgcccagtaccctaagtcagactgaagatgtacagtatggtttccgttaattgtgtaagccgacaaactacaggtcccaggatagcttgagacttgtagttgctcacaaagatgggtccggtgctgcggtgcttcctgggagatgtagtttcctgtgtattgaaacctggactgctcgctggccggcagcgcaccgttttgaaggtcctagcccacctgggctggctcacgcgcacgactagccgctcccatacagcacgcccggactctgtcgtcgcttaaggccactcctattctacggctgacccctggtggtcacgtggatctgttcgccacgcaagtctgggtccttcggcgattgaccggggtccttgctgttcgggagcctctcctaagctgcctgttcgcgcgagagtttggaggggcgggtttggggtcggtgtctgattggggctcgcaccgcagcacgctggagtcccgcttaggtaccagttagcgtcaggggagctgggtcaggcggtcgccgggacaccccgtgtgtggcaggcggcgaagcgctctggagaatcccggacagccctgctccctgcagccaggtgtagtttcgggagccactggggccaaagtgagagtccagcggtcttccagcgcttgggccacggcggcggccctgggagcagaggtggagcgaccccattacgctaaagatgaaaggctggggttggctggccctgcttctgggggccctgctgggaaccgcctgggctcggaggagccaggatctccactgtggagcatgcagggctctggtggatgaactagaatgggaaattgcccaggtggaccccaagaagaccattcagatgggatctttccggatcaatccagatggcagccagtcagtggtggaggtaactgttactgttcccccaaacaaagtagctcactctggctttggatgaaattcgactgcttaaaaaggaccttggtttaatagaaatgaagaaaacagactcagaaaaaagatttggctctgtctcatttggaagaagctgcaggcttattccccatgcacttgcttcctggctgcaaaccttaatactttgtttctgctgtagaatttgttagcaaacagggagtcctgatcagcacccttctccacatccacatgactggtttttaatgtagcactgtggtatacatgcaaacatccgttcaaaatctgagtcggagctaagtcgacgcggccgcgaatttagtagtagta

SEQ ID NO: 419541 - DNA, 1368 bp, Homo sapiens
  misc_feature (1347)..(1347): n is a, c, g, or t
  misc_feature (1349)..(1350): n is a, c, g, or t
  misc_feature (1358)..(1358): n is a, c, g, or t
  misc_feature (1363)..(1363): n is a, c, g, or t
taggctagtacgaggctcggtggtgaatcggccgaggggagtatggggaacagattgatccttccacccatcgcaagaactacgtacgtgtagtgggccggaatggagaatccagtgaactggacctacaaggcatccgaatcgactcagatattagcggcaccctcaagtttgcgtgtgagagcattgtggaggaatacgaggatgaactcattgaattcttttcccgagaggctgacaatgttaaagacaaactttgcagtaagcgaacagatctttgtgaccatgccctgcacatatcgcatgatgagctatgaaccactggagcagcccacactggcttgatggatcacccccaggaggggaaaatggtggcaatgccttttatatattatgtttttactgaaattaactgaaaaaatatgaaaccaaaagtaaaaactgtgttgtcttttcatgcctggaattgcccttacattaagcttgaagataaggagttatatagacaggaaagataatggaggagaaagaagagttttgggattgatacaggataaaggtaggagaggcctgaacctttaattcttctaccttctgagattccactccactcataaactagataagctttcagtcagtgcccactcaataccacgtctttagagtctaattgtggagaatagaggaacctccatgaggaagcaggggaacatagtgtatggtagtgtagaattctagaaatcccttgtgttcatggctgttgaaacataaagtaagacagggcttggtcttgaaggaaataacggatatgcattattcttccttccctgcccatccagatggagggaccagcaagaacagagacaggaaggggaaaatggatgtgaccaactcagctgaaaagtaagggctttatcggatagggacagacgaggtaaggaaggttgtttaatgagaggccttgcttgccagcctaagcttttaaatttgatgccagtggcaacaataaagtgtatctatcactagcacattgtcaatctggactataagtctgtccacaattctgtgtgtagagattccagactggggcatagggatgaaaacctaaaggataccttcttttgggaaattctttttttctttttttttctgagatggagtcccgctctgtcgcccaggctggagtacagtggcgcgatctcggctcactacaagctctgcctcccaggttcacgccattatcctgactcagcctcccgagtagctgggattacgggcgcatgccaccacactcagctaatttttgtatttttagtagagacaaggtttcactatgttggccaggtngnncactgcanctggncctaa

SEQ ID NO: 419542 - DNA, 1423 bp, Homo sapiens
  misc_feature (1402)..(1402): n is a, c, g, or t
  misc_feature (1404)..(1405): n is a, c, g, or t
  misc_feature (1413)..(1413): n is a, c, g, or t
  misc_feature (1418)..(1418): n is a, c, g, or t
gctctgtggaacctgacattccctaactcacccatacacccccatcccagaaacctctggtattaggtcaagagctgtcttccatttcccttggcttagggacttggggtgttcctccacattttctgtcagctttcagaatttgtgtccccttgaccctgagatacaggtgagaggacagtggggatgttttatcatttataagcatatattctgcagaatggtggttggtgtgtgtttgtgtcagcttggtctgggaaattttcttgatactggcagatatcagtatgagaatggcatattcctttaaattgtttgccatttgcagatctttgtgaccatgccctgcacatatcgcatgatgagctatgaaccactggagcagcccacactggcttgatggatcacccccaggaggggaaaatggtggcaatgccttttatatattatgtttttactgaaattaactgaaaaaatatgaaaccaaaagtaaaaactgtgttgtcttttcatgcctggaattgcccttacattaagcttgaagataaggagttatatagacaggaaagataatggaggagaaagaagagttttgggattgatacaggataaaggtaggagaggcctgaacctttaattcttctaccttctgagattccactccactcataaactagataagctttcagtcagtgcccactcaataccacgtctttagagtctaattgtggagaatagaggaacctccatgaggaagcaggggaacatagtgtatggtagtgtagaattctagaaatcccttgtgttcatggctgttgaaacataaagtaagacagggcttggtcttgaaggaaataacggatatgcattattcttccttccctgcccatccagatggagggaccagcaagaacagagacaggaaggggaaaatggatgtgaccaactcagctgaaaagtaagggctttatcggatagggacagacgaggtaaggaaggttgtttaatgagaggccttgcttgccagcctaagcttttaaatttgatgccagtggcaacaataaagtgtatctatcactagcacattgtcaatctggactataagtctgtccacaattctgtgtgtagagattccagactggggcatagggatgaaaacctaaaggataccttcttttgggaaattctttttttctttttttttctgagatggagtcccgctctgtcgcccaggctggagtacagtggcgcgatctcggctcactacaagctctgcctcccaggttcacgccattatcctgactcagcctcccgagtagctgggattacgggcgcatgccaccacactcagctaatttttgtatttttagtagagacaaggtttcactatgttggccaggtngnncactgcanctggncctaa

SEQ ID NO: 419543 - DNA, 1238 bp, Homo sapiens
  misc_feature (33)..(33): n is a, c, g, or t
  misc_feature (1217)..(1217): n is a, c, g, or t
  misc_feature (1219)..(1220): n is a, c, g, or t
  misc_feature (1228)..(1228): n is a, c, g, or t
  misc_feature (1233)..(1233): n is a, c, g, or t
gcggcccctactactactaaattcgcggccgtncgacaagtttgcgtgtgagagcattgtggaggaatacgaggatgaactcattgaattcttttcccgagaggctgacaatgttaaagacaaactttgcagtaagcgaacagatctttgtgaccatgccctgcacatatcgcatgatgagctatgaaccactggagcagcccacactggcttgatggatcacccccaggaggggaaaatggtggcaatgccttttatatattatgtttttactgaaattaactgaaaaaatatgaaaccaaaagtaaaaactgtgttgtcttttcatgcctggaattgcccttacattaagcttgaagataaggagttatatagacaggaaagataatggaggagaaagaagagttttgggattgatacaggataaaggtaggagaggcctgaacctttaattcttctaccttctgagattccactccactcataaactagataagctttcagtcagtgcccactcaataccacgtctttagagtctaattgtggagaatagaggaacctccatgaggaagcaggggaacatagtgtatggtagtgtagaattctagaaatcccttgtgttcatggctgttgaaacataaagtaagacagggcttggtcttgaaggaaataacggatatgcattattcttccttccctgcccatccagatggagggaccagcaagaacagagacaggaaggggaaaatggatgtgaccaactcagctgaaaagtaagggctttatcggatagggacagacgaggtaaggaaggttgtttaatgagaggccttgcttgccagcctaagcttttaaatttgatgccagtggcaacaataaagtgtatctatcactagcacattgtcaatctggactataagtctgtccacaattctgtgtgtagagattccagactggggcatagggatgaaaacctaaaggataccttcttttgggaaattctttttttctttttttttctgagatggagtcccgctctgtcgcccaggctggagtacagtggcgcgatctcggctcactacaagctctgcctcccaggttcacgccattatcctgactcagcctcccgagtagctgggattacgggcgcatgccaccacactcagctaatttttgtatttttagtagagacaaggtttcactatgttggccaggtngnncactgcanctggncctaa

SEQ ID NO: 419544 - DNA, 1204 bp, Homo sapiens
  misc_feature (20)..(20): n is a, c, g, or t
  misc_feature (22)..(22): n is a, c, g, or t
  misc_feature (60)..(60): n is a, c, g, or t
  misc_feature (91)..(91): n is a, c, g, or t
  misc_feature (1183)..(1183): n is a, c, g, or t
  misc_feature (1185)..(1186): n is a, c, g, or t
  misc_feature (1194)..(1194): n is a, c, g, or t
  misc_feature (1199)..(1199): n is a, c, g, or t
gaatgaacctccattgagantnttcttttttttcccccccgaaagaaagggggccttggnacccaaatttgtttaaaaaaaagaccaaacntttgcagtaagcgaacagatctttgtgaccatgccctgcacatatcgcatgatgagctatgaaccactggagcagcccacactggcttgatggatcacccccaggaggggaaaatggtggcaatgccttttatatattatgtttttactgaaattaactgaaaaaatatgaaaccaaaagtaaaaactgtgttgtcttttcatgcctggaattgcccttacattaagcttgaagataaggagttatatagacaggaaagataatggaggagaaagaagagttttgggattgatacaggataaaggtaggagaggcctgaacctttaattcttctaccttctgagattccactccactcataaactagataagctttcagtcagtgcccactcaataccacgtctttagagtctaattgtggagaatagaggaacctccatgaggaagcaggggaacatagtgtatggtagtgtagaattctagaaatcccttgtgttcatggctgttgaaacataaagtaagacagggcttggtcttgaaggaaataacggatatgcattattcttccttccctgcccatccagatggagggaccagcaagaacagagacaggaaggggaaaatggatgtgaccaactcagctgaaaagtaagggctttatcggatagggacagacgaggtaaggaaggttgtttaatgagaggccttgcttgccagcctaagcttttaaatttgatgccagtggcaacaataaagtgtatctatcactagcacattgtcaatctggactataagtctgtccacaattctgtgtgtagagattccagactggggcatagggatgaaaacctaaaggataccttcttttgggaaattctttttttctttttttttctgagatggagtcccgctctgtcgcccaggctggagtacagtggcgcgatctcggctcactacaagctctgcctcccaggttcacgccattatcctgactcagcctcccgagtagctgggattacgggcgcatgccaccacactcagctaatttttgtatttttagtagagacaaggtttcactatgttggccaggtngnncactgcanctggncctaa

SEQ ID NO: 419545 - DNA, 1094 bp, Homo sapiens
  misc_feature (1073)..(1073): n is a, c, g, or t
  misc_feature (1075)..(1076): n is a, c, g, or t
  misc_feature (1084)..(1084): n is a, c, g, or t
  misc_feature (1089)..(1089): n is a, c, g, or t
cctgaggatcccccacactggacactggctctctccactatgaaccactggagcagcccacactggcttgatggatcacccccaggaggggaaaatggtggcaatgccttttatatattatgtttttactgaaattaactgaaaaaatatgaaaccaaaagtaaaaactgtgttgtcttttcatgcctggaattgcccttacattaagcttgaagataaggagttatatagacaggaaagataatggaggagaaagaagagttttgggattgatacaggataaaggtaggagaggcctgaacctttaattcttctaccttctgagattccactccactcataaactagataagctttcagtcagtgcccactcaataccacgtctttagagtctaattgtggagaatagaggaacctccatgaggaagcaggggaacatagtgtatggtagtgtagaattctagaaatcccttgtgttcatggctgttgaaacataaagtaagacagggcttggtcttgaaggaaataacggatatgcattattcttccttccctgcccatccagatggagggaccagcaagaacagagacaggaaggggaaaatggatgtgaccaactcagctgaaaagtaagggctttatcggatagggacagacgaggtaaggaaggttgtttaatgagaggccttgcttgccagcctaagcttttaaatttgatgccagtggcaacaataaagtgtatctatcactagcacattgtcaatctggactataagtctgtccacaattctgtgtgtagagattccagactggggcatagggatgaaaacctaaaggataccttcttttgggaaattctttttttctttttttttctgagatggagtcccgctctgtcgcccaggctggagtacagtggcgcgatctcggctcactacaagctctgcctcccaggttcacgccattatcctgactcagcctcccgagtagctgggattacgggcgcatgccaccacactcagctaatttttgtatttttagtagagacaaggtttcactatgttggccaggtngnncactgcanctggncctaa

SEQ ID NO: 419546 - DNA, 1096 bp, Homo sapiens
  misc_feature (1075)..(1075): n is a, c, g, or t
  misc_feature (1077)..(1078): n is a, c, g, or t
  misc_feature (1086)..(1086): n is a, c, g, or t
  misc_feature (1091)..(1091): n is a, c, g, or t
ctactgctcgaattcaagcttctaacgatgtacggggacctatgaaccactggagcagcccacactggcttgatggatcacccccaggaggggaaaatggtggcaatgccttttatatattatgtttttactgaaattaactgaaaaaatatgaaaccaaaagtaaaaactgtgttgtcttttcatgcctggaattgcccttacattaagcttgaagataaggagttatatagacaggaaagataatggaggagaaagaagagttttgggattgatacaggataaaggtaggagaggcctgaacctttaattcttctaccttctgagattccactccactcataaactagataagctttcagtcagtgcccactcaataccacgtctttagagtctaattgtggagaatagaggaacctccatgaggaagcaggggaacatagtgtatggtagtgtagaattctagaaatcccttgtgttcatggctgttgaaacataaagtaagacagggcttggtcttgaaggaaataacggatatgcattattcttccttccctgcccatccagatggagggaccagcaagaacagagacaggaaggggaaaatggatgtgaccaactcagctgaaaagtaagggctttatcggatagggacagacgaggtaaggaaggttgtttaatgagaggccttgcttgccagcctaagcttttaaatttgatgccagtggcaacaataaagtgtatctatcactagcacattgtcaatctggactataagtctgtccacaattctgtgtgtagagattccagactggggcatagggatgaaaacctaaaggataccttcttttgggaaattctttttttctttttttttctgagatggagtcccgctctgtcgcccaggctggagtacagtggcgcgatctcggctcactacaagctctgcctcccaggttcacgccattatcctgactcagcctcccgagtagctgggattacgggcgcatgccaccacactcagctaatttttgtatttttagtagagacaaggtttcactatgttggccaggtngnncactgcanctggncctaa

SEQ ID NO: 419547 - DNA, 873 bp, Homo sapiens
  misc_feature (852)..(852): n is a, c, g, or t
  misc_feature (854)..(855): n is a, c, g, or t
  misc_feature (863)..(863): n is a, c, g, or t
  misc_feature (868)..(868): n is a, c, g, or t
ggtaccttatattcaagcttaatgtaagggcattccaggcatgaaaagacacacagtttgtacttttggtttggcctgaacctttaattcttctaccttctgagattccactccactcataaactagataagctttcagtcagtgcccactcaataccacgtctttagagtctaattgtggagaatagaggaacctccatgaggaagcaggggaacatagtgtatggtagtgtagaattctagaaatcccttgtgttcatggctgttgaaacataaagtaagacagggcttggtcttgaaggaaataacggatatgcattattcttccttccctgcccatccagatggagggaccagcaagaacagagacaggaaggggaaaatggatgtgaccaactcagctgaaaagtaagggctttatcggatagggacagacgaggtaaggaaggttgtttaatgagaggccttgcttgccagcctaagcttttaaatttgatgccagtggcaacaataaagtgtatctatcactagcacattgtcaatctggactataagtctgtccacaattctgtgtgtagagattccagactggggcatagggatgaaaacctaaaggataccttcttttgggaaattctttttttctttttttttctgagatggagtcccgctctgtcgcccaggctggagtacagtggcgcgatctcggctcactacaagctctgcctcccaggttcacgccattatcctgactcagcctcccgagtagctgggattacgggcgcatgccaccacactcagctaatttttgtatttttagtagagacaaggtttcactatgttggccaggtngnncactgcanctggncctaa

SEQ ID NO: 419548 - DNA, 1839 bp, Homo sapiens
  misc_feature (1818)..(1818): n is a, c, g, or t
  misc_feature (1820)..(1821): n is a, c, g, or t
  misc_feature (1829)..(1829): n is a, c, g, or t
  misc_feature (1834)..(1834): n is a, c, g, or t
gggggaggaggaactaataggcaggtcgaggctgggtgtgtcaggcggtcgccgggacaccccgtgtgtggcaggcggcgaagcgctctggagaatcccggacagccctgctccctgcagccaggtgtagtttcgggagccactggggccaaagtgagagtccagcggtcttccagcgcttgggccacggcggcggccctgggagcagaggtggagcgaccccattacgctaaagatgaaaggctggggttggctggccctgcttctgggggccctgctgggaaccgcctgggctcggaggagccaggatctccactgtggagcatgcagggctctggtggatgaactagaatgggaaattgcccaggtggaccccaagaagaccattcagatgggatctttccggatcaatccagatggcagccagtcagtggtggaggtaagtgccttatgcccgctcagaggcccacctcacagagctgctggaggagatatgtgaccggatgaaggagtatggggaacagattgatccttccacccatcgcaagaactacgtacgtgtagtgggccggaatggagaatccagtgaactggacctacaaggcatccgaatcgactcagatattagcggcaccctcaagtttgcgtgtgagagcattgtggaggaatacgaggatgaactcattgaattcttttcccgagaggctgacaatgttaaagacaaactttgcagtaagcgaacagatctttgtgaccatgccctgcacatatcgcatgatgagctatgaaccactggagcagcccacactggcttgatggatcacccccaggaggggaaaatggtggcaatgccttttatatattatgtttttactgaaattaactgaaaaaatatgaaaccaaaagtaaaaactgtgttgtcttttcatgcctggaattgcccttacattaagcttgaagataaggagttatatagacaggaaagataatggaggagaaagaagagttttgggattgatacaggataaaggtaggagaggcctgaacctttaattcttctaccttctgagattccactccactcataaactagataagctttcagtcagtgcccactcaataccacgtctttagagtctaattgtggagaatagaggaacctccatgaggaagcaggggaacatagtgtatggtagtgtagaattctagaaatcccttgtgttcatggctgttgaaacataaagtaagacagggcttggtcttgaaggaaataacggatatgcattattcttccttccctgcccatccagatggagggaccagcaagaacagagacaggaaggggaaaatggatgtgaccaactcagctgaaaagtaagggctttatcggatagggacagacgaggtaaggaaggttgtttaatgagaggccttgcttgccagcctaagcttttaaatttgatgccagtggcaacaataaagtgtatctatcactagcacattgtcaatctggactataagtctgtccacaattctgtgtgtagagattccagactggggcatagggatgaaaacctaaaggataccttcttttgggaaattctttttttctttttttttctgagatggagtcccgctctgtcgcccaggctggagtacagtggcgcgatctcggctcactacaagctctgcctcccaggttcacgccattatcctgactcagcctcccgagtagctgggattacgggcgcatgccaccacactcagctaatttttgtatttttagtagagacaaggtttcactatgttggccaggtngnncactgcanctggncctaa

SEQ ID NO: 419549 - DNA, 3566 bp, Homo sapiens
  misc_feature (3545)..(3545): n is a, c, g, or t
  misc_feature (3547)..(3548): n is a, c, g, or t
  misc_feature (3556)..(3556): n is a, c, g, or t
  misc_feature (3561)..(3561): n is a, c, g, or t
ctggaggggccagcaagtagagtgttggtggcccaagcaaaccagtgttgccaataccattgccaaaagggcctttggatcctggacaaagcttggctgccggcttcatttattcctgctgatggctgagaagcaatctggtcttgccatcccacttgcctggtcccaagtttggttccatttgttaaaaatttgttgtaaactgcatgttttataaaataaatataaatatcgtttgttatttatctcattagagaactgcttagtgtgggttctctggcttcagtcttcctctccttcctttgaaggtaaaggtccggaatccaaagttatggatatgaaagggtataattaggccgggcgcggtggctcacttctgtaatcctagcactttgggaggcagaggtgggtggaacacgaggtcaggagttaaagaccagcctgaccaagatggtgaaaccccgtctctactaaaaatacaaaaattagctgggagtggtggatggcgactgtaaccctagctgaggcagaaaattgcttcaacccgggaggcggaggttgcagtgagccgagatcacgccactgtatgccagcctgggcgatagggcgagactccgtctcaaaaaaaggggaaaaaggtataatttatgccttttctgggcaatgctgggtctttgctatagctgcccagtaccctaagtcagactgaagatgtacagtatggtttccgttaattgtgtaagccgacaaactacaggtcccaggatagcttgagacttgtagttgctcacaaagatgggtccggtgctgcggtgcttcctgggagatgtagtttcctgtgtattgaaacctggactgctcgctggccggcagcgcaccgttttgaaggtcctagcccacctgggctggctcacgcgcacgactagccgctcccatacagcacgcccggactctgtcgtcgcttaaggccactcctattctacggctgacccctggtggtcacgtggatctgttcgccacgcaagtctgggtccttcggcgattgaccggggtccttgctgttcgggagcctctcctaagctgcctgttcgcgcgagagtttggaggggcgggtttggggtcggtgtctgattggggctcgcaccgcagcacgctggagtcccgcttaggtaccagttagcgtcaggggagctgggtcaggcggtcgccgggacaccccgtgtgtggcaggcggcgaagcgctctggagaatcccggacagccctgctccctgcagccaggtgtagtttcgggagccactggggccaaagtgagagtccagcggtcttccagcgcttgggccacggcggcggccctgggagcagaggtggagcgaccccattacgctaaagatgaaaggctggggttggctggccctgcttctgggggccctgctgggaaccgcctgggctcggaggagccaggatctccactgtggagcatgcagggctctggtggatgaactagaatgggaaattgcccaggtggaccccaagaagaccattcagatgggatctttccggatcaatccagatggcagccagtcagtggtggaggtaactgttactgttcccccaaacaaagtagctcactctggctttggatgaaattcgactgcttaaaaaggaccttggtttaatagaaatgaagaaaacagactcagaaaaaagatttggctctgtctcatttggaagaagctgcaggcttattccccatgcacttgcttcctggctgcaaaccttaatactttgtttctgctgtagaatttgttagcaaacagggagtcctgatcagcacccttctccacatccacatgactggtttttaatgtagcactgtggtatacatgcaaacatccgttcaaaatctgagtcggagctaactgtaatcccagcactcttggaggccaaggcaggcagatcacttgagcacaggagttcgagaccagcctgggcaacatgagcaaaaccccatctcaaaaaacaaacaaacaaacaaaactaattaaaatcaattagggaaagctttttagaataggttgttggagctagatttggaaagaaaagtaaggatataaattactaatgtacagaggtagaagagagtgacccaaggctgaggacatttctaggtgccttatgcccgctcagaggcccacctcacagagctgctggaggagatatgtgaccggatgaaggagtatggggaacagattgatccttccacccatcgcaagaactacgtacgtgtagtgggccggaatggagaatccagtgaactggacctacaaggcatccgaatcgactcagatattagcggcaccctcaagtttgcgtgtgagagcattgtggaggaatacgaggatgaactcattgaattcttttcccgagaggctgacaatgttaaagacaaactttgcagtaagcgaacagatctttgtgaccatgccctgcacatatcgcatgatgagctatgaaccactggagcagcccacactggcttgatggatcacccccaggaggggaaaatggtggcaatgccttttatatattatgtttttactgaaattaactgaaaaaatatgaaaccaaaagtaaaaactgtgttgtcttttcatgcctggaattgcccttacattaagcttgaagataaggagttatatagacaggaaagataatggaggagaaagaagagttttgggattgatacaggataaaggtaggagaggcctgaacctttaattcttctaccttctgagattccactccactcataaactagataagctttcagtcagtgcccactcaataccacgtctttagagtctaattgtggagaatagaggaacctccatgaggaagcaggggaacatagtgtatggtagtgtagaattctagaaatcccttgtgttcatggctgttgaaacataaagtaagacagggcttggtcttgaaggaaataacggatatgcattattcttccttccctgcccatccagatggagggaccagcaagaacagagacaggaaggggaaaatggatgtgaccaactcagctgaaaagtaagggctttatcggatagggacagacgaggtaaggaaggttgtttaatgagaggccttgcttgccagcctaagcttttaaatttgatgccagtggcaacaataaagtgtatctatcactagcacattgtcaatctggactataagtctgtccacaattctgtgtgtagagattccagactggggcatagggatgaaaacctaaaggataccttcttttgggaaattctttttttctttttttttctgagatggagtcccgctctgtcgcccaggctggagtacagtggcgcgatctcggctcactacaagctctgcctcccaggttcacgccattatcctgactcagcctcccgagtagctgggattacgggcgcatgccaccacactcagctaatttttgtatttttagtagagacaaggtttcactatgttggccaggtngnncactgcanctggncctaa

SEQ ID NO: 419550 - DNA, 2091 bp, Homo sapiens
ctggaggggccagcaagtagagtgttggtggcccaagcaaaccagtgttgccaataccattgccaaaagggcctttggatcctggacaaagcttggctgccggcttcatttattcctgctgatggctgagaagcaatctggtcttgccatcccacttgcctggtcccaagtttggttccatttgttaaaaatttgttgtaaactgcatgttttataaaataaatataaatatcgtttgttatttatctcattagagaactgcttagtgtgggttctctggcttcagtcttcctctccttcctttgaaggtaaaggtccggaatccaaagttatggatatgaaagggtataattaggccgggcgcggtggctcacttctgtaatcctagcactttgggaggcagaggtgggtggaacacgaggtcaggagttaaagaccagcctgaccaagatggtgaaaccccgtctctactaaaaatacaaaaattagctgggagtggtggatggcgactgtaaccctagctgaggcagaaaattgcttcaacccgggaggcggaggttgcagtgagccgagatcacgccactgtatgccagcctgggcgatagggcgagactccgtctcaaaaaaaggggaaaaaggtataatttatgccttttctgggcaatgctgggtctttgctatagctgcccagtaccctaagtcagactgaagatgtacagtatggtttccgttaattgtgtaagccgacaaactacaggtcccaggatagcttgagacttgtagttgctcacaaagatgggtccggtgctgcggtgcttcctgggagatgtagtttcctgtgtattgaaacctggactgctcgctggccggcagcgcaccgttttgaaggtcctagcccacctgggctggctcacgcgcacgactagccgctcccatacagcacgcccggactctgtcgtcgcttaaggccactcctattctacggctgacccctggtggtcacgtggatctgttcgccacgcaagtctgggtccttcggcgattgaccggggtccttgctgttcgggagcctctcctaagctgcctgttcgcgcgagagtttggaggggcgggtttggggtcggtgtctgattggggctcgcaccgcagcacgctggagtcccgcttaggtaccagttagcgtcaggggagctgggtcaggcggtcgccgggacaccccgtgtgtggcaggcggcgaagcgctctggagaatcccggacagccctgctccctgcagccaggtgtagtttcgggagccactggggccaaagtgagagtccagcggtcttccagcgcttgggccacggcggcggccctgggagcagaggtggagcgaccccattacgctaaagatgaaaggctggggttggctggccctgcttctgggggccctgctgggaaccgcctgggctcggaggagccaggatctccactgtggagcatgcagggctctggtggatgaactagaatgggaaattgcccaggtggaccccaagaagaccattcagatgggatctttccggatcaatccagatggcagccagtcagtggtggaggtaagtgccttatgcccgctcagaggcccacctcacagagctgctggaggagatatgtgaccggatgaaggagtatggggaacagattgatccttccacccatcgcaagaactacgtacgtgtagtgggccggaatggagaatccagtgaactggacctacaaggcatccgaatcgactcagatattagcggcaccctcaagtttgcgtgtgagagcattgtggaggaatacgaggatgaactcattgaattcttttcccgagaggctgacaatgttaaagacaaactttgcagtaagcgaacagatctttgtgaccatgccctgcacatatcgcatgatgagctatgaaccactggagcagcccacactggcttgatggatcacccccaggagggggatggacacacgaagggggatggacacacgaagggggatggacacacgaagggggatggacacgcgaagggggatggacacacgaagggggatgaacac

SEQ ID NO: 419551 - DNA, 3722 bp, Homo sapiens
  misc_feature (3701)..(3701): n is a, c, g, or t
  misc_feature (3703)..(3704): n is a, c, g, or t
  misc_feature (3712)..(3712): n is a, c, g, or t
  misc_feature (3717)..(3717): n is a, c, g, or t
ctggaggggccagcaagtagagtgttggtggcccaagcaaaccagtgttgccaataccattgccaaaagggcctttggatcctggacaaagcttggctgccggcttcatttattcctgctgatggctgagaagcaatctggtcttgccatcccacttgcctggtcccaagtttggttccatttgttaaaaatttgttgtaaactgcatgttttataaaataaatataaatatcgtttgttatttatctcattagagaactgcttagtgtgggttctctggcttcagtcttcctctccttcctttgaaggtaaaggtccggaatccaaagttatggatatgaaagggtataattaggccgggcgcggtggctcacttctgtaatcctagcactttgggaggcagaggtgggtggaacacgaggtcaggagttaaagaccagcctgaccaagatggtgaaaccccgtctctactaaaaatacaaaaattagctgggagtggtggatggcgactgtaaccctagctgaggcagaaaattgcttcaacccgggaggcggaggttgcagtgagccgagatcacgccactgtatgccagcctgggcgatagggcgagactccgtctcaaaaaaaggggaaaaaggtataatttatgccttttctgggcaatgctgggtctttgctatagctgcccagtaccctaagtcagactgaagatgtacagtatggtttccgttaattgtgtaagccgacaaactacaggtcccaggatagcttgagacttgtagttgctcacaaagatgggtccggtgctgcggtgcttcctgggagatgtagtttcctgtgtattgaaacctggactgctcgctggccggcagcgcaccgttttgaaggtcctagcccacctgggctggctcacgcgcacgactagccgctcccatacagcacgcccggactctgtcgtcgcttaaggccactcctattctacggctgacccctggtggtcacgtggatctgttcgccacgcaagtctgggtccttcggcgattgaccggggtccttgctgttcgggagcctctcctaagctgcctgttcgcgcgagagtttggaggggcgggtttggggtcggtgtctgattggggctcgcaccgcagcacgctggagtcccgcttaggtaccagttagcgtcaggggagctgggtcaggcggtcgccgggacaccccgtgtgtggcaggcggcgaagcgctctggagaatcccggacagccctgctccctgcagccaggtgtagtttcgggagccactggggccaaagtgagagtccagcggtcttccagcgcttgggccacggcggcggccctgggagcagaggtggagcgaccccattacgctaaagatgaaaggctggggttggctggccctgcttctgggggccctgctgggaaccgcctgggctcggaggagccaggatctccactgtggagcatgcagggctctggtggatgaactagaatgggaaattgcccaggtggaccccaagaagaccattcagatgggatctttccggatcaatccagatggcagccagtcagtggtggaggtaactgttactgttcccccaaacaaagtagctcactctggctttggatgaaattcgactgcttaaaaaggaccttggtttaatagaaatgaagaaaacagactcagaaaaaagatttggctctgtctcatttggaagaagctgcaggcttattccccatgcacttgcttcctggctgcaaaccttaatactttgtttctgctgtagaatttgttagcaaacagggagtcctgatcagcacccttctccacatccacatgactggtttttaatgtagcactgtggtatacatgcaaacatccgttcaaaatctgagtcggagctaactgtaatcccagcactcttggaggccaaggcaggcagatcacttgagcacaggagttcgagaccagcctgggcaacatgagcaaaaccccatctcaaaaaacaaacaaacaaacaaaactaattaaaatcaattagggaaagctttttagaataggttgttggagctagatttggaaagaaaagtaaggatataaattactaatgtacagaggtagaagagagtgacccaaggctgaggacatttctaggtgccttatgcccgctcagaggcccacctcacagagctgctggaggagatatgtgaccggatgaaggagtatggggaacagattgatccttccacccatcgcaagaactacgtacgtgtagtgggccggaatggagaatccagtgaactggacctacaaggcatccgaatcgactcagatattagcggcaccctcaagtttgcggtgagctatgggaatcggtagctggttcttggacattaaggggttgttggagaaccaattagaaagttaggctgatatccttgtcctcctctttggaagtgaaggcaagaggcctcttattgccctgtgtcacccatttctcccttgggttggcagtgtgagagcattgtggaggaatacgaggatgaactcattgaattcttttcccgagaggctgacaatgttaaagacaaactttgcagtaagcgaacagatctttgtgaccatgccctgcacatatcgcatgatgagctatgaaccactggagcagcccacactggcttgatggatcacccccaggaggggaaaatggtggcaatgccttttatatattatgtttttactgaaattaactgaaaaaatatgaaaccaaaagtaaaaactgtgttgtcttttcatgcctggaattgcccttacattaagcttgaagataaggagttatatagacaggaaagataatggaggagaaagaagagttttgggattgatacaggataaaggtaggagaggcctgaacctttaattcttctaccttctgagattccactccactcataaactagataagctttcagtcagtgcccactcaataccacgtctttagagtctaattgtggagaatagaggaacctccatgaggaagcaggggaacatagtgtatggtagtgtagaattctagaaatcccttgtgttcatggctgttgaaacataaagtaagacagggcttggtcttgaaggaaataacggatatgcattattcttccttccctgcccatccagatggagggaccagcaagaacagagacaggaaggggaaaatggatgtgaccaactcagctgaaaagtaagggctttatcggatagggacagacgaggtaaggaaggttgtttaatgagaggccttgcttgccagcctaagcttttaaatttgatgccagtggcaacaataaagtgtatctatcactagcacattgtcaatctggactataagtctgtccacaattctgtgtgtagagattccagactggggcatagggatgaaaacctaaaggataccttcttttgggaaattctttttttctttttttttctgagatggagtcccgctctgtcgcccaggctggagtacagtggcgcgatctcggctcactacaagctctgcctcccaggttcacgccattatcctgactcagcctcccgagtagctgggattacgggcgcatgccaccacactcagctaatttttgtatttttagtagagacaaggtttcactatgttggccaggtngnncactgcanctggncctaa

SEQ ID NO: 419552 - DNA, 1421 bp, Homo sapiens
  misc_feature (1400)..(1400): n is a, c, g, or t
  misc_feature (1402)..(1403): n is a, c, g, or t
  misc_feature (1411)..(1411): n is a, c, g, or t
  misc_feature (1416)..(1416): n is a, c, g, or t
ggcggccactctttcatccggtcacatatctcctccagcagctctgtgagggcctctgagcgggcataaggagatatgtgaccggatgaaggagtatggggaacagattgatccttccacccatcgcaagaactacgtacgtgtagtgggccggaatggagaatccagtgaactggacctacaaggcatccgaatcgactcagatattagcggcaccctcaagtttgcgtgtgagagcattgtggaggaatacgaggatgaactcattgaattcttttcccgagaggctgacaatgttaaagacaaactttgcagtaagcgaacagatctttgtgaccatgccctgcacatatcgcatgatgagctatgaaccactggagcagcccacactggcttgatggatcacccccaggaggggaaaatggtggcaatgccttttatatattatgtttttactgaaattaactgaaaaaatatgaaaccaaaagtaaaaactgtgttgtcttttcatgcctggaattgcccttacattaagcttgaagataaggagttatatagacaggaaagataatggaggagaaagaagagttttgggattgatacaggataaaggtaggagaggcctgaacctttaattcttctaccttctgagattccactccactcataaactagataagctttcagtcagtgcccactcaataccacgtctttagagtctaattgtggagaatagaggaacctccatgaggaagcaggggaacatagtgtatggtagtgtagaattctagaaatcccttgtgttcatggctgttgaaacataaagtaagacagggcttggtcttgaaggaaataacggatatgcattattcttccttccctgcccatccagatggagggaccagcaagaacagagacaggaaggggaaaatggatgtgaccaactcagctgaaaagtaagggctttatcggatagggacagacgaggtaaggaaggttgtttaatgagaggccttgcttgccagcctaagcttttaaatttgatgccagtggcaacaataaagtgtatctatcactagcacattgtcaatctggactataagtctgtccacaattctgtgtgtagagattccagactggggcatagggatgaaaacctaaaggataccttcttttgggaaattctttttttctttttttttctgagatggagtcccgctctgtcgcccaggctggagtacagtggcgcgatctcggctcactacaagctctgcctcccaggttcacgccattatcctgactcagcctcccgagtagctgggattacgggcgcatgccaccacactcagctaatttttgtatttttagtagagacaaggtttcactatgttggccaggtngnncactgcanctggncctaa

SEQ ID NO: 419553 - DNA, 586 bp, Homo sapiens
aagagtggtatcaacgcagacttgccattacggccggtgggaaccgcctgggctcggaggagccaggatctccactgtggagcatgcagggctctggtggatgaactagaatgggaaattgcccaggtggaccccaagaagaccattcagatgggatctttccggatcaatccagatggcagccagtcagtggtggaggtaaatgaggtgccgggcacggtggttcatgcctgtagtcccagcactttgggaggctgaggcgggtggattacctgaagttgggagtttgagaccagcctgaccaacatggagaaaccccgtctctactaaaaatacaaaattagctgggcgtggtggcacatgcctgtaatcccaactactcgggaagctgaggcaggagaatcacttgaacccgggaggtggagcttgcggtgagccgagatcgcgccattgcactccagcctgggcaacaagagtgaaactccatctcaaaaaaaatatacgacaacacacaggcattgttccatgcggtacacctcaacctcctttttcttggaaccaaaaaaaacagaaacctctccggggt

SEQ ID NO: 419554 - DNA, 2995 bp, Homo sapiens
  misc_feature (2974)..(2974): n is a, c, g, or t
  misc_feature (2976)..(2977): n is a, c, g, or t
  misc_feature (2985)..(2985): n is a, c, g, or t
  misc_feature (2990)..(2990): n is a, c, g, or t
ctggaggggccagcaagtagagtgttggtggcccaagcaaaccagtgttgccaataccattgccaaaagggcctttggatcctggacaaagcttggctgccggcttcatttattcctgctgatggctgagaagcaatctggtcttgccatcccacttgcctggtcccaagtttggttccatttgttaaaaatttgttgtaaactgcatgttttataaaataaatataaatatcgtttgttatttatctcattagagaactgcttagtgtgggttctctggcttcagtcttcctctccttcctttgaaggtaaaggtccggaatccaaagttatggatatgaaagggtataattaggccgggcgcggtggctcacttctgtaatcctagcactttgggaggcagaggtgggtggaacacgaggtcaggagttaaagaccagcctgaccaagatggtgaaaccccgtctctactaaaaatacaaaaattagctgggagtggtggatggcgactgtaaccctagctgaggcagaaaattgcttcaacccgggaggcggaggttgcagtgagccgagatcacgccactgtatgccagcctgggcgatagggcgagactccgtctcaaaaaaaggggaaaaaggtataatttatgccttttctgggcaatgctgggtctttgctatagctgcccagtaccctaagtcagactgaagatgtacagtatggtttccgttaattgtgtaagccgacaaactacaggtcccaggatagcttgagacttgtagttgctcacaaagatgggtccggtgctgcggtgcttcctgggagatgtagtttcctgtgtattgaaacctggactgctcgctggccggcagcgcaccgttttgaaggtcctagcccacctgggctggctcacgcgcacgactagccgctcccatacagcacgcccggactctgtcgtcgcttaaggccactcctattctacggctgacccctggtggtcacgtggatctgttcgccacgcaagtctgggtccttcggcgattgaccggggtccttgctgttcgggagcctctcctaagctgcctgttcgcgcgagagtttggaggggcgggtttggggtcggtgtctgattggggctcgcaccgcagcacgctggagtcccgcttaggtaccagttagcgtcaggggagctgggtcaggcggtcgccgggacaccccgtgtgtggcaggcggcgaagcgctctggagaatcccggacagccctgctccctgcagccaggtgtagtttcgggagccactggggccaaagtgagagtccagcggtcttccagcgcttgggccacggcggcggccctgggagcagaggtggagcgaccccattacgctaaagatgaaaggctggggttggctggccctgcttctgggggccctgctgggaaccgcctgggctcggaggagccaggatctccactgtggagcatgcagggctctggtggatgaactagaatgggaaattgcccaggtggaccccaagaagaccattcagatgggatctttccggatcaatccagatggcagccagtcagtggtggaggtaagtgccttatgcccgctcagaggcccacctcacagagctgctggaggagatatgtgaccggatgaaggagtatggggaacagattgatccttccacccatcgcaagaactacgtacgtgtagtgggccggaatggagaatccagtgaactggacctacaaggcatccgaatcgactcagatattagcggcaccctcaagtttgcgtgtgagagcattgtggaggaatacgaggatgaactcattgaattcttttcccgagaggctgacaatgttaaagacaaactttgcagtaagcgaacagatctttgtgaccatgccctgcacatatcgcatgatgagctatgaaccactggagcagcccacactggcttgatggatcacccccaggaggggaaaatggtggcaatgccttttatatattatgtttttactgaaattaactgaaaaaatatgaaaccaaaagtaaaaactgtgttgtcttttcatgcctggaattgcccttacattaagcttgaagataaggagttatatagacaggaaagataatggaggagaaagaagagttttgggattgatacaggataaaggtaggagaggcctgaacctttaattcttctaccttctgagattccactccactcataaactagataagctttcagtcagtgcccactcaataccacgtctttagagtctaattgtggagaatagaggaacctccatgaggaagcaggggaacatagtgtatggtagtgtagaattctagaaatcccttgtgttcatggctgttgaaacataaagtaagacagggcttggtcttgaaggaaataacggatatgcattattcttccttccctgcccatccagatggagggaccagcaagaacagagacaggaaggggaaaatggatgtgaccaactcagctgaaaagtaagggctttatcggatagggacagacgaggtaaggaaggttgtttaatgagaggccttgcttgccagcctaagcttttaaatttgatgccagtggcaacaataaagtgtatctatcactagcacattgtcaatctggactataagtctgtccacaattctgtgtgtagagattccagactggggcatagggatgaaaacctaaaggataccttcttttgggaaattctttttttctttttttttctgagatggagtcccgctctgtcgcccaggctggagtacagtggcgcgatctcggctcactacaagctctgcctcccaggttcacgccattatcctgactcagcctcccgagtagctgggattacgggcgcatgccaccacactcagctaatttttgtatttttagtagagacaaggtttcactatgttggccaggtngnncactgcanctggncctaa

SEQ ID NO: 419555 - DNA, 1368 bp, Homo sapiens
taccagttcagaagccgaataacgagataggtgggtgatgcttcagcaattcatcctggcattctggcaggatgaattcctctctgcagttcttctctctatctggccaactgctgtagtgaccactgcctgctgcaatagggaatcttgctttggagagaatcctctatcctgcctccattgcctttgctggtgcctggcttctggcccaagtgttctgtcaaggccagttgtgaattccacatgtcttcttctcaggcactgccactccttatgcctagaggcaggggtggggaggaggagaatgactgttttgtggaaacccccaactcagaaccgcacagatgccctgcagttccacctctgcatggtagccaaagagagtcctctaaatgaagcaatctctttgagcctctcagcatccccgcacttccagcatcactcaacccagaaacaatagaatctacaaggggactccctacatgtttcttatgaggtcagaattgccatcctggaaaggtgagttacagtgctgcccaggtgattcttgtgtgttactctatgttatatctattgtataatctcacatttaaatagcaccattccttttattgcaatgcttatgaaaactttccttgtttttaggtttccttcgtcagtccaggcaggactgtgcggttggaaaagggacggatgctggtcctggaaggggcgtcgttatctagaagctcccaacctaagtgggtgactcatagggagggcaaggagagaaggacacagcaagcaacttacatgtaaaacaagacgtgtgggttattatggaagaaattcacaaccaaacttggggttagcccgtattgttttccaagaactctatgtggacagtgacaaaaaacagacctaagaactagcagactgggcaaagctttttcacataacaacaacaaaaaaagcaattcctcaggaaaaaatggtcaatgggtcattgtgtgtagacaaaactacaagttctgctccagactctggggaaaccatgctgccatcttcaagctgtggccattctgtaatacagactacgctaaatcacatgttgtcatcaaggcagaatattttgttcctttatgggtcagcctgggatacaaaattagagaaactttgcaatgaaaaatcccttgtgtctcattgaactttttccttaattcaaacctttcctttcacagttttgattagtgcctttgcccatgtggacaatattttatgatcaggttttaagagtaatccatccatggctgcttggctgcctggaacttaaaacaacgacaacaacaatgtccagataaacccaataaaataggtttttaaatgtgt

SEQ ID NO: 419556 - DNA, 1261 bp, Homo sapiens
taccagttcagaagccgaataacgagataggtgggtgatgcttcagcaattcatcctggcattctggcaggatgaattcctctctgcagttcttctctctatctggccaactgctgtagtgaccactgcctgctgcaatagggaatcttgctttggagagaatcctctatcctgcctccattgcctttgctggtgcctggcttctggcccaagtgttctgtcaaggccagttgtgaattccacatgtcttcttctcaggcactgccactccttatgcctagaggcaggggtggggaggaggagaatgactgttttgtggaaacccccaactcagaaccgcacagatgccctgcagttccacctctgcatggtagccaaagagagtcctctaaatgaagcaatctctttgagcctctcagcatccccgcacttccagcatcactcaacccagaaacaatagaatctacaaggggactccctacatgtttcttatgaggtcagaattgccatcctggaaaggtgagttacagtgctgcccaggtgattcttgtgtgttactctatgttatatctattgtataatctcacatttaaatagcaccattccttttattgcaatgcttatgaaaactttccttgtttttaggtttccttcgtcagtccaggcaggactgtgcggttggaaaagggacggatgctggtcctggaaggggcgtcgttatctagaagctcccaacctaagtgggtgactcatagggagggcaaggagagaaggacagtgacaaaaaacagacctaagaactagcagactgggcaaagctttttcacataacaacaacaaaaaaagcaattcctcaggaaaaaatggtcaatgggtcattgtgtgtagacaaaactacaagttctgctccagactctggggaaaccatgctgccatcttcaagctgtggccattctgtaatacagactacgctaaatcacatgttgtcatcaaggcagaatattttgttcctttatgggtcagcctgggatacaaaattagagaaactttgcaatgaaaaatcccttgtgtctcattgaactttttccttaattcaaacctttcctttcacagttttgattagtgcctttgcccatgtggacaatattttatgatcaggttttaagagtaatccatccatggctgcttggctgcctggaacttaaaacaacgacaacaacaatgtccagataaacccaataaaataggtttttaaatgtgt

SEQ ID NO: 419557 - DNA, 1230 bp, Homo sapiens
  misc_feature (3)..(3): n is a, c, g, or t
ctnggagcctgttttctcgccatctagtacatccctgtctggagggaggtggttgtggtattcagtatagacaagaggatatgcctttcacctgtgaaggtatcacccctgatatcatcatcaatccccatgccatcccctctcgtatgactattggtcacttaattgaatgccttcaagggaaggtatcggctaacaagggtgaaattggtgatgccactccatttaatgatgctgttaacgtgcagaagatttctaatcttttatctgattatggctatcatctcagaggaaatgaggtcctgtacaatgggttcactggtcgaaaaatcacatcacaaatatttattggccccacttattaccagcgtttgaagcatatggtggatgataagattcactctcgtgctaggggacctattcagatcctcaatagacagcccatggagggtagatctcgtgatggtggcctgcgttttggagaaatggaacgagattgtcagattgcccatggagcagcccagtttttaagggaaagattgtttgaggcatcagatccatatcaggttcatgtttgcaatctttgtggaataatggcgattgccaacaccaggacccatacatatgaatgcaggggctgccgcaataaaacccagatttctttggtgcgaatgccttacgcatgcaaactattgtttcaggaacttatgtctatgagtattgcaccgcgaatgatgagtgtttagctattttacaggagtcaacaagataattaaatatcttggtgtcttgtttctattgtgtggctttttaaaaatgacaaatatgtactgtgttgtgataaaaagtattttatttgtttaatgatatgcatgcttttcttctgtaaatatataataaatttttgtagatagtcaaaaaaaaaaaaaaaaaaaaaaaaaaaaaaaaaaaaaaaaaaaaaaaaaaaaaaaaaaaaaaaaaaaaaaaaaaaaaaaaaaaacaaaaaaaaaaacaaaaaacctaaaatactattaaaaaaaataatataaaaattaaacttcccataaatatacaacatcaaaaattctaaaaaactctaccttaccataaacttattccccttcaactaaatactccttttcccacttctcttaatctcttatatccccttaccaatttccttcacaaactcttcaccattctttattaacaaatttcaaaattctccct

SEQ ID NO: 419558 - DNA, 434 bp, Homo sapiens
  misc_feature (391)..(391): n is a, c, g, or t
  misc_feature (403)..(403): n is a, c, g, or t
tctgcatgttgactcatagagagatcccattctaggcatcaaccactgtaatttttgctgatgctgaagcctgtccttgggaattggatgcatggcactcatattctccagcatcttccttacttagaggagataccagcacccagccagttacttcatgcttttctgggccaccccgggtctgaatggccaggttgtcccggtcaccaggcaggagttctgtcctttgaactccatagtgacccctttttaccttgttccagatgaggacaggtgtcgggattccgatgacctcacagctcaagtacacctgggcaccagtgacattccagatgtccttggggggcgtcactatggaaggaccttgctcgcaggtgcccttgatgcctgnaaggggatcctntaagattctacctacacgcatcccgcgtaca

SEQ ID NO: 419559 - DNA, 922 bp, Homo sapiens
  misc_feature (11)..(11): n is a, c, g, or t
  misc_feature (34)..(34): n is a, c, g, or t
gggaaaactanggctaggtacgaggctgggtgtnttacttcgtctttagctcctggcgctgctggcttctgggcggttttgtcttttgatttcaagagttaggagctcgagaaccgtttggcaatatgtacgacgcggatgaggatatgcaatatgatgaggatgatgatgaaatcaccccggatttgtggcaagaagcatgctggattgtaatcagttcctattttgacgagaaaggcttggttagacaacagctggattcttttgatgagtttattcagatgtctgttcaaagaattgtggaagacgctcctcctatagacctacaggctgaagctcagcatgctagtggagaagttgaagaaccgccacgatatttgctgaagtttgaacaaatttatctttccaagcctacccattgggaaagagatggtgctccttcaccaatgatgcccaatgaagctagattaaggaatctcacgtattctgctccgctttatgttgatataacaaaaacagtcattaaagaaggtgaagaacaacttcagactcagcatcagaaaacttttataggaaaaattccaattatgttgcggtcaacttactgccttttgaatggcttgacagatcgtgatctttgtgagttaaatgaatgccctttggatcctggtggctatttcattattaatggatcagaaaaggttctgattgcccaagagaaaatggcaacaaacacagtttatgtgtttgccaaaaaggattctaaatatgcctacacaggagagtgtggctcaatggcctcgaggaatacacggccccgaaccagcaaggactcaatgggtagcacaaggcggccagaagggagggacaggtggacaagaaaaaggggtaaaaggccacaggactagggcggagatacagc

SEQ ID NO: 419560 - DNA, 277 bp, Homo sapiens
atttaaatgtctgataggttaaaccttctctcgatgaagcttttgtcatccaagaacagaatgttgcactaaatttcattggttcaagaggagcaaagcctggtgttactaaagagaaaagaattaaatatgcaaaggaagttttacaaaaagaaatgctccctcatgttggtgtcagtgatttttgtgagaccaaaaaagcctatttcttgggatacatggttcatcaggttacttctggacagctgatggagagcaacgatgcgggcggatcctc

SEQ ID NO: 419561 - DNA, 4271 bp, Homo sapiens
aggcactggaggattgagctaggtgggcagaaaagagcagtgagtgttttgggttttttcactttcaggcttaacgcctcactgctagcacaagccgcccttaataaatcacacttaaaaaggagcttccggggtcgggcgcggtggctcacgcctgtaatcccagcaatttgggaggccgaggcgggcggatcatgaggtcaggagatcgagaccatcctggcttacacggtgtcgttatttgtgcaacaacattgaaaaacaagcagaaataaaacattgacggaacggatacgaccgcagattgcgggagctgtcctctcaatcggcccggcagcggcggcccacaatttacgcgtgtgcaaccctaaccccggcccaagcttgacctacaatttgcgcaggcgcagatcctaactttggcgtccctgtgggcggcctttggtgtgagacgcgtggtattctgggaacgtcggagacggaagttacttcgtctttagctcctggcgctgctggcttctgggcggttttgtcttttgatttcaagagttaggagctcgagaaccgtttggcaatatgtacgacgcggatgaggatatgcaatatgatgaggatgatgatgaaatcaccccggatttgtggcaagaagcatgctggattgtaatcagttcctattttgacgagaaaggcttggttagacaacagctggattcttttgatgagtttattcagatgtctgttcaaagaattgtggaagacgctcctcctatagacctacaggctgaagctcagcatgctagtggagaagttgaagaaccgccacgatatttgctgaagtttgaacaaatttatctttccaagcctacccattgggaaagagatggtgctccttcaccaatgatgcccaatgaagctagattaaggaatctcacgtattctgctccgctttatgttgatataacaaaaacagtcattaaagaaggtgaagaacaacttcagactcagcatcagaaaacttttataggaaaaattccaattatgttgcggtcaacttactgccttttgaatggcttgacagatcgtgatctttgtgagttaaatgaatgccctttggatcctggtggctatttcattattaatggatcagaaaaggttctgattgcccaagagaaaatggcaacaaacacagtttatgtgtttgccaaaaaggattctaaatatgcctacacaggagagtgtagatcatgtcttgagaattcttcccgacccaccagtactatatgggttagcatgctggcaagaggaggacagggtgccaagaagagtgctattggtcagcgcattgtggcaactctaccatatatcaagcaagaagttcccatcattattgtgttcagagcattaggttttgtgtccgacagagatattttagaacatattatttatgattttgaagatccagagatgatggaaatggttaaaccttctctcgatgaagcttttgtcatccaagaacagaatgttgcactaaatttcattggttcaagaggagcaaagcctggtgttactaaagagaaaagaattaaatatgcaaaggaagttttacaaaaagaaatgctccctcatgttggtgtcagtgatttttgtgagaccaaaaaagcctatttcttgggatacatggttcataggttacttctggcagctttgggtagaagagaactagatgacagagatcactatggaaacaagagattggatcttgctgggccgctgcttgcattcttatttagaggtatgtttaagaatttgcttaaagaagtgcggatctatgcacagaaatttattgatcgaggaaaggattttaacttggagttggcaattaaaacacggatcatatctgatggcctaaaatactctttagctactggaaactggggtgatcaaaagaaagctcatcaagccagagctggagtatctcaggtgttaaaccgcctgacttttgcgtctactctttctcacctgcgtcgtttaaattctcctattggtagagacggcaagctagcaaaaccaagacagttgcataatacgttgtggggaatggtgtgtcctgccgagaccccagagggccatgctgtaggacttgtgaagaatttagccttgatggcgtatatttcagttggatctcaaccatctccaattctggaatttttagaagaatggagtatggaaaatttagaagaaatttctcctgcagctattgctgatgcaaccaagatttttgttaatggctgctgggttggaatacataaagatcccgaacaacttatgaacaccctaaggaaattgagacgtcagatggacatcattgtgtctgaagtttctatgatcagagatattcgagagagggagattcggatctatacggatgcaggccgtatttgtagaccacttctgattgtggaaaaacaaaagctacttttgaagaagaggcatattgaccaattgaaagagagagaatataacaactatagttggcaggatcttgtggccagtggggtagtggagtatattgataccctggaagaagaaacagtgatgcttgcaatgactccagatgatttacaggagaaagaagtagcttattgttccacatatacacactgtgagattcatccctcaatgatccttggtgtctgtgcatctattattccctttcctgatcataaccagtcccctagaaacacataccagtctgctatgggtaagcaggctatgggagtttacatcaccaacttccatgttcgcatggacacattggcccatgttctctattatcctcaaaagccacttgtgactacacggtctatggaatatctacgatttagagagctgccagcaggcatcaactcaattgtggccattgcatcatacactggatataatcaggaagactctgttatcatgaatcgttcagctgtagaccgcggcttcttcaggtctgttttctatcgctcatacaaagaacaggagtctaaaaaaggatttgatcaagaagaagtttttgagaagcctacacgtgaaacatgccagggcatgaggcatgccatttacgacaagctggatgatgatggtttgatagctccaggggttcgtgtatcaggagatgatgttattataggcaaaacagtcaccttgcctgaaaatgaagatgaattggagagcaccaatagacgctataccaagagagactgtagcacttttctcagaactagtgagacgggcattgtggatcaggttatggtaactctcaatcaggaaggatataaattttgtaaaataagggtacgctctgttaggattccacagattggagacaaatttgctagtcgacatggtcaaaagggtacttgtggtattcagtatagacaagaggatatgcctttcacctgtgaaggtatcacccctgatatcatcatcaatccccatgccatcccctctcgtatgactattggtcacttaattgaatgccttcaagggaaggtatcggctaacaagggtgaaattggtgatgccactccatttaatgatgctgttaacgtgcagaagatttctaatcttttatctgattatggctatcatctcagaggaaatgaggtcctgtacaatgggttcactggtcgaaaaatcacatcacaaatatttattggccccacttattaccagcgtttgaagcatatggtggatgataagattcactctcgtgctaggggacctattcagatcctcaatagacagcccatggagggtagatctcgtgatggtggcctgcgttttggagaaatggaacgagattgtcagattgcccatggagcagcccagtttttaagggaaagattgtttgaggcatcagatccatatcaggttcatgtttgcaatctttgtggaataatggcgattgccaacaccaggacccatacatatgaatgcaggggctgccgcaataaaacccagatttctttggtgcgaatgccttacgcatgcaaactattgtttcaggaacttatgtctatgagtattgcaccgcgaatgatgagtgtttagctattttacaggagtcaacaagataattaaatatcttggtgtcttgtttctattgtgtggctttttaaaaatgacaaatatgtactgtgttgtgataaaaagtattttatttgtttaatgatatgcatgcttttcttctgtaaatatataataaatttttgtagatagtc

SEQ ID NO: 419562 - DNA, 3779 bp, Homo sapiens
  misc_feature (11)..(11): n is a, c, g, or t
  misc_feature (34)..(34): n is a, c, g, or t
gggaaaactanggctaggtacgaggctgggtgtngttttgtcttttgatttcaagagttaggagctcgagaaccgtttggcaatatgtacgacgcggatgaggatatgcaatatgatgaggatgatgatgaaatcaccccggatttgtggcaagaagcatgctggattgtaatcagttcctattttgacgagaaaggcttggttagacaacagctggattcttttgatgagtttattcagatgtctgttcaaagaattgtggaagacgctcctcctatagacctacaggctgaagctcagcatgctagtggagaagttgaagaaccgccacgatatttgctgaagtttgaacaaatttatctttccaagcctacccattgggaaagagatggtgctccttcaccaatgatgcccaatgaagctagattaaggaatctcacgtattctgctccgctttatgttgatataacaaaaacagtcattaaagaaggtgaagaacaacttcagactcagcatcagaaaacttttataggaaaaattccaattatgttgcggtcaacttactgccttttgaatggcttgacagatcgtgatctttgtgagttaaatgaatgccctttggatcctggtggctatttcattattaatggatcagaaaaggttctgattgcccaagagaaaatggcaacaaacacagtttatgtgtttgccaaaaaggattctaaatatgcctacacaggagagtgtagatcatgtcttgagaattcttcccgacccaccagtactatatgggttagcatgctggcaagaggaggacagggtgccaagaagagtgctattggtcagcgcattgtggcaactctaccatatatcaagcaagaagttcccatcattattgtgttcagagcattaggttttgtgtccgacagagatattttagaacatattatttatgattttgaagatccagagatgatggaaatggttaaaccttctctcgatgaagcttttgtcatccaagaacagaatgttgcactaaatttcattggttcaagaggagcaaagcctggtgttactaaagagaaaagaattaaatatgcaaaggaagttttacaaaaagaaatgctccctcatgttggtgtcagtgatttttgtgagaccaaaaaagcctatttcttgggatacatggttcataggttacttctggcagctttgggtagaagagaactagatgacagagatcactatggaaacaagagattggatcttgctgggccgctgcttgcattcttatttagaggtatgtttaagaatttgcttaaagaagtgcggatctatgcacagaaatttattgatcgaggaaaggattttaacttggagttggcaattaaaacacggatcatatctgatggcctaaaatactctttagctactggaaactggggtgatcaaaagaaagctcatcaagccagagctggagtatctcaggtgttaaaccgcctgacttttgcgtctactctttctcacctgcgtcgtttaaattctcctattggtagagacggcaagctagcaaaaccaagacagttgcataatacgttgtggggaatggtgtgtcctgccgagaccccagagggccatgctgtaggacttgtgaagaatttagccttgatggcgtatatttcagttggatctcaaccatctccaattctggaatttttagaagaatggagtatggaaaatttagaagaaatttctcctgcagctattgctgatgcaaccaagatttttgttaatggctgctgggttggaatacataaagatcccgaacaacttatgaacaccctaaggaaattgagacgtcagatggacatcattgtgtctgaagtttctatgatcagagatattcgagagagggagattcggatctatacggatgcaggccgtatttgtagaccacttctgattgtggaaaaacaaaagctacttttgaagaagaggcatattgaccaattgaaagagagagaatataacaactatagttggcaggatcttgtggccagtggggtagtggagtatattgataccctggaagaagaaacagtgatgcttgcaatgactccagatgatttacaggagaaagaagtagcttattgttccacatatacacactgtgagattcatccctcaatgatccttggtgtctgtgcatctattattccctttcctgatcataaccagtcccctagaaacacataccagtctgctatgggtaagcaggctatgggagtttacatcaccaacttccatgttcgcatggacacattggcccatgttctctattatcctcaaaagccacttgtgactacacggtctatggaatatctacgatttagagagctgccagcaggcatcaactcaattgtggccattgcatcatacactggatataatcaggaagactctgttatcatgaatcgttcagctgtagaccgcggcttcttcaggtctgttttctatcgctcatacaaagaacaggagtctaaaaaaggatttgatcaagaagaagtttttgagaagcctacacgtgaaacatgccagggcatgaggcatgccatttacgacaagctggatgatgatggtttgatagctccaggggttcgtgtatcaggagatgatgttattataggcaaaacagtcaccttgcctgaaaatgaagatgaattggagagcaccaatagacgctataccaagagagactgtagcacttttctcagaactagtgagacgggcattgtggatcaggttatggtaactctcaatcaggaaggatataaattttgtaaaataagggtacgctctgttaggattccacagattggagacaaatttgctagtcgacatggtcaaaagggtacttgtggtattcagtatagacaagaggatatgcctttcacctgtgaaggtatcacccctgatatcatcatcaatccccatgccatcccctctcgtatgactattggtcacttaattgaatgccttcaagggaaggtatcggctaacaagggtgaaattggtgatgccactccatttaatgatgctgttaacgtgcagaagatttctaatcttttatctgattatggctatcatctcagaggaaatgaggtcctgtacaatgggttcactggtcgaaaaatcacatcacaaatatttattggccccacttattaccagcgtttgaagcatatggtggatgataagattcactctcgtgctaggggacctattcagatcctcaatagacagcccatggagggtagatctcgtgatggtggcctgcgttttggagaaatggaacgagattgtcagattgcccatggagcagcccagtttttaagggaaagattgtttgaggcatcagatccatatcaggttcatgtttgcaatctttgtggaataatggcgattgccaacaccaggacccatacatatgaatgcaggggctgccgcaataaaacccagatttctttggtgcgaatgccttacgcatgcaaactattgtttcaggaacttatgtctatgagtattgcaccgcgaatgatgagtgtttagctattttacaggagtcaacaagataattaaatatcttggtgtcttgtttctattgtgtggctttttaaaaatgacaaatatgtactgtgttgtgataaaaagtattttatttgtttaatgatatgcatgcttttcttctgtaaatatataataaatttttgtagatagtc

SEQ ID NO: 419563 - DNA, 5118 bp, Homo sapiens
aggcactggaggattgagctaggtgggcagaaaagagcagtgtcgttatttgtgcaacaacattgaaaaacaagcagaaataaaacattgacggaacggatacgaccgcagattgcgggagctgtcctctcaatcggcccggcagcggcggcccacaatttacgcgtgtgcaaccctaaccccggcccaagcttgacctacaatttgcgcaggcgcagatcctaactttggcgtccctgtgggcggcctttggtgtgagacgcgtggtattctgggaacgtcggagacggaagttacttcgtctttagctcctggcgctgctggcttctgggcggttttgtcttttgatttcaagagttaggagctcgagaaccgtttggcaatatgtacgacgcggatgaggatatgcaatatgatgaggatgatgatgaaatcaccccggatttgtggcaagaagcatgctggattgtaatcagttcctattttgacgagaaaggcttggttagacaacagctggattcttttgatgagtttattcagatgtctgttcaaagaattgtggaagacgctcctcctatagacctacaggctgaagctcagcatgctagtggagaagttgaagaaccgccacgatatttgctgaagtttgaacaaatttatctttccaagcctacccattgggaaagagatggtgctccttcaccaatgatgcccaatgaagctagattaaggaatctcacgtattctgctccgctttatgttgatataacaaaaacagtcattaaagaaggtgaagaacaacttcagactcagcatcagaaaacttttataggaaaaattccaattatgttgcggtcaacttactgccttttgaatggcttgacagatcgtgatctttgtgagttaaatgaatgccctttggatcctggtggctatttcattattaatggatcagaaaaggttctgattgcccaagagaaaatggcaacaaacacagtttatgtgtttgccaaaaaggattctaaatatgcctacacaggagagtgtagatcatgtcttgagaattcttcccgacccaccagtactatatgggttagcatgctggcaagaggaggacagggtgccaagaagagtgctattggtcagcgcattgtggcaactctaccatatatcaagcaagaagttcccatcattattgtgttcagagcattaggttttgtgtccgacagagatattttagaacatattatttatgattttgaagatccagagatgatggaaatggttaaaccttctctcgatgaagcttttgtcatccaagaacagaatgttgcactaaatttcattggttcaagaggagcaaagcctggtgttactaaagagaaaagaattaaatatgcaaaggaagttttacaaaaagaaatgctccctcatgttggtgtcagtgatttttgtgagaccaaaaaagcctatttcttgggatacatggttcataggttacttctggcagctttgggtagaagagaactagatgacagagatcactatggaaacaagagattggatcttgctgggccgctgcttgcattcttatttagaggtatgtttaagaatttgcttaaagaagtgcggatctatgcacagaaatttattgatcgaggaaaggattttaacttggagttggcaattaaaacacggatcatatctgatggcctaaaatactctttagctactggaaactggggtgatcaaaagaaagctcatcaagccagagctggagtatctcaggtgttaaaccgcctgacttttgcgtctactctttctcacctgcgtcgtttaaattctcctattggtagagacggcaagctagcaaaaccaagacagttgcataatacgttgtggggaatggtgtgtcctgccgagaccccagagggccatgctgtaggacttgtgaagaatttagccttgatggcgtatatttcagttggatctcaaccatctccaattctggaatttttagaagaatggagtatggaaaatttagaagaaatttctcctgcagctattgctgatgcaaccaagatttttgttaatggctgctgggttggaatacataaagatcccgaacaacttatgaacaccctaaggaaattgagacgtcagatggacatcattgtgtctgaagtttctatgatcagagatattcgagagagggagattcggatctatacggatgcaggccgtatttgtagaccacttctgattgtggaaaaacaaaagttggcaggatcttgtggccagtggggtagtggagtatattgataccctggaagaagaaacagtgatgcttgcaatgactccagatgatttacaggagaaagaagtagcttattgttccacatatacacactgtgagattcatccctcaatgatccttggtgtctgtgcatctattattccctttcctgatcataaccagtcccctagaaacacataccagtctgctatgggtaagcaggctatgggagtttacatcaccaacttccatgttcgcatggacacattggcccatgttctctattatcctcaaaagccacttgtgactacacggtctatggaatatctacgatttagagagctgccagcaggcatcaactcaattgtggccattgcatcatacactggatataatcaggaagactctgttatcatgaatcgttcagctgtagaccgcggcttcttcaggtctgttttctatcgctcatacaaagaacaggagtctaaaaaaggatttgatcaagaagaagtttttgagaagcctacacgtgaaacatgccagggcatgaggcatgccatttacgacaagctggatgatgatggtttgatagctccaggggttcgtgtatcaggagatgatgttattataggcaaaacagtcaccttgcctgaaaatgaagatgaattggagagcaccaatagacgctataccaagagagactgtagcacttttctcagaactagtgagacgggcattgtggatcaggttatggtaactctcaatcaggaaggatataaattttgtaaaataagggtacgctctgttaggattccacagattggagacaaatttgctagtcgacatggtcaaaagggtacttgtggtattcagtatagacaagaggatatgcctttcacctgtgaaggtatcacccctgatatcatcatcaatccccatgccatcccctctcgtatgactattggtcacttaattgaatgccttcaagggaaggtatcggctaacaagggtgaaattggtgatgccactccatttaatgatgctgttaacgtgcagaagatttctaatcttttatctgattatggctatcatctcagaggaaatgaggtcctgtacaatgggttcactggtcgaaaaatcacatcacaaatatttattggccccacttattaccagcgtttgaagcatatggtggatgataagattcactctcgtgctaggggacctattcagatcctcaatagacagcccatggagggtagatctcgtgatggtggcctgcgttttggagaaatggaacgagattgtcagattgcccatggagcagcccagtttttaagggaaagattgtttgaggcatcagatccatatcaggttcatgtttgcaatctttgtggaataatggcgattgccaacaccaggacccatacatatgaatgcaggggctgccgcaataaaacccagatttctttggtgcgaatgccttacgcatgcaaactattgtttcaggaacttatgtctatgagtattgcaccgcgaatgatgagtgtttagctattttacaggagtcaacaagataattaaatatcttggtgtcttgtttctattgtgtggctttttaaaaatgacaaatatgtactgtgttgtgataaaaagtattttatttgtttaatgatatgcatgcttttcttctgtaaatatataataaatttttgtagatagtcttgatgtgtgatctttattttgtatttctctgtgtaaaaccagtgaatataactaaagtgttagtggattggattaaaagaaacttattaggcaagaacaggtaatgtagttatccatgactacttttaaccatgcagactaataatattctggaggtttatagctcggcaccttcaccttttttcactggtatttcatgtaaggcatcaaccactgtaatttttgctgatgctgaagcctgtccttgggaattggatgcatggcactcatattctccagcatcttccttacttagaggagataccagcacccagccagttacttcatgcttttctgggccaccccgggtctgaatggccaggttgtcccggtcaccaggcaggagttctgtcctttgaactccatagtgacccctttttaccttgttccagatgaggacaggtgtcgggattccgatgacctcacagctcaagtacacctgggcaccagtgacattccagatgtccttggggggcgtcactatggaaggaccttgctcgcaggtgcccttgctgacctgggtgatggccttctccccgcggctctcggccctctggctggcggcgcgcagctggcagccgctcgggtaggtggtgccgtcgctgccgcacaccgggtagcggctcttgcacacgcacacgccgcttacacccggaccgccggctgctgccccggctttacccctccgcctcttgcggctcttcacgcactccatgcccggcgcgcagtaccccctgccggcgccgccacccccgcacggctcgccctcgccgcgggcgcacatagggcagcagccgcacgcgtcgcgggtctcgcccagcaggcagcccagcgggggcaggggcgggcaggaggccggctcgcaggggccgcaggtgtccgaagaggaggaagaggagaggggcaggagcaggagcagcagcccagcggcgccgaggagcagggcgcgcagcgacggccgctccatggcggggtgcggtggcagcggcaagggcgcgagtgagccgtgtcgggccggccggcgccttaaacccgccgccccgcccggcctgtccgcg

SEQ ID NO: 419564 - DNA, 5258 bp, Homo sapiens
aggcactggaggattgagctaggtgggcagaaaagagcagtgtcgttatttgtgcaacaacattgaaaaacaagcagaaataaaacattgacggaacggatacgaccgcagattgcgggagctgtcctctcaatcggcccggcagcggcggcccacaatttacgcgtgtgcaaccctaaccccggcccaagcttgacctacaatttgcgcaggcgcagatcctaactttggcgtccctgtgggcggcctttggtgtgagacgcgtggtattctgggaacgtcggagacggaagttacttcgtctttagctcctggcgctgctggcttctgggcggttttgtcttttgatttcaagagttaggagctcgagaaccgtttggcaatatgtacgacgcggatgaggatatgcaatatgatgaggatgatgatgaaatcaccccggatttgtggcaagaagcatgctggattgtaatcagttcctattttgacgagaaaggcttggttagacaacagctggattcttttgatgagtttattcagatgtctgttcaaagaattgtggaagacgctcctcctatagacctacaggctgaagctcagcatgctagtggagaagttgaagaaccgccacgatatttgctgaagtttgaacaaatttatctttccaagcctacccattgggaaagagatggtgctccttcaccaatgatgcccaatgaagctagattaaggaatctcacgtattctgctccgctttatgttgatataacaaaaacagtcattaaagaaggtgaagaacaacttcagactcagcatcagaaaacttttataggaaaaattccaattatgttgcggtcaacttactgccttttgaatggcttgacagatcgtgatctttgtgagttaaatgaatgccctttggatcctggtggctatttcattattaatggatcagaaaaggttctgattgcccaagagaaaatggcaacaaacacagtttatgtgtttgccaaaaaggattctaaatatgcctacacaggagagtgtagatcatgtcttgagaattcttcccgacccaccagtactatatgggttagcatgctggcaagaggaggacagggtgccaagaagagtgctattggtcagcgcattgtggcaactctaccatatatcaagcaagaagttcccatcattattgtgttcagagcattaggttttgtgtccgacagagatattttagaacatattatttatgattttgaagatccagagatgatggaaatggttaaaccttctctcgatgaagcttttgtcatccaagaacagaatgttgcactaaatttcattggttcaagaggagcaaagcctggtgttactaaagagaaaagaattaaatatgcaaaggaagttttacaaaaagaaatgctccctcatgttggtgtcagtgatttttgtgagaccaaaaaagcctatttcttgggatacatggttcataggttacttctggcagctttgggtagaagagaactagatgacagagatcactatggaaacaagagattggatcttgctgggccgctgcttgcattcttatttagaggtatgtttaagaatttgcttaaagaagtgcggatctatgcacagaaatttattgatcgaggaaaggattttaacttggagttggcaattaaaacacggatcatatctgatggcctaaaatactctttagctactggaaactggggtgatcaaaagaaagctcatcaagccagagctggagtatctcaggtgttaaaccgcctgacttttgcgtctactctttctcacctgcgtcgtttaaattctcctattggtagagacggcaagctagcaaaaccaagacagttgcataatacgttgtggggaatggtgtgtcctgccgagaccccagagggccatgctgtaggacttgtgaagaatttagccttgatggcgtatatttcagttggatctcaaccatctccaattctggaatttttagaagaatggagtatggaaaatttagaagaaatttctcctgcagctattgctgatgcaaccaagatttttgttaatggctgctgggttggaatacataaagatcccgaacaacttatgaacaccctaaggaaattgagacgtcagatggacatcattgtgtctgaagtttctatgatcagagatattcgagagagggagattcggatctatacggatgcaggccgtatttgtagaccacttctgattgtggaaaaacaaaagctacttttgaagaagaggcatattgaccaattgaaagagagagaatataacaactatagttggcaggatcttgtggccagtggggtagtggagtatattgataccctggaagaagaaacagtgatgcttgcaatgactccagatgatttacaggagaaagaagtagcttattgttccacatatacacactgtgagattcatccctcaatgatccttggtgtctgtgcatctattattccctttcctgatcataaccagtcccctagaaacacataccagtctgctatgggtaagcaggctatgggagtttacatcaccaacttccatgttcgcatggacacattggcccatgttctctattatcctcaaaagccacttgtgactacacggtctatggaatatctacgatttagagagctgccagcaggcatcaactcaattgtggccattgcatcatacactggatataatcaggaagactctgttatcatgaatcgttcagctgtagaccgcggcttcttcaggtctgttttctatcgctcatacaaagaacaggagtctaaaaaaggatttgatcaagaagaagtttttgagaagcctacacgtgaaacatgccagggcatgaggcatgccatttacgacaagctggatgatgatggtttgatagctccaggggttcgtgtatcaggagatgatgttattataggcaaaacagtcaccttgcctgaaaatgaagatgaattggagagcaccaatagacgctataccaagagagactgtagcacttttctcagaactagtgagacgggcattgtggatcaggttatggtaactctcaatcaggaaggatataaattttgtaaaataagggtgagtacaactttgttcatgtagctagttttagaaagtaaaccaaatccacttaactaacttatttttatatgaatttaggtacgctctgttaggattccacagattggagacaaatttgctagtcgacatggtcaaaagggtacttgtggtattcagtatagacaagaggatatgcctttcacctgtgaaggtatcacccctgatatcatcatcaatccccatgccatcccctctcgtatgactattggtcacttaattgaatgccttcaagggaaggtatcggctaacaagggtgaaattggtgatgccactccatttaatgatgctgttaacgtgcagaagatttctaatcttttatctgattatggctatcatctcagaggaaatgaggtcctgtacaatgggttcactggtcgaaaaatcacatcacaaatatttattggccccacttattaccagcgtttgaagcatatggtggatgataagattcactctcgtgctaggggacctattcagatcctcaatagacagcccatggagggtagatctcgtgatggtggcctgcgttttggagaaatggaacgagattgtcagattgcccatggagcagcccagtttttaagggaaagattgtttgaggcatcagatccatatcaggttcatgtttgcaatctttgtggaataatggcgattgccaacaccaggacccatacatatgaatgcaggggctgccgcaataaaacccagatttctttggtgcgaatgccttacgcatgcaaactattgtttcaggaacttatgtctatgagtattgcaccgcgaatgatgagtgtttagctattttacaggagtcaacaagataattaaatatcttggtgtcttgtttctattgtgtggctttttaaaaatgacaaatatgtactgtgttgtgataaaaagtattttatttgtttaatgatatgcatgcttttcttctgtaaatatataataaatttttgtagatagtcttgatgtgtgatctttattttgtatttctctgtgtaaaaccagtgaatataactaaagtgttagtggattggattaaaagaaacttattaggcaagaacaggtaatgtagttatccatgactacttttaaccatgcagactaataatattctggaggtttatagctcggcaccttcaccttttttcactggtatttcatgtaaggcatcaaccactgtaatttttgctgatgctgaagcctgtccttgggaattggatgcatggcactcatattctccagcatcttccttacttagaggagataccagcacccagccagttacttcatgcttttctgggccaccccgggtctgaatggccaggttgtcccggtcaccaggcaggagttctgtcctttgaactccatagtgacccctttttaccttgttccagatgaggacaggtgtcgggattccgatgacctcacagctcaagtacacctgggcaccagtgacattccagatgtccttggggggcgtcactatggaaggaccttgctcgcaggtgcccttgctgacctgggtgatggccttctccccgcggctctcggccctctggctggcggcgcgcagctggcagccgctcgggtaggtggtgccgtcgctgccgcacaccgggtagcggctcttgcacacgcacacgccgcttacacccggaccgccggctgctgccccggctttacccctccgcctcttgcggctcttcacgcactccatgcccggcgcgcagtaccccctgccggcgccgccacccccgcacggctcgccctcgccgcgggcgcacatagggcagcagccgcacgcgtcgcgggtctcgcccagcaggcagcccagcgggggcaggggcgggcaggaggccggctcgcaggggccgcaggtgtccgaagaggaggaagaggagaggggcaggagcaggagcagcagcccagcggcgccgaggagcagggcgcgcagcgacggccgctccatggcggggtgcggtggcagcggcaagggcgcgagtgagccgtgtcgggccggccggcgccttaaacccgccgccccgcccggcctgtccgcg

SEQ ID NO: 419565 - DNA, 5122 bp, Homo sapiens
aggcactggaggattgagctaggtgggcagaaaagagcagtgtcgttatttgtgcaacaacattgaaaaacaagcagaaataaaacattgacggaacggatacgaccgcagattgcgggagctgtcctctcaatcggcccggcagcggcggcccacaatttacgcgtgtgcaaccctaaccccggcccaagcttgacctacaatttgcgcaggcgcagatcctaactttggcgtccctgtgggcggcctttggtgtgagacgcgtggtattctgggaacgtcggagacggaagttacttcgtctttagctcctggcgctgctggcttctgggcggttttgtcttttgatttcaagagttaggagctcgagaaccgtttggcaatatgtacgacgcggatgaggatatgcaatatgatgaggatgatgatgaaatcaccccggatttgtggcaagaagcatgctggattgtaatcagttcctattttgacgagaaaggcttggttagacaacagctggattcttttgatgagtttattcagatgtctgttcaaagaattgtggaagacgctcctcctatagacctacaggctgaagctcagcatgctagtggagaagttgaagaaccgccacgatatttgctgaagtttgaacaaatttatctttccaagcctacccattgggaaagagatggtgctccttcaccaatgatgcccaatgaagctagattaaggaatctcacgtattctgctccgctttatgttgatataacaaaaacagtcattaaagaaggtgaagaacaacttcagactcagcatcagaaaacttttataggaaaaattccaattatgttgcggtcaacttactgccttttgaatggcttgacagatcgtgatctttgtgagttaaatgaatgccctttggatcctggtggctatttcattattaatggatcagaaaaggttctgattgcccaagagaaaatggcaacaaacacagtttatgtgtttgccaaaaaggattctaaatatgcctacacaggagagtgtagatcatgtcttgagaattcttcccgacccaccagtactatatgggttagcatgctggcaagaggaggacagggtgccaagaagagtgctattggtcagcgcattgtggcaactctaccatatatcaagcaagaagttcccatcattattgtgttcagagcattaggttttgtgtccgacagagatattttagaacatattatttatgattttgaagatccagagatgatggaaatggttaaaccttctctcgatgaagcttttgtcatccaagaacagaatgttgcactaaatttcattggttcaagaggagcaaagcctggtgttactaaagagaaaagaattaaatatgcaaaggaagttttacaaaaagaaatgctccctcatgttggtgtcagtgatttttgtgagaccaaaaaagcctatttcttgggatacatggttcataggttacttctggcagctttgggtagaagagaactagatgacagagatcactatggaaacaagagattggatcttgctgggccgctgcttgcattcttatttagaggtatgtttaagaatttgcttaaagaagtgcggatctatgcacagaaatttattgatcgaggaaaggattttaacttggagttggcaattaaaacacggatcatatctgatggcctaaaatactctttagctactggaaactggggtgatcaaaagaaagctcatcaagccagagctggagtatctcaggtgttaaaccgcctgacttttgcgtctactctttctcacctgcgtcgtttaaattctcctattggtagagacggcaagctagcaaaaccaagacagttgcataatacgttgtggggaatggtgtgtcctgccgagaccccagagggccatgctgtaggacttgtgaagaatttagccttgatggcgtatatttcagttggatctcaaccatctccaattctggaatttttagaagaatggagtatggaaaatttagaagaaatttctcctgcagctattgctgatgcaaccaagatttttgttaatggctgctgggttggaatacataaagatcccgaacaacttatgaacaccctaaggaaattgagacgtcagatggacatcattgtgtctgaagtttctatgatcagagatattcgagagagggagattcggatctatacggatgcaggccgtatttgtagaccacttctgattgtggaaaaacaaaagctacttttgaagaagaggcatattgaccaattgaaagagagagaatataacaactatagttggcaggatcttgtggccagtggggtagtggagtatattgataccctggaagaagaaacagtgatgcttgcaatgactccagatgatttacaggagaaagaagtagcttattgttccacatatacacactgtgagattcatccctcaatgatccttggtgtctgtgcatctattattccctttcctgatcataaccagtcccctagaaacacataccagtctgctatgggtaagcaggctatgggagtttacatcaccaacttccatgttcgcatggacacattggcccatgttctctattatcctcaaaagccacttgtgactacacggtctatggaatatctacgatttagagagctgccagcaggcatcaactcaattgtggccattgcatcatacactggatataatcaggaagactctgttatcatgaatcgttcagctgtagaccgcggcttcttcaggtctgttttctatcgctcatacaaagaacaggagtctaaaaaaggatttgatcaagaagaagtttttgagaagcctacacgtgaaacatgccagggcatgaggcatgccatttacgacaagctggatgatgatggtttgatagctccaggggttcgtgtatcaggagatgatgttattataggcaaaacagtcaccttgcctgaaaatgaagatgaattggagagcaccaatagacgctataccaagagagactgtagcacttttctcagaactagtgagacgggcattgtggatcaggttatggtaactctcaatcaggaaggatataaattttgtaaaataagggtacgctctgttaggattccacagattggagacaaatttgctagtcgacatggtcaaaagggtacttgtggtattcagtatagacaagaggatatgcctttcacctgtgaaggtatcacccctgatatcatcatcaatccccatgccatcccctctcgtatgactattggtcacttaattgaatgccttcaagggaaggtatcggctaacaagggtgaaattggtgatgccactccatttaatgatgctgttaacgtgcagaagatttctaatcttttatctgattatggctatcatctcagaggaaatgaggtcctgtacaatgggttcactggtcgaaaaatcacatcacaaatatttattggccccacttattaccagcgtttgaagcatatggtggatgataagattcactctcgtgctaggggacctattcagatcctcaatagacagcccatggagggtagatctcgtgatggtggcctgcgttttggagaaatggaacgagattgtcagattgcccatggagcagcccagtttttaagggaaagattgtttgaggcatcagatccatatcaggttcatgtttgcaatctttgtggaataatggcgattgccaacaccaggacccatacatatgaatgcaggggctgccgcaataaaacccagatttctttggtgcgaatgccttacgcatgcaaactattgtttcaggaacttatgtctatgagtattgcaccgcgaatgatgagtgtttagctattttacaggagtcaacaagataattaaatatcttggtgtcttgtttctattgtgtggctttttaaaaatgacaaatatgtactgtgttgtgataaaaagtattttatttgtttaatgatatgcatgcttttcttctgtaaatatataataaatttttgtagatagtcttgatgtgtgatctttattttgtatttctctgtgtaaaaccagtgaatataactaaagtgttagtggattggattaaaagaaacttattaggcaagaacaggtaatgtagttatccatgactacttttttcactggtatttcatgtaaggcatcaaccactgtaatttttgctgatgctgaagcctgtccttgggaattggatgcatggcactcatattctccagcatcttccttacttagaggagataccagcacccagccagttacttcatgcttttctgggccaccccgggtctgaatggccaggttgtcccggtcaccaggcaggagttctgtcctttgaactccatagtgacccctttttaccttgttccagatgaggacaggtgtcgggattccgatgacctcacagctcaagtacacctgggcaccagtgacattccagatgtccttggggggcgtcactatggaaggaccttgctcgcaggtgcccttgctgacctgggtgatggccttctccccgcggctctcggccctctggctggcggcgcgcagctggcagccgctcgggtaggtggtgccgtcgctgccgcacaccgggtagcggctcttgcacacgcacacgccgcttacacccggaccgccggctgctgccccggctttacccctccgcctcttgcggctcttcacgcactccatgcccggcgcgcagtaccccctgccggcgccgccacccccgcacggctcgccctcgccgcgggcgcacatagggcagcagccgcacgcgtcgcgggtctcgcccagcaggcagcccagcgggggcaggggcgggcaggaggccggctcgcaggggccgcaggtgtccgaagaggaggaagaggagaggggcaggagcaggagcagcagcccagcggcgccgaggagcagggcgcgcagcgacggccgctccatggcggggtgcggtggcagcggcaagggcgcgagtgagccgtgtcgggccggccggcgccttaaacccgccgccccgcccggcctgtccgcg

SEQ ID NO: 419566 - DNA, 5218 bp, Homo sapiens
aggcactggaggattgagctaggtgggcagaaaagagcagtgagtgttttgggttttttcactttcaggcttaacgcctcactgctagcacaagccgcccttaataaatcacacttaaaaaggagcttccggggtcgggcgcggtggctcacgcctgtaatcccagcaatttgggaggccgaggcgggcggatcatgaggtcaggagatcgagaccatcctggcttacacggtgtcgttatttgtgcaacaacattgaaaaacaagcagaaataaaacattgacggaacggatacgaccgcagattgcgggagctgtcctctcaatcggcccggcagcggcggcccacaatttacgcgtgtgcaaccctaaccccggcccaagcttgacctacaatttgcgcaggcgcagatcctaactttggcgtccctgtgggcggcctttggtgtgagacgcgtggtattctgggaacgtcggagacggaagttacttcgtctttagctcctggcgctgctggcttctgggcggttttgtcttttgatttcaagagttaggagctcgagaaccgtttggcaatatgtacgacgcggatgaggatatgcaatatgatgaggatgatgatgaaatcaccccggatttgtggcaagaagcatgctggattgtaatcagccacgatatttgctgaagtttgaacaaatttatctttccaagcctacccattgggaaagagatggtgctccttcaccaatgatgcccaatgaagctagattaaggaatctcacgtattctgctccgctttatgttgatataacaaaaacagtcattaaagaaggtgaagaacaacttcagactcagcatcagaaaacttttataggaaaaattccaattatgttgcggtcaacttactgccttttgaatggcttgacagatcgtgatctttgtgagttaaatgaatgccctttggatcctggtggctatttcattattaatggatcagaaaaggttctgattgcccaagagaaaatggcaacaaacacagtttatgtgtttgccaaaaaggattctaaatatgcctacacaggagagtgtagatcatgtcttgagaattcttcccgacccaccagtactatatgggttagcatgctggcaagaggaggacagggtgccaagaagagtgctattggtcagcgcattgtggcaactctaccatatatcaagcaagaagttcccatcattattgtgttcagagcattaggttttgtgtccgacagagatattttagaacatattatttatgattttgaagatccagagatgatggaaatggttaaaccttctctcgatgaagcttttgtcatccaagaacagaatgttgcactaaatttcattggttcaagaggagcaaagcctggtgttactaaagagaaaagaattaaatatgcaaaggaagttttacaaaaagaaatgctccctcatgttggtgtcagtgatttttgtgagaccaaaaaagcctatttcttgggatacatggttcataggttacttctggcagctttgggtagaagagaactagatgacagagatcactatggaaacaagagattggatcttgctgggccgctgcttgcattcttatttagaggtatgtttaagaatttgcttaaagaagtgcggatctatgcacagaaatttattgatcgaggaaaggattttaacttggagttggcaattaaaacacggatcatatctgatggcctaaaatactctttagctactggaaactggggtgatcaaaagaaagctcatcaagccagagctggagtatctcaggtgttaaaccgcctgacttttgcgtctactctttctcacctgcgtcgtttaaattctcctattggtagagacggcaagctagcaaaaccaagacagttgcataatacgttgtggggaatggtgtgtcctgccgagaccccagagggccatgctgtaggacttgtgaagaatttagccttgatggcgtatatttcagttggatctcaaccatctccaattctggaatttttagaagaatggagtatggaaaatttagaagaaatttctcctgcagctattgctgatgcaaccaagatttttgttaatggctgctgggttggaatacataaagatcccgaacaacttatgaacaccctaaggaaattgagacgtcagatggacatcattgtgtctgaagtttctatgatcagagatattcgagagagggagattcggatctatacggatgcaggccgtatttgtagaccacttctgattgtggaaaaacaaaagctacttttgaagaagaggcatattgaccaattgaaagagagagaatataacaactatagttggcaggatcttgtggccagtggggtagtggagtatattgataccctggaagaagaaacagtgatgcttgcaatgactccagatgatttacaggagaaagaagtagcttattgttccacatatacacactgtgagattcatccctcaatgatccttggtgtctgtgcatctattattccctttcctgatcataaccagtcccctagaaacacataccagtctgctatgggtaagcaggctatgggagtttacatcaccaacttccatgttcgcatggacacattggcccatgttctctattatcctcaaaagccacttgtgactacacggtctatggaatatctacgatttagagagctgccagcaggcatcaactcaattgtggccattgcatcatacactggatataatcaggaagactctgttatcatgaatcgttcagctgtagaccgcggcttcttcaggtctgttttctatcgctcatacaaagaacaggagtctaaaaaaggatttgatcaagaagaagtttttgagaagcctacacgtgaaacatgccagggcatgaggcatgccatttacgacaagctggatgatgatggtttgatagctccaggggttcgtgtatcaggagatgatgttattataggcaaaacagtcaccttgcctgaaaatgaagatgaattggagagcaccaatagacgctataccaagagagactgtagcacttttctcagaactagtgagacgggcattgtggatcaggttatggtaactctcaatcaggaaggatataaattttgtaaaataagggtacgctctgttaggattccacagattggagacaaatttgctagtcgacatggtcaaaagggtacttgtggtattcagtatagacaagaggatatgcctttcacctgtgaaggtatcacccctgatatcatcatcaatccccatgccatcccctctcgtatgactattggtcacttaattgaatgccttcaagggaaggtatcggctaacaagggtgaaattggtgatgccactccatttaatgatgctgttaacgtgcagaagatttctaatcttttatctgattatggctatcatctcagaggaaatgaggtcctgtacaatgggttcactggtcgaaaaatcacatcacaaatatttattggccccacttattaccagcgtttgaagcatatggtggatgataagattcactctcgtgctaggggacctattcagatcctcaatagacagcccatggagggtagatctcgtgatggtggcctgcgttttggagaaatggaacgagattgtcagattgcccatggagcagcccagtttttaagggaaagattgtttgaggcatcagatccatatcaggttcatgtttgcaatctttgtggaataatggcgattgccaacaccaggacccatacatatgaatgcaggggctgccgcaataaaacccagatttctttggtgcgaatgccttacgcatgcaaactattgtttcaggaacttatgtctatgagtattgcaccgcgaatgatgagtgtttagctattttacaggagtcaacaagataattaaatatcttggtgtcttgtttctattgtgtggctttttaaaaatgacaaatatgtactgtgttgtgataaaaagtattttatttgtttaatgatatgcatgcttttcttctgtaaatatataataaatttttgtagatagtcttgatgtgtgatctttattttgtatttctctgtgtaaaaccagtgaatataactaaagtgttagtggattggattaaaagaaacttattaggcaagaacaggtaatgtagttatccatgactacttttaaccatgcagactaataatattctggaggtttatagctcggcaccttcaccttttttcactggtatttcatgtaaggcatcaaccactgtaatttttgctgatgctgaagcctgtccttgggaattggatgcatggcactcatattctccagcatcttccttacttagaggagataccagcacccagccagttacttcatgcttttctgggccaccccgggtctgaatggccaggttgtcccggtcaccaggcaggagttctgtcctttgaactccatagtgacccctttttaccttgttccagatgaggacaggtgtcgggattccgatgacctcacagctcaagtacacctgggcaccagtgacattccagatgtccttggggggcgtcactatggaaggaccttgctcgcaggtgcccttgctgacctgggtgatggccttctccccgcggctctcggccctctggctggcggcgcgcagctggcagccgctcgggtaggtggtgccgtcgctgccgcacaccgggtagcggctcttgcacacgcacacgccgcttacacccggaccgccggctgctgccccggctttacccctccgcctcttgcggctcttcacgcactccatgcccggcgcgcagtaccccctgccggcgccgccacccccgcacggctcgccctcgccgcgggcgcacatagggcagcagccgcacgcgtcgcgggtctcgcccagcaggcagcccagcgggggcaggggcgggcaggaggccggctcgcaggggccgcaggtgtccgaagaggaggaagaggagaggggcaggagcaggagcagcagcccagcggcgccgaggagcagggcgcgcagcgacggccgctccatggcggggtgcggtggcagcggcaagggcgcgagtgagccgtgtcgggccggccggcgccttaaacccgccgccccgcccggcctgtccgcg

SEQ ID NO: 419567 - DNA, 3279 bp, Homo sapiens
agcggggtgtggggaaatggtgttctgcgaaccaggccatgctgtaggacttgtgaagaatttagccttgatggcgtatatttcagttggatctcaaccatctccaattctggaatttttagaagaatggagtatggaaaatttagaagaaatttctcctgcagctattgctgatgcaaccaagatttttgttaatggctgctgggttggaatacataaagatcccgaacaacttatgaacaccctaaggaaattgagacgtcagatggacatcattgtgtctgaagtttctatgatcagagatattcgagagagggagattcggatctatacggatgcaggccgtatttgtagaccacttctgattgtggaaaaacaaaagctacttttgaagaagaggcatattgaccaattgaaagagagagaatataacaactatagttggcaggatcttgtggccagtggggtagtggagtatattgataccctggaagaagaaacagtgatgcttgcaatgactccagatgatttacaggagaaagaagtagcttattgttccacatatacacactgtgagattcatccctcaatgatccttggtgtctgtgcatctattattccctttcctgatcataaccagtcccctagaaacacataccagtctgctatgggtaagcaggctatgggagtttacatcaccaacttccatgttcgcatggacacattggcccatgttctctattatcctcaaaagccacttgtgactacacggtctatggaatatctacgatttagagagctgccagcaggcatcaactcaattgtggccattgcatcatacactggatataatcaggaagactctgttatcatgaatcgttcagctgtagaccgcggcttcttcaggtctgttttctatcgctcatacaaagaacaggagtctaaaaaaggatttgatcaagaagaagtttttgagaagcctacacgtgaaacatgccagggcatgaggcatgccatttacgacaagctggatgatgatggtttgatagctccaggggttcgtgtatcaggagatgatgttattataggcaaaacagtcaccttgcctgaaaatgaagatgaattggagagcaccaatagacgctataccaagagagactgtagcacttttctcagaactagtgagacgggcattgtggatcaggttatggtaactctcaatcaggaaggatataaattttgtaaaataagggtacgctctgttaggattccacagattggagacaaatttgctagtcgacatggtcaaaagggtacttgtggtattcagtatagacaagaggatatgcctttcacctgtgaaggtatcacccctgatatcatcatcaatccccatgccatcccctctcgtatgactattggtcacttaattgaatgccttcaagggaaggtatcggctaacaagggtgaaattggtgatgccactccatttaatgatgctgttaacgtgcagaagatttctaatcttttatctgattatggctatcatctcagaggaaatgaggtcctgtacaatgggttcactggtcgaaaaatcacatcacaaatatttattggccccacttattaccagcgtttgaagcatatggtggatgataagattcactctcgtgctaggggacctattcagatcctcaatagacagcccatggagggtagatctcgtgatggtggcctgcgttttggagaaatggaacgagattgtcagattgcccatggagcagcccagtttttaagggaaagattgtttgaggcatcagatccatatcaggttcatgtttgcaatctttgtggaataatggcgattgccaacaccaggacccatacatatgaatgcaggggctgccgcaataaaacccagatttctttggtgcgaatgccttacgcatgcaaactattgtttcaggaacttatgtctatgagtattgcaccgcgaatgatgagtgtttagctattttacaggagtcaacaagataattaaatatcttggtgtcttgtttctattgtgtggctttttaaaaatgacaaatatgtactgtgttgtgataaaaagtattttatttgtttaatgatatgcatgcttttcttctgtaaatatataataaatttttgtagatagtcttgatgtgtgatctttattttgtatttctctgtgtaaaaccagtgaatataactaaagtgttagtggattggattaaaagaaacttattaggcaagaacaggtaatgtagttatccatgactacttttaaccatgcagactaataatattctggaggtttatagctcggcaccttcaccttttttcactggtatttcatgtaaggcatcaaccactgtaatttttgctgatgctgaagcctgtccttgggaattggatgcatggcactcatattctccagcatcttccttacttagaggagataccagcacccagccagttacttcatgcttttctgggccaccccgggtctgaatggccaggttgtcccggtcaccaggcaggagttctgtcctttgaactccatagtgacccctttttaccttgttccagatgaggacaggtgtcgggattccgatgacctcacagctcaagtacacctgggcaccagtgacattccagatgtccttggggggcgtcactatggaaggaccttgctcgcaggtgcccttgctgacctgggtgatggccttctccccgcggctctcggccctctggctggcggcgcgcagctggcagccgctcgggtaggtggtgccgtcgctgccgcacaccgggtagcggctcttgcacacgcacacgccgcttacacccggaccgccggctgctgccccggctttacccctccgcctcttgcggctcttcacgcactccatgcccggcgcgcagtaccccctgccggcgccgccacccccgcacggctcgccctcgccgcgggcgcacatagggcagcagccgcacgcgtcgcgggtctcgcccagcaggcagcccagcgggggcaggggcgggcaggaggccggctcgcaggggccgcaggtgtccgaagaggaggaagaggagaggggcaggagcaggagcagcagcccagcggcgccgaggagcagggcgcgcagcgacggccgctccatggcggggtgcggtggcagcggcaagggcgcgagtgagccgtgtcgggccggccggcgccttaaacccgccgccccgcccggcctgtccgcg

SEQ ID NO: 419568 - DNA, 5134 bp, Homo sapiens
aggcactggaggattgagctaggtgggcagaaaagagcagtgtcgttatttgtgcaacaacattgaaaaacaagcagaaataaaacattgacggaacggatacgaccgcagattgcgggagctgtcctctcaatcggcccggcagcggcggcccacaatttacgcgtgtgcaaccctaaccccggcccaagcttgacctacaatttgcgcaggcgcagatcctaactttggcgtccctgtgggcggcctttggtgtgagacgcgtggtattctgggaacgtcggagacggaagttacttcgtctttagctcctggcgctgctggcttctgggcggttttgtcttttgatttcaagagttaggagctcgagaaccgtttggcaatatgtacgacgcggatgaggatatgcaatatgatgaggatgatgatgaaatcaccccggatttgtggcaagaagcatgctggattgtaatcagttcctattttgacgagaaaggcttggttagacaacagctggattcttttgatgagtttattcagatgtctgttcaaagaattgtggaagacgctcctcctatagacctacaggctgaagctcagcatgctagtggagaagttgaagaaccgccacgatatttgctgaagtttgaacaaatttatctttccaagcctacccattgggaaagagatggtgctccttcaccaatgatgcccaatgaagctagattaaggaatctcacgtattctgctccgctttatgttgatataacaaaaacagtcattaaagaaggtgaagaacaacttcagactcagcatcagaaaacttttataggaaaaattccaattatgttgcggtcaacttactgccttttgaatggcttgacagatcgtgatctttgtgagttaaatgaatgccctttggatcctggtggctatttcattattaatggatcagaaaaggttctgattgcccaagagaaaatggcaacaaacacagtttatgtgtttgccaaaaaggattctaaatatgcctacacaggagagtgtagatcatgtcttgagaattcttcccgacccaccagtactatatgggttagcatgctggcaagaggaggacagggtgccaagaagagtgctattggtcagcgcattgtggcaactctaccatatatcaagcaagaagttcccatcattattgtgttcagagcattaggttttgtgtccgacagagatattttagaacatattatttatgattttgaagatccagagatgatggaaatggttaaaccttctctcgatgaagcttttgtcatccaagaacagaatgttgcactaaatttcattggttcaagaggagcaaagcctggtgttactaaagagaaaagaattaaatatgcaaaggaagttttacaaaaagaaatgctccctcatgttggtgtcagtgatttttgtgagaccaaaaaagcctatttcttgggatacatggttcataggttacttctggcagctttgggtagaagagaactagatgacagagatcactatggaaacaagagattggatcttgctgggccgctgcttgcattcttatttagaggtatgtttaagaatttgcttaaagaagtgcggatctatgcacagaaatttattgatcgaggaaaggattttaacttggagttggcaattaaaacacggatcatatctgatggcctaaaatactctttagctactggaaactggggtgatcaaaagaaagctcatcaagccagagctggagtatctcaggtgttaaaccgcctgacttttgcgtctactctttctcacctgcgtcgtttaaattctcctattggtagagacggcaagctagcaaaaccaagacagttgcataatacgttgtggggaatggtgtgtcctgccgagaccccagagggccatgctgtaggacttgtgaagaatttagccttgatggcgtatatttcagttggatctcaaccatctccaattctggaatttttagaagaatggagtatggaaaatttagaagaaatttctcctgcagctattgctgatgcaaccaagatttttgttaatggctgctgggttggaatacataaagatcccgaacaacttatgaacaccctaaggaaattgagacgtcagatggacatcattgtgtctgaagtttctatgatcagagatattcgagagagggagattcggatctatacggatgcaggccgtatttgtagaccacttctgattgtggaaaaacaaaagctacttttgaagaagaggcatattgaccaattgaaagagagagaatataacaactatagttggcaggatcttgtggccagtggggtagtggagtatattgataccctggaagaagaaacagtgatgcttgcaatgactccagatgatttacaggagaaagaagtagcttattgttccacatatacacactgtgagattcatccctcaatgatccttggtgtctgtgcatctattattccctttcctgatcataaccagtcccctagaaacacataccagtctgctatgggtaagcaggctatgggagtttacatcaccaacttccatgttcgcatggacacattggcccatgttctctattatcctcaaaagccacttgtgactacacggtctatggaatatctacgatttagagagctgccagcaggcatcaactcaattgtggccattgcatcatacactggatataatcaggaagactctgttatcatgaatcgttcagctgtagaccgcggcttcttcaggtctgttttctatcgctcatacaaagaacaggagtctaaaaaaggatttgatcaagaagaagtttttgagaagcctacacgtgaaacatgccagggcatgaggcatgccatttacgacaagctggatgatgatggtttgatagctccaggggttcgtgtatcaggagatgatgttattataggcaaaacagtcaccttgcctgaaaatgaagatgaattggagagcaccaatagacgctataccaagagagactgtagcacttttctcagaactagtgagacgggcattgtggatcaggttatggtaactctcaatcaggaaggatataaattttgtaaaataagggtacgctctgttaggattccacagattggagacaaatttgctagtcgacatggtcaaaagggtacttgtggtattcagtatagacaagaggatatgcctttcacctgtgaaggtatcacccctgatatcatcatcaatccccatgccatcccctctcgtatgactattggtcacttaattgaatgccttcaagggaaggtatcggctaacaagggtgaaattggtgatgccactccatttaatgatgctgttaacgtgcagaagatttctaatcttttatctgattatggctatcatctcagaggaaatgaggtcctgtacaatgggttcactggtcgaaaaatcacatcacaaatatttattggccccacttattaccagcgtttgaagcatatggtggatgataagattcactctcgtgctaggggacctattcagatcctcaatagacagcccatggagggtagatctcgtgatggtggcctgcgttttggagaaatggaacgagattgtcagattgcccatggagcagcccagtttttaagggaaagattgtttgaggcatcagatccatatcaggttcatgtttgcaatctttgtggaataatggcgattgccaacaccaggacccatacatatgaatgcaggggctgccgcaataaaacccagatttctttggtgcgaatgccttacgcatgcaaactattgtttcaggaacttatgtctatgagtattgcaccgcgaatgatgagtgtttagctattttacaggagtcaacaagataattaaatatcttggtgtcttgtttctattgtgtggctttttaaaaatgacaaatatgtactgtgttgtgataaaaagtattttatttgtttaatgatatgcatgcttttcttctgtaaatatataataaatttttgtagatagtcttgatgtgtgatctttattttgtatttctctgtgtaaaaccagtgaatataactaaagtgttagtggattggattaaaagaaacttattaggcaagaacaggtaatgtagttatccatgactacttttaaccatgcagactaataatattctggaggtttatagctcggcaccttcaccttttttcactggtatttcatgtaaggcatcaaccactgtaatttttgctgatgctgaagcctgtccttgggaattggatgcatggcactcatattctccagcatcttccttacttagaggagataccagcacccagccagttacttcatgcttttctgggccaccccgggtctgaatggccaggttgtcccggtcaccaggcaggagttctgtcctttgaactccatagtgacccctttttaccttgttccagatgaggacaggtgtcgggattccgatgacctcacagctcaagtacacctgggcaccagtgacattccagatgtccttggggggcgtcactatggaaggaccttgctcgcaggtgcccttgctgacctgggtgatggccttctccccgcggctctcggccctctggctggcggcgcgcagctggcagccgctcgggtaggtggtgccgtcgctgccgcacaccgggtagcggctcttgcacacgcacacgccgcttacacccggaccgccggctgctgccccggctttacccctccgcctcttgcggctcttcacgcactccatgcccggcgcgcagtaccccctgccggcgccgccacccccgcacggctcgccctcgccgcgggcgcacatagggcagcagccgcacgcgtcgcgggtctcgcccagcaggcagcccagcgggggcaggggcgggcaggaggccggctcgcaggggccgcaggtgtccgaagaggaggaagaggagaggggcaggagcaggagcagcagcccagcggcgccgaggagcagggcgcgcagcgacggccgctccatggcggggtgcggtggcagcggcaatcctaactcccgaccgtaccagcc

SEQ ID NO: 419569 - DNA, 2061 bp, Homo sapiens
aaattcggccattatggccgggtgtaaaataagggtacgctctgttaggattccacagattggagacaaatttgctagtcgacatggtcaaaagggtacttgtggtattcagtatagacaagaggatatgcctttcacctgtgaaggtatcacccctgatatcatcatcaatccccatgccatcccctctcgtatgactattggtcacttaattgaatgccttcaagggaaggtatcggctaacaagggtgaaattggtgatgccactccatttaatgatgctgttaacgtgcagaagatttctaatcttttatctgattatggctatcatctcagaggaaatgaggtcctgtacaatgggttcactggtcgaaaaatcacatcacaaatatttattggccccacttattaccagcgtttgaagcatatggtggatgataagattcactctcgtgctaggggacctattcagatcctcaatagacagcccatggagggtagatctcgtgatggtggcctgcgttttggagaaatggaacgagattgtcagattgcccatggagcagcccagtttttaagggaaagattgtttgaggcatcagatccatatcaggttcatgtttgcaatctttgtggaataatggcgattgccaacaccaggacccatacatatgaatgcaggggctgccgcaataaaacccagatttctttggtgcgaatgccttacgcatgcaaactattgtttcaggaacttatgtctatgagtattgcaccgcgaatgatgagtgtttagctattttacaggagtcaacaagataattaaatatcttggtgtcttgtttctattgtgtggctttttaaaaatgacaaatatgtactgtgttgtgataaaaagtattttatttgtttaatgatatgcatgcttttcttctgtaaatatataataaatttttgtagatagtcttgatgtgtgatctttattttgtatttctctgtgtaaaaccagtgaatataactaaagtgttagtggattggattaaaagaaacttattaggcaagaacaggtaatgtagttatccatgactacttttaaccatgcagactaataatattctggaggtttatagctcggcaccttcaccttttttcactggtatttcatgtaaggcatcaaccactgtaatttttgctgatgctgaagcctgtccttgggaattggatgcatggcactcatattctccagcatcttccttacttagaggagataccagcacccagccagttacttcatgcttttctgggccaccccgggtctgaatggccaggttgtcccggtcaccaggcaggagttctgtcctttgaactccatagtgacccctttttaccttgttccagatgaggacaggtgtcgggattccgatgacctcacagctcaagtacacctgggcaccagtgacattccagatgtccttggggggcgtcactatggaaggaccttgctcgcaggtgcccttgctgacctgggtgatggccttctccccgcggctctcggccctctggctggcggcgcgcagctggcagccgctcgggtaggtggtgccgtcgctgccgcacaccgggtagcggctcttgcacacgcacacgccgcttacacccggaccgccggctgctgccccggctttacccctccgcctcttgcggctcttcacgcactccatgcccggcgcgcagtaccccctgccggcgccgccacccccgcacggctcgccctcgccgcgggcgcacatagggcagcagccgcacgcgtcgcgggtctcgcccagcaggcagcccagcgggggcaggggcgggcaggaggccggctcgcaggggccgcaggtgtccgaagaggaggaagaggagaggggcaggagcaggagcagcagcccagcggcgccgaggagcagggcgcgcagcgacggccgctccatggcggggtgcggtggcagcggcaagggcgcgagtgagccgtgtcgggccggccggcgccttaaacccgccgccccgcccggcctgtccgcg

SEQ ID NO: 419570 - DNA, 1866 bp, Homo sapiens
attaaatggagtggcatcaccaatttcacccttgaaggtatcggctaacaagggtgaaattggtgatgccactccatttaatgatgctgttaacgtgcagaagatttctaatcttttatctgattatggctatcatctcagaggaaatgaggtcctgtacaatgggttcactggtcgaaaaatcacatcacaaatatttattggccccacttattaccagcgtttgaagcatatggtggatgataagattcactctcgtgctaggggacctattcagatcctcaatagacagcccatggagggtagatctcgtgatggtggcctgcgttttggagaaatggaacgagattgtcagattgcccatggagcagcccagtttttaagggaaagattgtttgaggcatcagatccatatcaggttcatgtttgcaatctttgtggaataatggcgattgccaacaccaggacccatacatatgaatgcaggggctgccgcaataaaacccagatttctttggtgcgaatgccttacgcatgcaaactattgtttcaggaacttatgtctatgagtattgcaccgcgaatgatgagtgtttagctattttacaggagtcaacaagataattaaatatcttggtgtcttgtttctattgtgtggctttttaaaaatgacaaatatgtactgtgttgtgataaaaagtattttatttgtttaatgatatgcatgcttttcttctgtaaatatataataaatttttgtagatagtcttgatgtgtgatctttattttgtatttctctgtgtaaaaccagtgaatataactaaagtgttagtggattggattaaaagaaacttattaggcaagaacaggtaatgtagttatccatgactacttttaaccatgcagactaataatattctggaggtttatagctcggcaccttcaccttttttcactggtatttcatgtaaggcatcaaccactgtaatttttgctgatgctgaagcctgtccttgggaattggatgcatggcactcatattctccagcatcttccttacttagaggagataccagcacccagccagttacttcatgcttttctgggccaccccgggtctgaatggccaggttgtcccggtcaccaggcaggagttctgtcctttgaactccatagtgacccctttttaccttgttccagatgaggacaggtgtcgggattccgatgacctcacagctcaagtacacctgggcaccagtgacattccagatgtccttggggggcgtcactatggaaggaccttgctcgcaggtgcccttgctgacctgggtgatggccttctccccgcggctctcggccctctggctggcggcgcgcagctggcagccgctcgggtaggtggtgccgtcgctgccgcacaccgggtagcggctcttgcacacgcacacgccgcttacacccggaccgccggctgctgccccggctttacccctccgcctcttgcggctcttcacgcactccatgcccggcgcgcagtaccccctgccggcgccgccacccccgcacggctcgccctcgccgcgggcgcacatagggcagcagccgcacgcgtcgcgggtctcgcccagcaggcagcccagcgggggcaggggcgggcaggaggccggctcgcaggggccgcaggtgtccgaagaggaggaagaggagaggggcaggagcaggagcagcagcccagcggcgccgaggagcagggcgcgcagcgacggccgctccatggcggggtgcggtggcagcggcaagggcgcgagtgagccgtgtcgggccggccggcgccttaaacccgccgccccgcccggcctgtccgcg

SEQ ID NO: 419571 - DNA, 1771 bp, Homo sapiens
ttctttgacgttgtttaatttttaggtctacacttcaaaatctgtgtttgttgcaggtcctgtacaatgggttcactggtcgaaaaatcacatcacaaatatttattggccccacttattaccagcgtttgaagcatatggtggatgataagattcactctcgtgctaggggacctattcagatcctcaatagacagcccatggagggtagatctcgtgatggtggcctgcgttttggagaaatggaacgagattgtcagattgcccatggagcagcccagtttttaagggaaagattgtttgaggcatcagatccatatcaggttcatgtttgcaatctttgtggaataatggcgattgccaacaccaggacccatacatatgaatgcaggggctgccgcaataaaacccagatttctttggtgcgaatgccttacgcatgcaaactattgtttcaggaacttatgtctatgagtattgcaccgcgaatgatgagtgtttagctattttacaggagtcaacaagataattaaatatcttggtgtcttgtttctattgtgtggctttttaaaaatgacaaatatgtactgtgttgtgataaaaagtattttatttgtttaatgatatgcatgcttttcttctgtaaatatataataaatttttgtagatagtcttgatgtgtgatctttattttgtatttctctgtgtaaaaccagtgaatataactaaagtgttagtggattggattaaaagaaacttattaggcaagaacaggtaatgtagttatccatgactacttttaaccatgcagactaataatattctggaggtttatagctcggcaccttcaccttttttcactggtatttcatgtaaggcatcaaccactgtaatttttgctgatgctgaagcctgtccttgggaattggatgcatggcactcatattctccagcatcttccttacttagaggagataccagcacccagccagttacttcatgcttttctgggccaccccgggtctgaatggccaggttgtcccggtcaccaggcaggagttctgtcctttgaactccatagtgacccctttttaccttgttccagatgaggacaggtgtcgggattccgatgacctcacagctcaagtacacctgggcaccagtgacattccagatgtccttggggggcgtcactatggaaggaccttgctcgcaggtgcccttgctgacctgggtgatggccttctccccgcggctctcggccctctggctggcggcgcgcagctggcagccgctcgggtaggtggtgccgtcgctgccgcacaccgggtagcggctcttgcacacgcacacgccgcttacacccggaccgccggctgctgccccggctttacccctccgcctcttgcggctcttcacgcactccatgcccggcgcgcagtaccccctgccggcgccgccacccccgcacggctcgccctcgccgcgggcgcacatagggcagcagccgcacgcgtcgcgggtctcgcccagcaggcagcccagcgggggcaggggcgggcaggaggccggctcgcaggggccgcaggtgtccgaagaggaggaagaggagaggggcaggagcaggagcagcagcccagcggcgccgaggagcagggcgcgcagcgacggccgctccatggcggggtgcggtggcagcggcaagggcgcgagtgagccgtgtcgggccggccggcgccttaaacccgccgccccgcccggcctgtccgcg

SEQ ID NO: 419572 - DNA, 1486 bp, Homo sapiens
tttgtgtgttctcagctccactcatttattcattatctacagtaccagatctttgtctttttctggggtagagaagtggggtcacttcaatacaattctgctaattaccatttgttttttcttttcagatttctttggtgcgaatgccttacgcatgcaaactattgtttcaggaacttatgtctatgagtattgcaccgcgaatgatgagtgtttagctattttacaggagtcaacaagataattaaatatcttggtgtcttgtttctattgtgtggctttttaaaaatgacaaatatgtactgtgttgtgataaaaagtattttatttgtttaatgatatgcatgcttttcttctgtaaatatataataaatttttgtagatagtcttgatgtgtgatctttattttgtatttctctgtgtaaaaccagtgaatataactaaagtgttagtggattggattaaaagaaacttattaggcaagaacaggtaatgtagttatccatgactacttttaaccatgcagactaataatattctggaggtttatagctcggcaccttcaccttttttcactggtatttcatgtaaggcatcaaccactgtaatttttgctgatgctgaagcctgtccttgggaattggatgcatggcactcatattctccagcatcttccttacttagaggagataccagcacccagccagttacttcatgcttttctgggccaccccgggtctgaatggccaggttgtcccggtcaccaggcaggagttctgtcctttgaactccatagtgacccctttttaccttgttccagatgaggacaggtgtcgggattccgatgacctcacagctcaagtacacctgggcaccagtgacattccagatgtccttggggggcgtcactatggaaggaccttgctcgcaggtgcccttgctgacctgggtgatggccttctccccgcggctctcggccctctggctggcggcgcgcagctggcagccgctcgggtaggtggtgccgtcgctgccgcacaccgggtagcggctcttgcacacgcacacgccgcttacacccggaccgccggctgctgccccggctttacccctccgcctcttgcggctcttcacgcactccatgcccggcgcgcagtaccccctgccggcgccgccacccccgcacggctcgccctcgccgcgggcgcacatagggcagcagccgcacgcgtcgcgggtctcgcccagcaggcagcccagcgggggcaggggcgggcaggaggccggctcgcaggggccgcaggtgtccgaagaggaggaagaggagaggggcaggagcaggagcagcagcccagcggcgccgaggagcagggcgcgcagcgacggccgctccatggcggggtgcggtggcagcggcaagggcgcgagtgagccgtgtcgggccggccggcgccttaaacccgccgccccgcccggcctgtccgcg

SEQ ID NO: 419573 - DNA, 1205 bp, Homo sapiens
cgtcgacttttttttcctcctttgtgttgtgataaaaagtattttatttgtttaatgatatgcatgcttttcttctgtaaatatataataaatttttgtagatagtcttgatgtgtgatctttattttgtatttctctgtgtaaaaccagtgaatataactaaagtgttagtggattggattaaaagaaacttattaggcaagaacaggtaatgtagttatccatgactacttttaaccatgcagactaataatattctggaggtttatagctcggcaccttcaccttttttcactggtatttcatgtaaggcatcaaccactgtaatttttgctgatgctgaagcctgtccttgggaattggatgcatggcactcatattctccagcatcttccttacttagaggagataccagcacccagccagttacttcatgcttttctgggccaccccgggtctgaatggccaggttgtcccggtcaccaggcaggagttctgtcctttgaactccatagtgacccctttttaccttgttccagatgaggacaggtgtcgggattccgatgacctcacagctcaagtacacctgggcaccagtgacattccagatgtccttggggggcgtcactatggaaggaccttgctcgcaggtgcccttgctgacctgggtgatggccttctccccgcggctctcggccctctggctggcggcgcgcagctggcagccgctcgggtaggtggtgccgtcgctgccgcacaccgggtagcggctcttgcacacgcacacgccgcttacacccggaccgccggctgctgccccggctttacccctccgcctcttgcggctcttcacgcactccatgcccggcgcgcagtaccccctgccggcgccgccacccccgcacggctcgccctcgccgcgggcgcacatagggcagcagccgcacgcgtcgcgggtctcgcccagcaggcagcccagcgggggcaggggcgggcaggaggccggctcgcaggggccgcaggtgtccgaagaggaggaagaggagaggggcaggagcaggagcagcagcccagcggcgccgaggagcagggcgcgcagcgacggccgctccatggcggggtgcggtggcagcggcaagggcgcgagtgagccgtgtcgggccggccggcgccttaaacccgccgccccgcccggcctgtccgcg

SEQ ID NO: 419574 - DNA, 4661 bp, Homo sapiens
aggcactggaggattgagctaggtgggcagaaaagagcagtgtcgttatttgtgcaacaacattgaaaaacaagcagaaataaaacattgacggaacggatacgaccgcagattgcgggagctgtcctctcaatcggcccggcagcggcggcccacaatttacgcgtgtgcaaccctaaccccggcccaagcttgacctacaatttgcgcaggcgcagatcctaactttggcgtccctgtgggcggcctttggtgtgagacgcgtggtattctgggaacgtcggagacggaagttacttcgtctttagctcctggcgctgctggcttctgggcggttttgtcttttgatttcaagagttaggagctcgagaaccgtttggcaatatgtacgacgcggatgaggatatgcaatatgatgaggatgatgatgaaatcaccccggatttgtggcaagaagcatgctggattgtaatcagttcctattttgacgagaaaggcttggttagacaacagctggattcttttgatgagtttattcagatgtctgttcaaagaattgtggaagacgctcctcctatagacctacaggctgaagctcagcatgctagtggagaagttgaagaaccgccacgatatttgctgaagtttgaacaaatttatctttccaagcctacccattgggaaagagatggtgctccttcaccaatgatgcccaatgaagctagattaaggaatctcacgtattctgctccgctttatgttgatataacaaaaacagtcattaaagaaggtgaagaacaacttcagactcagcatcagaaaacttttataggaaaaattccaattatgttgcggtcaacttactgccttttgaatggcttgacagatcgtgatctttgtgagttaaatgaatgccctttggatcctggtggctatttcattattaatggatcagaaaaggttctgattgcccaagagaaaatggcaacaaacacagtttatgtgtttgccaaaaaggattctaaatatgcctacacaggagagtgtagatcatgtcttgagaattcttcccgacccaccagtactatatgggttagcatgctggcaagaggaggacagggtgccaagaagagtgctattggtcagcgcattgtggcaactctaccatatatcaagcaagaagttcccatcattattgtgttcagagcattaggttttgtgtccgacagagatattttagaacatattatttatgattttgaagatccagagatgatggaaatggttaaaccttctctcgatgaagcttttgtcatccaagaacagaatgttgcactaaatttcattggttcaagaggagcaaagcctggtgttactaaagagaaaagaattaaatatgcaaaggaagttttacaaaaagaaatgctccctcatgttggtgtcagtgatttttgtgagaccaaaaaagcctatttcttgggatacatggttcataggttacttctggcagctttgggtagaagagaactagatgacagagatcactatggaaacaagagattggatcttgctgggccgctgcttgcattcttatttagaggtatgtttaagaatttgcttaaagaagtgcggatctatgcacagaaatttattgatcgaggaaaggattttaacttggagttggcaattaaaacacggatcatatctgatggcctaaaatactctttagctactggaaactggggtgatcaaaagaaagctcatcaagccagagctggagtatctcaggtgttaaaccgcctgacttttgcgtctactctttctcacctgcgtcgtttaaattctcctattggtagagacggcaagctagcaaaaccaagacagttgcataatacgttgtggggaatggtgtgtcctgccgagaccccagagggccatgctgtaggacttgtgaagaatttagccttgatggcgtatatttcagttggatctcaaccatctccaattctggaatttttagaagaatggagtatggaaaatttagaagaaatttctcctgcagctattgctgatgcaaccaagatttttgttaatggctgctgggttggaatacataaagatcccgaacaacttatgaacaccctaaggaaattgagacgtcagatggacatcattgtgtctgaagtttctatgatcagagatattcgagagagggagattcggatctatacggatgcaggccgtatttgtagaccacttctgattgtggaaaaacaaaagctacttttgaagaagaggcatattgaccaattgaaagagagagaatataacaactatagttggcaggatcttgtggccagtggggtagtggagtatattgataccctggaagaagaaacagtgatgcttgcaatgactccagatgatttacaggagaaagaagtagcttattgttccacatatacacactgtgagattcatccctcaatgatccttggtgtctgtgcatctattattccctttcctgatcataaccagtcccctagaaacacataccagtctgctatgggtaagcaggctatgggagtttacatcaccaacttccatgttcgcatggacacattggcccatgttctctattatcctcaaaagccacttgtgactacacggtctatggaatatctacgatttagagagctgccagcaggcatcaactcaattgtggccattgcatcatacactggatataatcaggaagactctgttatcatgaatcgttcagctgtagaccgcggcttcttcaggtctgttttctatcgctcatacaaagaacaggagtctaaaaaaggatttgatcaagaagaagtttttgagaagcctacacgtgaaacatgccagggcatgaggcatgccatttacgacaagctggatgatgatggtttgatagctccaggggttcgtgtatcaggagatgatgttattataggcaaaacagtcaccttgcctgaaaatgaagatgaattggagagcaccaatagacgctataccaagagagactgtagcacttttctcagaactagtgagacgggcattgtggatcaggttatggtaactctcaatcaggaaggatataaattttgtaaaataagggtacgctctgttaggattccacagattggagacaaatttgctagtcgacatggtcaaaagggtacttgtggtattcagtatagacaagaggatatgcctttcacctgtgaaggtatcacccctgatatcatcatcaatccccatgccatcccctctcgtatgactattggtcacttaattgaatgccttcaagggaaggtatcggctaacaagggtgaaattggtgatgccactccatttaatgatgctgttaacgtgcagaagatttctaatcttttatctgattatggctatcatctcagaggaaatgaggtcctgtacaatgggttcactggtcgaaaaatcacatcacaaatatttattggccccacttattaccagcgtttgaagcatatggtggatgataagattcactctcgtgctaggggacctattcagatcctcaatagacagcccatggagggtagatctcgtgatggtggcctgcgttttggagaaatggaacgagattgtcagattgcccatggagcagcccagtttttaagggaaagattgtttgaggcatcagatccatatcaggttcatgtttgcaatctttgtggaataatggcgattgccaacaccaggacccatacatatgaatgcaggggctgccgcaataaaacccagatttctttggtgcgaatgccttacgcatgcaaactattgtttcaggaacttatgtctatgagtattgcaccgcgaatgatgagtgtttagctattttacaggagtcaacaagataattaaatatcttggtgtcttgtttctattgtgtggctttttaaaaatgacaaatatgtactgtgttgtgataaaaagtattttatttgtttaatgatatgcatgcttttcttctgtaaatatataataaatttttgtagatagtcttgatgtgtgatctttattttgtatttctctgtgtaaaaccagtgaatataactaaagtgttagtggattggattaaaagaaacttattaggcaagaacaggtaatgtagttatccatgactacttttaaccatgcagactaataatattctggaggtttatagctcggcaccttcaccttttttcactggtatttcatgtaaggcatcaaccactgtaatttttgctgatgctgaagcctgtccttgggaattggatgcatggcactcatattctccagcatcttccttacttagaggagataccagcacccagccagttacttcatgcttttctgggccaccccgggtctgaatggccaggttgtcccggtcaccaggcaggagttctgtcctttgaactccatagtgacccctttttaccttgttccagatgaggacaggtgtcgggattccgatgacctcacagctcaagtacacctgggcaccagtgacattccagatgtccttggggggcgtcactatggaaggacctgctcgcagtgcctgatgccctaaagggatcctctagctcacctgcagc

SEQ ID NO: 419575 - DNA, 4728 bp, Homo sapiens
aggcactggaggattgagctaggtgggcagaaaagagcagtgtcgttatttgtgcaacaacattgaaaaacaagcagaaataaaacattgacggaacggatacgaccgcagattgcgggagctgtcctctcaatcggcccggcagcggcggcccacaatttacgcgtgtgcaaccctaaccccggcccaagcttgacctacaatttgcgcaggcgcagatcctaactttggcgtccctgtgggcggcctttggtgtgagacgcgtggtattctgggaacgtcggagacggaagttacttcgtctttagctcctggcgctgctggcttctgggcggttttgtcttttgatttcaagagttaggagctcgagaaccgtttggcaatatgtacgacgcggatgaggatatgcaatatgatgaggatgatgatgaaatcaccccggatttgtggcaagaagcatgctggattgtaatcagttcctattttgacgagaaaggcttggttagacaacagctggattcttttgatgagtttattcagatgtctgttcaaagaattgtggaagacgctcctcctatagacctacaggctgaagctcagcatgctagtggagaagttgaagaaccgccacgatatttgctgaagtttgaacaaatttatctttccaagcctacccattgggaaagagatggtgctccttcaccaatgatgcccaatgaagctagattaaggaatctcacgtattctgctccgctttatgttgatataacaaaaacagtcattaaagaaggtgaagaacaacttcagactcagcatcagaaaacttttataggaaaaattccaattatgttgcggtcaacttactgccttttgaatggcttgacagatcgtgatctttgtgagttaaatgaatgccctttggatcctggtggctatttcattattaatggatcagaaaaggttctgattgcccaagagaaaatggcaacaaacacagtttatgtgtttgccaaaaaggattctaaatatgcctacacaggagagtgtagatcatgtcttgagaattcttcccgacccaccagtactatatgggttagcatgctggcaagaggaggacagggtgccaagaagagtgctattggtcagcgcattgtggcaactctaccatatatcaagcaagaagttcccatcattattgtgttcagagcattaggttttgtgtccgacagagatattttagaacatattatttatgattttgaagatccagagatgatggaaatggttaaaccttctctcgatgaagcttttgtcatccaagaacagaatgttgcactaaatttcattggttcaagaggagcaaagcctggtgttactaaagagaaaagaattaaatatgcaaaggaagttttacaaaaagaaatgctccctcatgttggtgtcagtgatttttgtgagaccaaaaaagcctatttcttgggatacatggttcataggttacttctggcagctttgggtagaagagaactagatgacagagatcactatggaaacaagagattggatcttgctgggccgctgcttgcattcttatttagaggtatgtttaagaatttgcttaaagaagtgcggatctatgcacagaaatttattgatcgaggaaaggattttaacttggagttggcaattaaaacacggatcatatctgatggcctaaaatactctttagctactggaaactggggtgatcaaaagaaagctcatcaagccagagctggagtatctcaggtgttaaaccgcctgacttttgcgtctactctttctcacctgcgtcgtttaaattctcctattggtagagacggcaagctagcaaaaccaagacagttgcataatacgttgtggggaatggtgtgtcctgccgagaccccagagggccatgctgtaggacttgtgaagaatttagccttgatggcgtatatttcagttggatctcaaccatctccaattctggaatttttagaagaatggagtatggaaaatttagaagaaatttctcctgcagctattgctgatgcaaccaagatttttgttaatggctgctgggttggaatacataaagatcccgaacaacttatgaacaccctaaggaaattgagacgtcagatggacatcattgtgtctgaagtttctatgatcagagatattcgagagagggagattcggatctatacggatgcaggccgtatttgtagaccacttctgattgtggaaaaacaaaagctacttttgaagaagaggcatattgaccaattgaaagagagagaatataacaactatagttggcaggatcttgtggccagtggggtagtggagtatattgataccctggaagaagaaacagtgatgcttgcaatgactccagatgatttacaggagaaagaagtagcttattgttccacatatacacactgtgagattcatccctcaatgatccttggtgtctgtgcatctattattccctttcctgatcataaccagtcccctagaaacacataccagtctgctatgggtaagcaggctatgggagtttacatcaccaacttccatgttcgcatggacacattggcccatgttctctattatcctcaaaagccacttgtgactacacggtctatggaatatctacgatttagagagctgccagcaggcatcaactcaattgtggccattgcatcatacactggatataatcaggaagactctgttatcatgaatcgttcagctgtagaccgcggcttcttcaggtctgttttctatcgctcatacaaagaacaggagtctaaaaaaggatttgatcaagaagaagtttttgagaagcctacacgtgaaacatgccagggcatgaggcatgccatttacgacaagctggatgatgatggtttgatagctccaggggttcgtgtatcaggagatgatgttattataggcaaaacagtcaccttgcctgaaaatgaagatgaattggagagcaccaatagacgctataccaagagagactgtagcacttttctcagaactagtgagacgggcattgtggatcaggttatggtaactctcaatcaggaaggatataaattttgtaaaataagggtacgctctgttaggattccacagattggagacaaatttgctagtcgacatggtcaaaagggtacttgtggtattcagtatagacaagaggatatgcctttcacctgtgaaggtatcacccctgatatcatcatcaatccccatgccatcccctctcgtatgactattggtcacttaattgaatgccttcaagggaaggtatcggctaacaagggtgaaattggtgatgccactccatttaatgatgctgttaacgtgcagaagatttctaatcttttatctgattatggctatcatctcagaggaaatgaggtcctgtacaatgggttcactggtcgaaaaatcacatcacaaatatttattggccccacttattaccagcgtttgaagcatatggtggatgataagattcactctcgtgctaggggacctattcagatcctcaatagacagcccatggagggtagatctcgtgatggtggcctgcgttttggagaaatggaacgagattgtcagattgcccatggagcagcccagtttttaagggaaagattgtttgaggcatcagatccatatcaggttcatgtttgcaatctttgtggaataatggcgattgccaacaccaggacccatacatatgaatgcaggggctgccgcaataaaacccagatttctttggtgcgaatgccttacgcatgcaaactattgtttcaggaacttatgtctatgagtattgcaccgcgaatgatgagtgtttagctattttacaggagtcaacaagataattaaatatcttggtgtcttgtttctattgtgtggctttttaaaaatgacaaatatgtactgtgttgtgataaaaagtattttatttgtttaatgatatgcatgcttttcttctgtaaatatataataaatttttgtagatagtcttgatgtgtgatctttattttgtatttctctgtgtaaaaccagtgaatataactaaagtgttagtggattggattaaaagaaacttattaggcaagaacaggtaatgtagttatccatgactacttttaaccatgcagactaataatattctggaggtttatagctcggcaccttcaccttttttcactggtatttcatgtaaggcatcaaccactgtaatttttgctgatgctgaagcctgtccttgggaattggatgcatggcactcatattctccagcatcttccttacttagaggagataccagcacccagccagttacttcatgcttttctgggccaccccgggtctgaatggccaggttgtcccggtcaccaggcaggagttctgtcctttgaactccatagtgacccctttttaccttgttccagatgaggacaggtgtcgggattccgatgacctcacagctcaagtacacctgggcaccagtgacattccagatgtccttggggggcgtcactatggaaggaccttcttgacgcgtggagtactgaaaatgccaacaggcaaacacccccaaaaggcagctccagagactatccggccacggcgtcggccctcctcccaatccgcaaaaatgtgcagtct

SEQ ID NO: 419576 - DNA, 4341 bp, Homo sapiens
aggcactggaggattgagctaggtgggcagaaaagagcagtgtcgttatttgtgcaacaacattgaaaaacaagcagaaataaaacattgacggaacggatacgaccgcagattgcgggagctgtcctctcaatcggcccggcagcggcggcccacaatttacgcgtgtgcaaccctaaccccggcccaagcttgacctacaatttgcgcaggcgcagatcctaactttggcgtccctgtgggcggcctttggtgtgagacgcgtggtattctgggaacgtcggagacggaagttacttcgtctttagctcctggcgctgctggcttctgggcggttttgtcttttgatttcaagagttaggagctcgagaaccgtttggcaatatgtacgacgcggatgaggatatgcaatatgatgaggatgatgatgaaatcaccccggatttgtggcaagaagcatgctggattgtaatcagttcctattttgacgagaaaggcttggttagacaacagctggattcttttgatgagtttattcagatgtctgttcaaagaattgtggaagacgctcctcctatagacctacaggctgaagctcagcatgctagtggagaagttgaagaaccgccacgatatttgctgaagtttgaacaaatttatctttccaagcctacccattgggaaagagatggtgctccttcaccaatgatgcccaatgaagctagattaaggaatctcacgtattctgctccgctttatgttgatataacaaaaacagtcattaaagaaggtgaagaacaacttcagactcagcatcagaaaacttttataggaaaaattccaattatgttgcggtcaacttactgccttttgaatggcttgacagatcgtgatctttgtgagttaaatgaatgccctttggatcctggtggctatttcattattaatggatcagaaaaggttctgattgcccaagagaaaatggcaacaaacacagtttatgtgtttgccaaaaaggattctaaatatgcctacacaggagagtgtagatcatgtcttgagaattcttcccgacccaccagtactatatgggttagcatgctggcaagaggaggacagggtgccaagaagagtgctattggtcagcgcattgtggcaactctaccatatatcaagcaagaagttcccatcattattgtgttcagagcattaggttttgtgtccgacagagatattttagaacatattatttatgattttgaagatccagagatgatggaaatggttaaaccttctctcgatgaagcttttgtcatccaagaacagaatgttgcactaaatttcattggttcaagaggagcaaagcctggtgttactaaagagaaaagaattaaatatgcaaaggaagttttacaaaaagaaatgctccctcatgttggtgtcagtgatttttgtgagaccaaaaaagcctatttcttgggatacatggttcataggttacttctggcagctttgggtagaagagaactagatgacagagatcactatggaaacaagagattggatcttgctgggccgctgcttgcattcttatttagaggtatgtttaagaatttgcttaaagaagtgcggatctatgcacagaaatttattgatcgaggaaaggattttaacttggagttggcaattaaaacacggatcatatctgatggcctaaaatactctttagctactggaaactggggtgatcaaaagaaagctcatcaagccagagctggagtatctcaggtgttaaaccgcctgacttttgcgtctactctttctcacctgcgtcgtttaaattctcctattggtagagacggcaagctagcaaaaccaagacagttgcataatacgttgtggggaatggtgtgtcctgccgagaccccagagggccatgctgtaggacttgtgaagaatttagccttgatggcgtatatttcagttggatctcaaccatctccaattctggaatttttagaagaatggagtatggaaaatttagaagaaatttctcctgcagctattgctgatgcaaccaagatttttgttaatggctgctgggttggaatacataaagatcccgaacaacttatgaacaccctaaggaaattgagacgtcagatggacatcattgtgtctgaagtttctatgatcagagatattcgagagagggagattcggatctatacggatgcaggccgtatttgtagaccacttctgattgtggaaaaacaaaagctacttttgaagaagaggcatattgaccaattgaaagagagagaatataacaactatagttggcaggatcttgtggccagtggggtagtggagtatattgataccctggaagaagaaacagtgatgcttgcaatgactccagatgatttacaggagaaagaagtagcttattgttccacatatacacactgtgagattcatccctcaatgatccttggtgtctgtgcatctattattccctttcctgatcataaccagtcccctagaaacacataccagtctgctatgggtaagcaggctatgggagtttacatcaccaacttccatgttcgcatggacacattggcccatgttctctattatcctcaaaagccacttgtgactacacggtctatggaatatctacgatttagagagctgccagcaggcatcaactcaattgtggccattgcatcatacactggatataatcaggaagactctgttatcatgaatcgttcagctgtagaccgcggcttcttcaggtctgttttctatcgctcatacaaagaacaggagtctaaaaaaggatttgatcaagaagaagtttttgagaagcctacacgtgaaacatgccagggcatgaggcatgccatttacgacaagctggatgatgatggtttgatagctccaggggttcgtgtatcaggagatgatgttattataggcaaaacagtcaccttgcctgaaaatgaagatgaattggagagcaccaatagacgctataccaagagagactgtagcacttttctcagaactagtgagacgggcattgtggatcaggttatggtaactctcaatcaggaaggatataaattttgtaaaataagggtacgctctgttaggattccacagattggagacaaatttgctagtcgacatggtcaaaagggtacttgtggtattcagtatagacaagaggatatgcctttcacctgtgaaggtatcacccctgatatcatcatcaatccccatgccatcccctctcgtatgactattggtcacttaattgaatgccttcaagggaaggtatcggctaacaagggtgaaattggtgatgccactccatttaatgatgctgttaacgtgcagaagatttctaatcttttatctgattatggctatcatctcagaggaaatgaggtcctgtacaatgggttcactggtcgaaaaatcacatcacaaatatttattggccccacttattaccagcgtttgaagcatatggtggatgataagattcactctcgtgctaggggacctattcagatcctcaatagacagcccatggagggtagatctcgtgatggtggcctgcgttttggagaaatggaacgagattgtcagattgcccatggagcagcccagtttttaagggaaagattgtttgaggcatcagatccatatcaggttcatgtttgcaatctttgtggaataatggcgattgccaacaccaggacccatacatatgaatgcaggggctgccgcaataaaacccagatttctttggtgcgaatgccttacgcatgcaaactattgtttcaggaacttatgtctatgagtattgcaccgcgaatgatgagtgtttagctattttacaggagtcaacaagataattaaatatcttggtgtcttgtttctattgtgtggctttttaaaaatgacaaatatgtactgtgttgtgataaaaagtattttatttgtttaatgatatgcatgcttttcttctgtaaatatataataaatttttgtagatagtcttgatgtgtgatctttattttgtatttctctgatgatccatgattttgagcacttttttatatgcctgtttgccatttgtatgttgtcttttgagaaatgtctattcagatcttttgcccattaaaaaatttagattattagatttttttcccatagagttgtttgggctccttatatattctgattaattttttatcagatgggtagtttgcaaatattatctcccattcggtgggttgtctctttgatttgttggattgt

SEQ ID NO: 419577 - DNA, 4393 bp, Homo sapiens
aggcactggaggattgagctaggtgggcagaaaagagcagtgtcgttatttgtgcaacaacattgaaaaacaagcagaaataaaacattgacggaacggatacgaccgcagattgcgggagctgtcctctcaatcggcccggcagcggcggcccacaatttacgcgtgtgcaaccctaaccccggcccaagcttgacctacaatttgcgcaggcgcagatcctaactttggcgtccctgtgggcggcctttggtgtgagacgcgtggtattctgggaacgtcggagacggaagttacttcgtctttagctcctggcgctgctggcttctgggcggttttgtcttttgatttcaagagttaggagctcgagaaccgtttggcaatatgtacgacgcggatgaggatatgcaatatgatgaggatgatgatgaaatcaccccggatttgtggcaagaagcatgctggattgtaatcagttcctattttgacgagaaaggcttggttagacaacagctggattcttttgatgagtttattcagatgtctgttcaaagaattgtggaagacgctcctcctatagacctacaggctgaagctcagcatgctagtggagaagttgaagaaccgccacgatatttgctgaagtttgaacaaatttatctttccaagcctacccattgggaaagagatggtgctccttcaccaatgatgcccaatgaagctagattaaggaatctcacgtattctgctccgctttatgttgatataacaaaaacagtcattaaagaaggtgaagaacaacttcagactcagcatcagaaaacttttataggaaaaattccaattatgttgcggtcaacttactgccttttgaatggcttgacagatcgtgatctttgtgagttaaatgaatgccctttggatcctggtggctatttcattattaatggatcagaaaaggttctgattgcccaagagaaaatggcaacaaacacagtttatgtgtttgccaaaaaggattctaaatatgcctacacaggagagtgtagatcatgtcttgagaattcttcccgacccaccagtactatatgggttagcatgctggcaagaggaggacagggtgccaagaagagtgctattggtcagcgcattgtggcaactctaccatatatcaagcaagaagttcccatcattattgtgttcagagcattaggttttgtgtccgacagagatattttagaacatattatttatgattttgaagatccagagatgatggaaatggttaaaccttctctcgatgaagcttttgtcatccaagaacagaatgttgcactaaatttcattggttcaagaggagcaaagcctggtgttactaaagagaaaagaattaaatatgcaaaggaagttttacaaaaagaaatgctccctcatgttggtgtcagtgatttttgtgagaccaaaaaagcctatttcttgggatacatggttcataggttacttctggcagctttgggtagaagagaactagatgacagagatcactatggaaacaagagattggatcttgctgggccgctgcttgcattcttatttagaggtatgtttaagaatttgcttaaagaagtgcggatctatgcacagaaatttattgatcgaggaaaggattttaacttggagttggcaattaaaacacggatcatatctgatggcctaaaatactctttagctactggaaactggggtgatcaaaagaaagctcatcaagccagagctggagtatctcaggtgttaaaccgcctgacttttgcgtctactctttctcacctgcgtcgtttaaattctcctattggtagagacggcaagctagcaaaaccaagacagttgcataatacgttgtggggaatggtgtgtcctgccgagaccccagagggccatgctgtaggacttgtgaagaatttagccttgatggcgtatatttcagttggatctcaaccatctccaattctggaatttttagaagaatggagtatggaaaatttagaagaaatttctcctgcagctattgctgatgcaaccaagatttttgttaatggctgctgggttggaatacataaagatcccgaacaacttatgaacaccctaaggaaattgagacgtcagatggacatcattgtgtctgaagtttctatgatcagagatattcgagagagggagattcggatctatacggatgcaggccgtatttgtagaccacttctgattgtggaaaaacaaaagctacttttgaagaagaggcatattgaccaattgaaagagagagaatataacaactatagttggcaggatcttgtggccagtggggtagtggagtatattgataccctggaagaagaaacagtgatgcttgcaatgactccagatgatttacaggagaaagaagtagcttattgttccacatatacacactgtgagattcatccctcaatgatccttggtgtctgtgcatctattattccctttcctgatcataaccagtcccctagaaacacataccagtctgctatgggtaagcaggctatgggagtttacatcaccaacttccatgttcgcatggacacattggcccatgttctctattatcctcaaaagccacttgtgactacacggtctatggaatatctacgatttagagagctgccagcaggcatcaactcaattgtggccattgcatcatacactggatataatcaggaagactctgttatcatgaatcgttcagctgtagaccgcggcttcttcaggtctgttttctatcgctcatacaaagaacaggagtctaaaaaaggatttgatcaagaagaagtttttgagaagcctacacgtgaaacatgccagggcatgaggcatgccatttacgacaagctggatgatgatggtttgatagctccaggggttcgtgtatcaggagatgatgttattataggcaaaacagtcaccttgcctgaaaatgaagatgaattggagagcaccaatagacgctataccaagagagactgtagcacttttctcagaactagtgagacgggcattgtggatcaggttatggtaactctcaatcaggaaggatataaattttgtaaaataagggtacgctctgttaggattccacagattggagacaaatttgctagtcgacatggtcaaaagggtacttgtggtattcagtatagacaagaggatatgcctttcacctgtgaaggtatcacccctgatatcatcatcaatccccatgccatcccctctcgtatgactattggtcacttaattgaatgccttcaagggaaggtatcggctaacaagggtgaaattggtgatgccactccatttaatgatgctgttaacgtgcagaagatttctaatcttttatctgattatggctatcatctcagaggaaatgaggtcctgtacaatgggttcactggtcgaaaaatcacatcacaaatatttattggccccacttattaccagcgtttgaagcatatggtggatgataagattcactctcgtgctaggggacctattcagatcctcaatagacagcccatggagggtagatctcgtgatggtggcctgcgttttggagaaatggaacgagattgtcagattgcccatggagcagcccagtttttaagggaaagattgtttgaggcatcagatccatatcaggttcatgtttgcaatctttgtggaataatggcgattgccaacaccaggacccatacatatgaatgcaggggctgccgcaataaaacccagatttctttggtgcgaatgccttacgcatgcaaactattgtttcaggaacttatgtctatgagtattgcaccgcgaatgatgagtgtttagctattttacaggagtcaacaagataattaaatatcttggtgtcttgtttctattgtgtggctttttaaaaatgacaaatatgtactgtgttgtgataaaaagtattttatttgtttaatgatatgcatgcttttcttctgtaaatatataataaatttttgtagatagtcaaaaaaaaaaaaaaaaaaaaaaaaaaaaaaaaaaaaaaaaaaaaaaaaaaaaaaaaaaaaaaaaaaaaaaaaaaaaaaaaaaaacaaaaaaaaaaacaaaaaacctaaaatactattaaaaaaaataatataaaaattaaacttcccataaatatacaacatcaaaaattctaaaaaactctaccttaccataaacttattccccttcaactaaatactccttttcccacttctcttaatctcttatatccccttaccaatttccttcacaaactcttcaccattctttattaacaaatttcaaaattctccct

SEQ ID NO: 419578 - DNA, 1116 bp, Homo sapiens
tttttctgacagcaatagatttattaagtatccccgaaaatataaacacaaaccagtaaaaaacaaaaccgtaaaacgtcaggcctggagctgcaataagacagagacaggagcagctcacacgtggcctaggtggggaggacgaggccataaatactgcaggagggcggcaagggagccctagggcgaggggaaagcagggtgtcggcagcgagatggctccgggggtttagacactgctggcttcggccccggccgccacctgcctctcactccagctgcgagcagcttcatccagcatcttccttacttagaggagataccagcacccagccagttacttcatgcttttctgggccaccccgggtctgaatggccaggttgtcccggtcaccaggcaggagttctgtcctttgaactccatagtgacccctttttaccttgttccagatgaggacaggtgtcgggattccgatgacctcacagctcaagtacacctgggcaccagtgacattccagatgtccttggggggcgtcactatggaaggaccttgctcgcaggtgcccttgctgacctgggtgatggccttctccccgcggctctcggccctctggctggcggcgcgcagctggcagccgctcgggtaggtggtgccgtcgctgccgcacaccgggtagcggctcttgcacacgcacacgccgcttacacccggaccgccggctgctgccccggctttacccctccgcctcttgcggctcttcacgcactccatgcccggcgcgcagtaccccctgccggcgccgccacccccgcacggctcgccctcgccgcgggcgcacatagggcagcagccgcacgcgtcgcgggtctcgcccagcaggcagcccagcgggggcaggggcgggcaggaggccggctcgcaggggccgcaggtgtccgaagaggaggaagaggagaggggcaggagcaggagcagcagcccagcggcgccgaggagcagggcgcgcagcgacggccgctccatggcggggtgcggtggcagcggcaagggcgcgagtgagccgtgtcgggccggccggcgccttaaacccgccgccccgcccggcctgtccgcg

SEQ ID NO: 419579 - DNA, 3129 bp, Homo sapiens
aggcactggaggattgagctaggtgggcagaaaagagcagtgtcgttatttgtgcaacaacattgaaaaacaagcagaaataaaacattgacggaacggatacgaccgcagattgcgggagctgtcctctcaatcggcccggcagcggcggcccacaatttacgcgtgtgcaaccctaaccccggcccaagcttgacctacaatttgcgcaggcgcagatcctaactttggcgtccctgtgggcggcctttggtgtgagacgcgtggtattctgggaacgtcggagacggaagttacttcgtctttagctcctggcgctgctggcttctgggcggttttgtcttttgatttcaagagttaggagctcgagaaccgtttggcaatatgtacgacgcggatgaggatatgcaatatgatgaggatgatgatgaaatcaccccggatttgtggcaagaagcatgctggattgtaatcagttcctattttgacgagaaaggcttggttagacaacagctggattcttttgatgagtttattcagatgtctgttcaaagaattgtggaagacgctcctcctatagacctacaggctgaagctcagcatgctagtggagaagttgaagaaccgccacgatatttgctgaagtttgaacaaatttatctttccaagcctacccattgggaaagagatggtgctccttcaccaatgatgcccaatgaagctagattaaggaatctcacgtattctgctccgctttatgttgatataacaaaaacagtcattaaagaaggtgaagaacaacttcagactcagcatcagaaaacttttataggaaaaattccaattatgttgcggtcaacttactgccttttgaatggcttgacagatcgtgatctttgtgagttaaatgaatgccctttggatcctggtggctatttcattattaatggatcagaaaaggttctgattgcccaagagaaaatggcaacaaacacagtttatgtgtttgccaaaaaggattctaaatatgcctacacaggagagtgtagatcatgtcttgagaattcttcccgacccaccagtactatatgggttagcatgctggcaagaggaggacagggtgccaagaagagtgctattggtcagcgcattgtggcaactctaccatatatcaagcaagaagttcccatcattattgtgttcagagcattaggttttgtgtccgacagagatattttagaacatattatttatgattttgaagatccagagatgatggaaatggttaaaccttctctcgatgaagcttttgtcatccaagaacagaatgttgcactaaatttcattggttcaagaggagcaaagcctggtgttactaaagagaaaagaattaaatatgcaaaggaagttttacaaaaagaaatgctccctcatgttggtgtcagtgatttttgtgagaccaaaaaagcctatttcttgggatacatggttcataggttacttctggcagctttgggtagaagagaactagatgacagagatcactatggaaacaagagattggatcttgctgggccgctgcttgcattcttatttagaggtatgtttaagaatttgcttaaagaagtgcggatctatgcacagaaatttattgatcgaggaaaggattttaacttggagttggcaattaaaacacggatcatatctgatggcctaaaatactctttagctactggaaactggggtgatcaaaagaaagctcatcaagccagagctggagtatctcaggtgttaaaccgcctgacttttgcgtctactctttctcacctgcgtcgtttaaattctcctattggtagagacggcaagctagcaaaaccaagacagttgcataatacgttgtggggaatggtgtgtcctgccgagaccccagagggccatgctgtaggacttgtgaagaatttagccttgatggcgtatatttcagttggatctcaaccatctccaattctggaatttttagaagaatggagtatggaaaatttagaagaaatttctcctgcagctattgctgatgcaaccaagatttttgttaatggctgctgggttggaatacataaagatcccgaacaacttatgaacaccctaaggaaattgagacgtcagatggacatcattgtgtctgaagtttctatgatcagagatattcgagagagggagattcggatctatacggatgcaggccgtatttgtagaccacttctgattgtggaaaaacaaaagctacttttgaagaagaggcatattgaccaattgaaagagagagaatataacaactatagttggcaggatcttgtggccagtggggtagtggagtatattgataccctggaagaagaaacagtgatgcttgcaatgactccagatgatttacaggagaaagaagtagcttattgttccacatatacacactgtgagattcatccctcaatgatccttggtgtctgtgcatctattattccctttcctgatcataaccagtcccctagaaacacataccagtctgctatgggtaagcaggctatgggagtttacatcaccaacttccatgttcgcatggacacattggcccatgttctctattatcctcaaaagccacttgtgactacacggtctatggaatatctacgatttagagagctgccagcaggtatggtcagttttgctctacgttatttaagatccttctgtgcttaaggcacttttctgggtgcttgggaggattaaaaaataaatatgacatagtgcctgttctcacggaatttataatatggtgggaaacatgaacataataaaaaggtaggtatgtggaaagtgttttggtggaggtacaaagtcctttggaagcacagactgatggaagcaattaattcctgttggaagtctagatccagtttcatggagaaggtggcattttagattggagcaaaattgatgaaggggtatttgcatttgagaggtggtttaagcaagggcccagatggacgaagacatgcaaaatgtacggacatcgtgatcctcacggacatcgtgatcctcacggacatcgtgatcctcacggacatgggtacc

SEQ ID NO: 419580 - DNA, 1032 bp, Homo sapiens
aggcactggaggattgagctaggtgggcagaaaagagcagtgtcgttatttgtgcaacaacattgaaaaacaagcagaaataaaacattgacggaacggatacgaccgcagattgcgggagctgtcctctcaatcggcccggcagcggcggcccacaatttacgcgtgtgcaaccctaaccccggcccaagcttgacctacaatttgcgcaggcgcagatcctaactttggcgtccctgtgggcggcctttggtgtgagacgcgtggtattctgggaacgtcggagacggaagttacttcgtctttagctcctggcgctgctggcttctgggcggttttgtcttttgatttcaagagttaggagctcgagaaccgtttggcaatatgtacgacgcggatgaggatatgcaatatgatgaggatgatgatgaaatcaccccggatttgtggcaagaagcatgctggattgtaatcagttcctattttgacgagaaaggcttggttagacaacagctggattcttttgatgagtttattcagatgtctgttcaaagaattgtggaagacgctcctcctatagacctacaggctgaagctcagcatgctagtggagaagttgaagaaccgccacgatatttgctgaagtttgaacaaatttatctttccaagcctacccattgggaaagagatggtgctccttcaccaatgatgcccaatgaagctagattaaggaatctcacgtattctgctccgctttatgttgatataacaaaaacagtcattaaagaaggtgaagaacaacttcagactcagcatcagaaaacttttataggaaaaattccaattatgttgcggtcaacttactgccttttgaatggcttgacagatcgtgatctttgtgagttaaatgaatgccctttggatcctggtggctatttcattattaatggatcagaaaaggtatagtaacattattttaaaaaattacaaaatggtagttaaaatttagtttaaagttgaaatgaaaaaaaa

SEQ ID NO: 419581 - DNA, 431 bp, Homo sapiens
ccaaggttagatttttcattcataaaattttaaattatacctaagtttttaatatgttaaacaatggtaaactaagatttgcacattttacttgataaattggttgctccagaaatttagtaggatttgtattgtatttttaactaagcctaataataaagagaaaataaaaatttgtggaactgttttttctttttatatgtaggtttctatgatcagagatattcgagagagggagattcggatctatacggatgcaggccgtatttgtagaccacttctgattgtggaaaaacaaaagctacttttgaagaagaggcatattgaccaattgaaagagagagaatataacaactataggtaaaaacatgcagtgagaaaaatgtgtgtattaaaaattgagatagaatttacatactgtaaaattaacc

SEQ ID NO: 419582 - DNA, 535 bp, Homo sapiens
caggtgcacacacaccctgaaggtgggttcaggtgttcagcattattgttcttccagtttctcagattctaggatgctgctaacaaaagcatggcagggactggtttttgttccatgaatccaggggaggggcctgtatgactgccctaaggcttcaccttgcgggagccgcagtcaacaaagcaggctgaggatttaacgttttaccatccttgtgcagtgcaagagaagcttgtcagcctaggatgtctcttaaagtctgtgccacagaccttgttccagatgaggacaggtgtcgggattccgatgacctcacagctcaagtacacctgggcaccagtgacattccagatgtccttggggggcgtcactatggaaggacctgcaggagagggcacaaagccaaagtcatcttttaaacagtccttcacatgagtcagcatcttagggagaaaataataattttgtttatgaggccatccccttgatggattatctgaagcaaatttcaaagaccacactggcttcctcctgc

SEQ ID NO: 419583 - DNA, 265 bp, Homo sapiens
atacttagttctgttctttttaaagcaaatgtactagtcatttttaaatggctgtgagatttattgtgtaccttttttcactggtatttcatgtaaggcatcaaccactgtaatttttgctgatgctgaagcctgtccttgggaattggatgcatggcactcatattctccagcatcttccttacttagaggagatacctgtgaaagaaaaaagatctagtattcctctgtggtggtcttctcttttgtcagtggttccagtgag

SEQ ID NO: 419584 - DNA, 4079 bp, Homo sapiens
aggcactggaggattgagctaggtgggcagaaaagagcagtgtcgttatttgtgcaacaacattgaaaaacaagcagaaataaaacattgacggaacggatacgaccgcagattgcgggagctgtcctctcaatcggcccggcagcggcggcccacaatttacgcgtgtgcaaccctaaccccggcccaagcttgacctacaatttgcgcaggcgcagatcctaactttggcgtccctgtgggcggcctttggtgtgagacgcgtggtattctgggaacgtcggagacggaagttacttcgtctttagctcctggcgctgctggcttctgggcggttttgtcttttgatttcaagagttaggagctcgagaaccgtttggcaatatgtacgacgcggatgaggatatgcaatatgatgaggatgatgatgaaatcaccccggatttgtggcaagaagcatgctggattgtaatcagttcctattttgacgagaaaggcttggttagacaacagctggattcttttgatgagtttattcagatgtctgttcaaagaattgtggaagacgctcctcctatagacctacaggctgaagctcagcatgctagtggagaagttgaagaaccgccacgatatttgctgaagtttgaacaaatttatctttccaagcctacccattgggaaagagatggtgctccttcaccaatgatgcccaatgaagctagattaaggaatctcacgtattctgctccgctttatgttgatataacaaaaacagtcattaaagaaggtgaagaacaacttcagactcagcatcagaaaacttttataggaaaaattccaattatgttgcggtcaacttactgccttttgaatggcttgacagatcgtgatctttgtgagttaaatgaatgccctttggatcctggtggctatttcattattaatggatcagaaaaggttctgattgcccaagagaaaatggcaacaaacacagtttatgtgtttgccaaaaaggattctaaatatgcctacacaggagagtgtagatcatgtcttgagaattcttcccgacccaccagtactatatgggttagcatgctggcaagaggaggacagggtgccaagaagagtgctattggtcagcgcattgtggcaactctaccatatatcaagcaagaagttcccatcattattgtgttcagagcattaggttttgtgtccgacagagatattttagaacatattatttatgattttgaagatccagagatgatggaaatggttaaaccttctctcgatgaagcttttgtcatccaagaacagaatgttgcactaaatttcattggttcaagaggagcaaagcctggtgttactaaagagaaaagaattaaatatgcaaaggaagttttacaaaaagaaatgctccctcatgttggtgtcagtgatttttgtgagaccaaaaaagcctatttcttgggatacatggttcataggttacttctggcagctttgggtagaagagaactagatgacagagatcactatggaaacaagagattggatcttgctgggccgctgcttgcattcttatttagaggtatgtttaagaatttgcttaaagaagtgcggatctatgcacagaaatttattgatcgaggaaaggattttaacttggagttggcaattaaaacacggatcatatctgatggcctaaaatactctttagctactggaaactggggtgatcaaaagaaagctcatcaagccagagctggagtatctcaggtgttaaaccgcctgacttttgcgtctactctttctcacctgcgtcgtttaaattctcctattggtagagacggcaagctagcaaaaccaagacagttgcataatacgttgtggggaatggtgtgtcctgccgagaccccagagggccatgctgtaggacttgtgaagaatttagccttgatggcgtatatttcagttggatctcaaccatctccaattctggaatttttagaagaatggagtatggaaaatttagaagaaatttctcctgcagctattgctgatgcaaccaagatttttgttaatggctgctgggttggaatacataaagatcccgaacaacttatgaacaccctaaggaaattgagacgtcagatggacatcattgtgtctgaagtttctatgatcagagatattcgagagagggagattcggatctatacggatgcaggccgtatttgtagaccacttctgattgtggaaaaacaaaagctacttttgaagaagaggcatattgaccaattgaaagagagagaatataacaactatagttggcaggatcttgtggccagtggggtagtggagtatattgataccctggaagaagaaacagtgatgcttgcaatgactccagatgatttacaggagaaagaagtagcttattgttccacatatacacactgtgagattcatccctcaatgatccttggtgtctgtgcatctattattccctttcctgatcataaccagtcccctagaaacacataccagtctgctatgggtaagcaggctatgggagtttacatcaccaacttccatgttcgcatggacacattggcccatgttctctattatcctcaaaagccacttgtgactacacggtctatggaatatctacgatttagagagctgccagcaggcatcaactcaattgtggccattgcatcatacactggatataatcaggaagactctgttatcatgaatcgttcagctgtagaccgcggcttcttcaggtctgttttctatcgctcatacaaagaacaggagtctaaaaaaggatttgatcaagaagaagtttttgagaagcctacacgtgaaacatgccagggcatgaggcatgccatttacgacaagctggatgatgatggtttgatagctccaggggttcgtgtatcaggagatgatgttattataggcaaaacagtcaccttgcctgaaaatgaagatgaattggagagcaccaatagacgctataccaagagagactgtagcacttttctcagaactagtgagacgggcattgtggatcaggttatggtaactctcaatcaggaaggatataaattttgtaaaataagggtacgctctgttaggattccacagattggagacaaatttgctagtcgacatggtcaaaagggtacttgtggtattcagtatagacaagaggatatgcctttcacctgtgaaggtatcacccctgatatcatcatcaatccccatgccatcccctctcgtatgactattggtcacttaattgaatgccttcaagggaaggtatcggctaacaagggtgaaattggtgatgccactccatttaatgatgctgttaacgtgcagaagatttctaatcttttatctgattatggctatcatctcagaggaaatgaggtcctgtacaatgggttcactggtcgaaaaatcacatcacaaatatttattggccccacttattaccagcgtttgaagcatatggtggatgataagattcactctcgtgctaggggacctattcagatcctcaatagacagcccatggagggtagatctcgtgatggtggcctgcgttttggagaaatggaacgagattgtcagattgcccatggagcagcccagtttttaagggaaagattgtttgaggcatcagatccatatcaggttcatgtttgcaatctttgtggaataatggcgattgccaacaccaggacccatacatatgaatgcaggggctgccgcaataaaacccagatttctttggtgcgaatgccttacgcatgcaaactattgtttcaggaacttatgtctatgagtattgcaccgcgaatgatgagtgtttagctattttacaggagtcaacaagataattaaatatcttggtgtcttgtttctattgtgtggctttttaaaaatgacaaatatgtactgtgttgtgataaaaagtattttatttgtttaatgatatgcatgcttttcttctgtaaatatataataaatttttgtagatagtc

SEQ ID NO: 419585 - DNA, 3842 bp, Homo sapiens
catgaaatattagcaggcggcccggttggtatttcagtgacgcgggactgggtgctgtagttatacatctctgtgggcaggtggcctcattgcagaggttttgtcttttgatttcaagagttaggagctcgagaaccgtttggcaatatgtacgacgcggatgaggatatgcaatatgatgaggatgatgatgaaatcaccccggatttgtggcaagaagcatgctggattgtaatcagttcctattttgacgagaaaggcttggttagacaacagctggattcttttgatgagtttattcagatgtctgttcaaagaattgtggaagacgctcctcctatagacctacaggctgaagctcagcatgctagtggagaagttgaagaaccgccacgatatttgctgaagtttgaacaaatttatctttccaagcctacccattgggaaagagatggtgctccttcaccaatgatgcccaatgaagctagattaaggaatctcacgtattctgctccgctttatgttgatataacaaaaacagtcattaaagaaggtgaagaacaacttcagactcagcatcagaaaacttttataggaaaaattccaattatgttgcggtcaacttactgccttttgaatggcttgacagatcgtgatctttgtgagttaaatgaatgccctttggatcctggtggctatttcattattaatggatcagaaaaggttctgattgcccaagagaaaatggcaacaaacacagtttatgtgtttgccaaaaaggattctaaatatgcctacacaggagagtgtagatcatgtcttgagaattcttcccgacccaccagtactatatgggttagcatgctggcaagaggaggacagggtgccaagaagagtgctattggtcagcgcattgtggcaactctaccatatatcaagcaagaagttcccatcattattgtgttcagagcattaggttttgtgtccgacagagatattttagaacatattatttatgattttgaagatccagagatgatggaaatggttaaaccttctctcgatgaagcttttgtcatccaagaacagaatgttgcactaaatttcattggttcaagaggagcaaagcctggtgttactaaagagaaaagaattaaatatgcaaaggaagttttacaaaaagaaatgctccctcatgttggtgtcagtgatttttgtgagaccaaaaaagcctatttcttgggatacatggttcataggttacttctggcagctttgggtagaagagaactagatgacagagatcactatggaaacaagagattggatcttgctgggccgctgcttgcattcttatttagaggtatgtttaagaatttgcttaaagaagtgcggatctatgcacagaaatttattgatcgaggaaaggattttaacttggagttggcaattaaaacacggatcatatctgatggcctaaaatactctttagctactggaaactggggtgatcaaaagaaagctcatcaagccagagctggagtatctcaggtgttaaaccgcctgacttttgcgtctactctttctcacctgcgtcgtttaaattctcctattggtagagacggcaagctagcaaaaccaagacagttgcataatacgttgtggggaatggtgtgtcctgccgagaccccagagggccatgctgtaggacttgtgaagaatttagccttgatggcgtatatttcagttggatctcaaccatctccaattctggaatttttagaagaatggagtatggaaaatttagaagaaatttctcctgcagctattgctgatgcaaccaagatttttgttaatggctgctgggttggaatacataaagatcccgaacaacttatgaacaccctaaggaaattgagacgtcagatggacatcattgtgtctgaagtttctatgatcagagatattcgagagagggagattcggatctatacggatgcaggccgtatttgtagaccacttctgattgtggaaaaacaaaagctacttttgaagaagaggcatattgaccaattgaaagagagagaatataacaactatagttggcaggatcttgtggccagtggggtagtggagtatattgataccctggaagaagaaacagtgatgcttgcaatgactccagatgatttacaggagaaagaagtagcttattgttccacatatacacactgtgagattcatccctcaatgatccttggtgtctgtgcatctattattccctttcctgatcataaccagtcccctagaaacacataccagtctgctatgggtaagcaggctatgggagtttacatcaccaacttccatgttcgcatggacacattggcccatgttctctattatcctcaaaagccacttgtgactacacggtctatggaatatctacgatttagagagctgccagcaggcatcaactcaattgtggccattgcatcatacactggatataatcaggaagactctgttatcatgaatcgttcagctgtagaccgcggcttcttcaggtctgttttctatcgctcatacaaagaacaggagtctaaaaaaggatttgatcaagaagaagtttttgagaagcctacacgtgaaacatgccagggcatgaggcatgccatttacgacaagctggatgatgatggtttgatagctccaggggttcgtgtatcaggagatgatgttattataggcaaaacagtcaccttgcctgaaaatgaagatgaattggagagcaccaatagacgctataccaagagagactgtagcacttttctcagaactagtgagacgggcattgtggatcaggttatggtaactctcaatcaggaaggatataaattttgtaaaataagggtacgctctgttaggattccacagattggagacaaatttgctagtcgacatggtcaaaagggtacttgtggtattcagtatagacaagaggatatgcctttcacctgtgaaggtatcacccctgatatcatcatcaatccccatgccatcccctctcgtatgactattggtcacttaattgaatgccttcaagggaaggtatcggctaacaagggtgaaattggtgatgccactccatttaatgatgctgttaacgtgcagaagatttctaatcttttatctgattatggctatcatctcagaggaaatgaggtcctgtacaatgggttcactggtcgaaaaatcacatcacaaatatttattggccccacttattaccagcgtttgaagcatatggtggatgataagattcactctcgtgctaggggacctattcagatcctcaatagacagcccatggagggtagatctcgtgatggtggcctgcgttttggagaaatggaacgagattgtcagattgcccatggagcagcccagtttttaagggaaagattgtttgaggcatcagatccatatcaggttcatgtttgcaatctttgtggaataatggcgattgccaacaccaggacccatacatatgaatgcaggggctgccgcaataaaacccagatttctttggtgcgaatgccttacgcatgcaaactattgtttcaggaacttatgtctatgagtattgcaccgcgaatgatgagtgtttagctattttacaggagtcaacaagataattaaatatcttggtgtcttgtttctattgtgtggctttttaaaaatgacaaatatgtactgtgttgtgataaaaagtattttatttgtttaatgatatgcatgcttttcttctgtaaatatataataaatttttgtagatagtc

SEQ ID NO: 419586 - DNA, 5177 bp, Homo sapiens
aggcactggaggattgagctaggtgggcagaaaagagcagtgtcgttatttgtgcaacaacattgaaaaacaagcagaaataaaacattgacggaacggatacgaccgcagattgcgggagctgtcctctcaatcggcccggcagcggcggcccacaatttacgcgtgtgcaaccctaaccccggcccaagcttgacctacaatttgcgcaggcgcagatcctaactttggcgtccctgtgggcggcctttggtgtgagacgcgtggtattctgggaacgtcggagacggaagttacttcgtctttagctcctggcgctgctggcttctgggcggttttgtcttttgatttcaagagttaggagctcgagaaccgtttggcaatatgtacgacgcggatgaggatatgcaatatgatgaggatgatgatgaaatcaccccggatttgtggcaagaagcatgctggattgtaatcagttcctattttgacgagaaaggcttggttagacaacagctggattcttttgatgagtttattcagatgtctgttcaaagaattgtggaagacgctcctcctatagacctacaggctgaagctcagcatgctagtggagaagttgaagaaccgccacgatatttgctgaagtttgaacaaatttatctttccaagcctacccattgggaaagagatggtgctccttcaccaatgatgcccaatgaagctagattaaggaatctcacgtattctgctccgctttatgttgatataacaaaaacagtcattaaagaaggtgaagaacaacttcagactcagcatcagaaaacttttataggaaaaattccaattatgttgcggtcaacttactgccttttgaatggcttgacagatcgtgatctttgtgagttaaatgaatgccctttggatcctggtggctatttcattattaatggatcagaaaaggttctgattgcccaagagaaaatggcaacaaacacagtttatgtgtttgccaaaaaggattctaaatatgcctacacaggagagtgtagatcatgtcttgagaattcttcccgacccaccagtactatatgggttagcatgctggcaagaggaggacagggtgccaagaagagtgctattggtcagcgcattgtggcaactctaccatatatcaagcaagaagttcccatcattattgtgttcagagcattaggttttgtgtccgacagagatattttagaacatattatttatgattttgaagatccagagatgatggaaatggttaaaccttctctcgatgaagcttttgtcatccaagaacagaatgttgcactaaatttcattggttcaagaggagcaaagcctggtgttactaaagagaaaagaattaaatatgcaaaggaagttttacaaaaagaaatgctccctcatgttggtgtcagtgatttttgtgagaccaaaaaagcctatttcttgggatacatggttcataggttacttctggcagctttgggtagaagagaactagatgacagagatcactatggaaacaagagattggatcttgctgggccgctgcttgcattcttatttagaggtatgtttaagaatttgcttaaagaagtgcggatctatgcacagaaatttattgatcgaggaaaggattttaacttggagttggcaattaaaacacggatcatatctgatggcctaaaatactctttagctactggaaactggggtgatcaaaagaaagctcatcaagccagagctggagtatctcaggtgttaaaccgcctgacttttgcgtctactctttctcacctgcgtcgtttaaattctcctattggtagagacggcaagctagcaaaaccaagacagttgcataatacgttgtggggaatggtgtgtcctgccgagaccccagagggccatgctgtaggacttgtgaagaatttagccttgatggcgtatatttcagttggatctcaaccatctccaattctggaatttttagaagaatggagtatggaaaatttagaagaaatttctcctgcagctattgctgatgcaaccaagatttttgttaatggctgctgggttggaatacataaagatcccgaacaacttatgaacaccctaaggaaattgagacgtcagatggacatcattgtgtctgaagtttctatgatcagagatattcgagagagggagattcggatctatacggatgcaggccgtatttgtagaccacttctgattgtggaaaaacaaaagctacttttgaagaagaggcatattgaccaattgaaagagagagaatataacaactatagttggcaggatcttgtggccagtggggtagtggagtatattgataccctggaagaagaaacagtgatgcttgcaatgactccagatgatttacaggagaaagaagtagcttattgttccacatatacacactgtgagattcatccctcaatgatccttggtgtctgtgcatctattattccctttcctgatcataaccagtcccctagaaacacataccagtctgctatgggtaagcaggctatgggagtttacatcaccaacttccatgttcgcatggacacattggcccatgttctctattatcctcaaaagccacttgtgactacacggtctatggaatatctacgatttagagagctgccagcaggcatcaactcaattgtggccattgcatcatacactggatataatcaggaagactctgttatcatgaatcgttcagctgtagaccgcggcttcttcaggtctgttttctatcgctcatacaaagaacaggagtctaaaaaaggatttgatcaagaagaagtttttgagaagcctacacgtgaaacatgccagggcatgaggcatgccatttacgacaagctggatgatgatggtttgatagctccaggggttcgtgtatcaggagatgatgttattataggcaaaacagtcaccttgcctgaaaatgaagatgaattggagagcaccaatagacgctataccaagagagactgtagcacttttctcagaactagtgagacgggcattgtggatcaggttatggtaactctcaatcaggaaggatataaattttgtaaaataagggtacgctctgttaggattccacagattggagacaaatttgctagtcgacatggtcaaaagggtacttgtggtattcagtatagacaagaggatatgcctttcacctgtgaaggtatcacccctgatatcatcatcaatccccatgccatcccctctcgtatgactattggtcacttaattgaatgccttcaagggaaggtatcggctaacaagggtgaaattggtgatgccactccatttaatgatgctgttaacgtgcagaagatttctaatcttttatctgattatggctatcatctcagaggaaatgaggtcctgtacaatgggttcactggtcgaaaaatcacatcacaaatatttattggccccacttattaccagcgtttgaagcatatggtggatgataagattcactctcgtgctaggggacctattcagatcctcaatagacagcccatggagggtagatctcgtgatggtggcctgcgttttggagaaatggaacgagattgtcagattgcccatggagcagcccagtttttaagggaaagattgtttgaggcatcagatccatatcaggttcatgtttgcaatctttgtggaataatggcgattgccaacaccaggacccatacatatgaatgcaggggctgccgcaataaaacccagatttctttggtgcgaatgccttacgcatgcaaactattgtttcaggaacttatgtctatgagtattgcaccgcgaatgatgagtgtttagctattttacaggagtcaacaagataattaaatatcttggtgtcttgtttctattgtgtggctttttaaaaatgacaaatatgtactgtgttgtgataaaaagtattttatttgtttaatgatatgcatgcttttcttctgtaaatatataataaatttttgtagatagtcttgatgtgtgatctttattttgtatttctctgtgtaaaaccagtgaatataactaaagtgttagtggattggattaaaagaaacttattaggcaagaacaggtaatgtagttatccatgactacttttaaccatgcagactaataatattctggaggtttatagctcggcaccttcaccttttttcactggtatttcatgtaaggcatcaaccactgtaatttttgctgatgctgaagcctgtccttgggaattggatgcatggcactcatattctccagcatcttccttacttagaggagataccagcacccagccagttacttcatgcttttctgggccaccccgggtctgaatggccaggttgtcccggtcaccaggcaggagttctgtcctttgaactccatagtgacccctttttaccttgttccagatgaggacaggtgtcgggattccgatgacctcacagctcaagtacacctgggcaccagtgacattccagatgtccttggggggcgtcactatggaaggaccttgctcgcaggtgcccttgctgacctgggtgatggccttctccccgcggctctcggccctctggctggcggcgcgcagctggcagccgctcgggtaggtggtgccgtcgctgccgcacaccgggtagcggctcttgcacacgcacacgccgcttacacccggaccgccggctgctgccccggctttacccctccgcctcttgcggctcttcacgcactccatgcccggcgcgcagtaccccctgccggcgccgccacccccgcacggctcgccctcgccgcgggcgcacatagggcagcagccgcacgcgtcgcgggtctcgcccagcaggcagcccagcgggggcaggggcgggcaggaggccggctcgcaggggccgcaggtgtccgaagaggaggaagaggagaggggcaggagcaggagcagcagcccagcggcgccgaggagcagggcgcgcagcgacggccgctccatggcggggtgcggtggcagcggcaagggcgcgagtgagccgtgtcgggccggccggcgccttaaacccgccgccccgcccggcctgtccgcg

SEQ ID NO: 419587 - DNA, 4818 bp, Homo sapiens
aggcactggaggattgagctaggtgggcagaaaagagcagtgtcgttatttgtgcaacaacattgaaaaacaagcagaaataaaacattgacggaacggatacgaccgcagattgcgggagctgtcctctcaatcggcccggcagcggcggcccacaatttacgcgtgtgcaaccctaaccccggcccaagcttgacctacaatttgcgcaggcgcagatcctaactttggcgtccctgtgggcggcctttggtgtgagacgcgtggtattctgggaacgtcggagacggaagttacttcgtctttagctcctggcgctgctggcttctgggcggttttgtcttttgatttcaagagttaggagctcgagaaccgtttggcaatatgtacgacgcggatgaggatatgcaatatgatgaggatgatgatgaaatcaccccggatttgtggcaagaagcatgctggattgtaatcagttcctattttgacgagaaaggcttggttagacaacagctggattcttttgatgagtttattcagatgtctgttcaaagaattgtggaagacgctcctcctatagacctacaggctgaagctcagcatgctagtggagaagttgaagaaccgccacgatatttgctgaagtttgaacaaatttatctttccaagcctacccattgggaaagagatggtgctccttcaccaatgatgcccaatgaagctagattaaggaatctcacgtattctgctccgctttatgttgatataacaaaaacagtcattaaagaaggtgaagaacaacttcagactcagcatcagaaaacttttataggaaaaattccaattatgttgcggtcaacttactgccttttgaatggcttgacagatcgtgatctttgtgagttaaatgaatgccctttggatcctggtggctatttcattattaatggatcagaaaaggttctgattgcccaagagaaaatggcaacaaacacagtttatgtgtttgccaaaaaggattctaaatatgcctacacaggagagtgtagatcatgtcttgagaattcttcccgacccaccagtactatatgggttagcatgctggcaagaggaggacagggtgccaagaagagtgctattggtcagcgcattgtggcaactctaccatatatcaagcaagaagttcccatcattattgtgttcagagcattaggttttgtgtccgacagagatattttagaacatattatttatgattttgaagatccagagatgatggaaatggttaaaccttctctcgatgaagcttttgtcatccaagaacagaatgttgcactaaatttcattggttcaagaggagcaaagcctggtgttactaaagagaaaagaattaaatatgcaaaggaagttttacaaaaagaaatgctccctcatgttggtgtcagtgatttttgtgagaccaaaaaagcctatttcttgggatacatggttcataggttacttctggcagctttgggtagaagagaactagatgacagagatcactatggaaacaagagattggatcttgctgggccgctgcttgcattcttatttagaggtatgtttaagaatttgcttaaagaagtgcggatctatgcacagaaatttattgatcgaggaaaggattttaacttggagttggcaattaaaacacggatcatatctgatggcctaaaatactctttagctactggaaactggggtgatcaaaagaaagctcatcaagccagagctggagtatctcaggtgttaaaccgcctgacttttgcgtctactctttctcacctgcgtcgtttaaattctcctattggtagagacggcaagctagcaaaaccaagacagttgcataatacgttgtggggaatggtgtgtcctgccgagaccccagagggccatgctgtaggacttgtgaagaatttagccttgatggcgtatatttcagttggatctcaaccatctccaattctggaatttttagaagaatggagtatggaaaatttagaagaaatttctcctgcagctattgctgatgcaaccaagatttttgttaatggctgctgggttggaatacataaagatcccgaacaacttatgaacaccctaaggaaattgagacgtcagatggacatcattgtgtctgaagtttctatgatcagagatattcgagagagggagattcggatctatacggatgcaggccgtatttgtagaccacttctgattgtggaaaaacaaaagctacttttgaagaagaggcatattgaccaattgaaagagagatctacgatttagagagctgccagcaggcatcaactcaattgtggccattgcatcatacactggatataatcaggaagactctgttatcatgaatcgttcagctgtagaccgcggcttcttcaggtctgttttctatcgctcatacaaagaacaggagtctaaaaaaggatttgatcaagaagaagtttttgagaagcctacacgtgaaacatgccagggcatgaggcatgccatttacgacaagctggatgatgatggtttgatagctccaggggttcgtgtatcaggagatgatgttattataggcaaaacagtcaccttgcctgaaaatgaagatgaattggagagcaccaatagacgctataccaagagagactgtagcacttttctcagaactagtgagacgggcattgtggatcaggttatggtaactctcaatcaggaaggatataaattttgtaaaataagggtacgctctgttaggattccacagattggagacaaatttgctagtcgacatggtcaaaagggtacttgtggtattcagtatagacaagaggatatgcctttcacctgtgaaggtatcacccctgatatcatcatcaatccccatgccatcccctctcgtatgactattggtcacttaattgaatgccttcaagggaaggtatcggctaacaagggtgaaattggtgatgccactccatttaatgatgctgttaacgtgcagaagatttctaatcttttatctgattatggctatcatctcagaggaaatgaggtcctgtacaatgggttcactggtcgaaaaatcacatcacaaatatttattggccccacttattaccagcgtttgaagcatatggtggatgataagattcactctcgtgctaggggacctattcagatcctcaatagacagcccatggagggtagatctcgtgatggtggcctgcgttttggagaaatggaacgagattgtcagattgcccatggagcagcccagtttttaagggaaagattgtttgaggcatcagatccatatcaggttcatgtttgcaatctttgtggaataatggcgattgccaacaccaggacccatacatatgaatgcaggggctgccgcaataaaacccagatttctttggtgcgaatgccttacgcatgcaaactattgtttcaggaacttatgtctatgagtattgcaccgcgaatgatgagtgtttagctattttacaggagtcaacaagataattaaatatcttggtgtcttgtttctattgtgtggctttttaaaaatgacaaatatgtactgtgttgtgataaaaagtattttatttgtttaatgatatgcatgcttttcttctgtaaatatataataaatttttgtagatagtcttgatgtgtgatctttattttgtatttctctgtgtaaaaccagtgaatataactaaagtgttagtggattggattaaaagaaacttattaggcaagaacaggtaatgtagttatccatgactacttttaaccatgcagactaataatattctggaggtttatagctcggcaccttcaccttttttcactggtatttcatgtaaggcatcaaccactgtaatttttgctgatgctgaagcctgtccttgggaattggatgcatggcactcatattctccagcatcttccttacttagaggagataccagcacccagccagttacttcatgcttttctgggccaccccgggtctgaatggccaggttgtcccggtcaccaggcaggagttctgtcctttgaactccatagtgacccctttttaccttgttccagatgaggacaggtgtcgggattccgatgacctcacagctcaagtacacctgggcaccagtgacattccagatgtccttggggggcgtcactatggaaggaccttgctcgcaggtgcccttgctgacctgggtgatggccttctccccgcggctctcggccctctggctggcggcgcgcagctggcagccgctcgggtaggtggtgccgtcgctgccgcacaccgggtagcggctcttgcacacgcacacgccgcttacacccggaccgccggctgctgccccggctttacccctccgcctcttgcggctcttcacgcactccatgcccggcgcgcagtaccccctgccggcgccgccacccccgcacggctcgccctcgccgcgggcgcacatagggcagcagccgcacgcgtcgcgggtctcgcccagcaggcagcccagcgggggcaggggcgggcaggaggccggctcgcaggggccgcaggtgtccgaagaggaggaagaggagaggggcaggagcaggagcagcagcccagcggcgccgaggagcagggcgcgcagcgacggccgctccatggcggggtgcggtggcagcggcaagggcgcgagtgagccgtgtcgggccggccggcgccttaaacccgccgccccgcccggcctgtccgcg

SEQ ID NO: 419588 - DNA, 5122 bp, Homo sapiens
aggcactggaggattgagctaggtgggcagaaaagagcagtgtcgttatttgtgcaacaacattgaaaaacaagcagaaataaaacattgacggaacggatacgaccgcagattgcgggagctgtcctctcaatcggcccggcagcggcggcccacaatttacgcgtgtgcaaccctaaccccggcccaagcttgacctacaatttgcgcaggcgcagatcctaactttggcgtccctgtgggcggcctttggtgtgagacgcgtggtattctgggaacgtcggagacggaagttacttcgtctttagctcctggcgctgctggcttctgggcggttttgtcttttgatttcaagagttaggagctcgagaaccgtttggcaatatgtacgacgcggatgaggatatgcaatatgatgaggatgatgatgaaatcaccccggatttgtggcaagaagcatgctggattgtaatcagttcctattttgacgagaaaggcttggttagacaacagctggattcttttgatgagtttattcagatgtctgttcaaagaattgtggaagacgctcctcctatagacctacaggctgaagctcagcatgctagtggagaagttgaagaaccgccacgatatttgctgaagtttgaacaaatttatctttccaagcctacccattgggaaagagatggtgctccttcaccaatgatgcccaatgaagctagattaaggaatctcacgtattctgctccgctttatgttgatataacaaaaacagtcattaaagaaggtgaagaacaacttcagactcagcatcagaaaacttttataggaaaaattccaattatgttgcggtcaacttactgccttttgaatggcttgacagatcgtgatctttgtgagttaaatgaatgccctttggatcctggtggctatttcattattaatggatcagaaaaggttctgattgcccaagagaaaatggcaacaaacacagtttatgtgtttgccaaaaaggattctaaatatgcctacacaggagagtgtagatcatgtcttgagaattcttcccgacccaccagtactatatgggttagcatgctggcaagaggaggacagggtgccaagaagagtgctattggtcagcgcattgtggcaactctaccatatatcaagcaagaagttcccatcattattgtgttcagagcattaggttttgtgtccgacagagatattttagaacatattatttatgattttgaagatccagagatgatggaaatggttaaaccttctctcgatgaagcttttgtcatccaagaacagaatgttgcactaaatttcattggttcaagaggagcaaagcctggtgttactaaagagaaaagaattaaatatgcaaaggaagttttacaaaaagaaatgctccctcatgttggtgtcagtgatttttgtgagaccaaaaaagcctatttcttgggatacatggttcataggttacttctggcagctttgggtagaagagaactagatgacagagatcactatggaaacaagagattggatcttgctgggccgctgcttgcattcttatttagaggtatgtttaagaatttgcttaaagaagtgcggatctatgcacagaaatttattgatcgaggaaaggattttaacttggagttggcaattaaaacacggatcatatctgatggcctaaaatactctttagctactggaaactggggtgatcaaaagaaagctcatcaagccagagctggagtatctcaggtgttaaaccgcctgacttttgcgtctactctttctcacctgcgtcgtttaaattctcctattggtagagacggcaagctagcaaaaccaagacagttgcataatacgttgtggggaatggtgtgtcctgccgagaccccagagggccatgctgtaggacttgtgaagaatttagccttgatggcgtatatttcagttggatctcaaccatctccaattctggaatttttagaagaatggagtatggaaaatttagaagaaatttctcctgcagctattgctgatgcaaccaagatttttgttaatggctgctgggttggaatacataaagatcccgaacaacttatgaacaccctaaggaaattgagacgtcagatggacatcattgtgtctgaagtttctatgatcagagatattcgagagagggagattcggatctatacggatgcaggccgtatttgtagaccacttctgattgtggaaaaacaaaagctacttttgaagaagaggcatattgaccaattgaaagagagagaatataacaactatagttggcaggatcttgtggccagtggggtagtggagtatattgataccctggaagaagaaacagtgatgcttgcaatgactccagatgatttacaggagaaagaagtagcttattgttccacatatacacactgtgagattcatccctcaatgatccttggtgtctgtgcatctattattccctttcctgatcataaccagtcccctagaaacacataccagtctgctatgggtaagcaggctatgggagtttacatcaccaacttccatgttcgcatggacacattggcccatgttctctattatcctcaaaagccacttgtgactacacggtctatggaatatctacgatttagagagctgccagcaggcatcaactcaattgtggccattgcatcatacactggatataatcaggaagactctgttatcatgaatcgttcagctgtagaccgcggcttcttcaggtctgttttctatcgctcatacaaagaacaggagtctaaaaaaggatttgatcaagaagaagtttttgagaagcctacacgtgaaacatgccagggcatgaggcatgccatttacgacaagctggatgatgatggtttgatagctccaggggttcgtgtatcaggagatgatgttattataggcaaaacagtcaccttgcctgaaaatgaagatgaattggagagcaccaatagacgctataccaagagagactgtagcacttttctcagaactagtgagacgggcattgtggatcaggttatggtaactctcaatcaggaaggatataaattttgtaaaataagggtacgctctgttaggattccacagattggagacaaatttgctagtcgacatggtcaagtatcacccctgatatcatcatcaatccccatgccatcccctctcgtatgactattggtcacttaattgaatgccttcaagggaaggtatcggctaacaagggtgaaattggtgatgccactccatttaatgatgctgttaacgtgcagaagatttctaatcttttatctgattatggctatcatctcagaggaaatgaggtcctgtacaatgggttcactggtcgaaaaatcacatcacaaatatttattggccccacttattaccagcgtttgaagcatatggtggatgataagattcactctcgtgctaggggacctattcagatcctcaatagacagcccatggagggtagatctcgtgatggtggcctgcgttttggagaaatggaacgagattgtcagattgcccatggagcagcccagtttttaagggaaagattgtttgaggcatcagatccatatcaggttcatgtttgcaatctttgtggaataatggcgattgccaacaccaggacccatacatatgaatgcaggggctgccgcaataaaacccagatttctttggtgcgaatgccttacgcatgcaaactattgtttcaggaacttatgtctatgagtattgcaccgcgaatgatgagtgtttagctattttacaggagtcaacaagataattaaatatcttggtgtcttgtttctattgtgtggctttttaaaaatgacaaatatgtactgtgttgtgataaaaagtattttatttgtttaatgatatgcatgcttttcttctgtaaatatataataaatttttgtagatagtcttgatgtgtgatctttattttgtatttctctgtgtaaaaccagtgaatataactaaagtgttagtggattggattaaaagaaacttattaggcaagaacaggtaatgtagttatccatgactacttttaaccatgcagactaataatattctggaggtttatagctcggcaccttcaccttttttcactggtatttcatgtaaggcatcaaccactgtaatttttgctgatgctgaagcctgtccttgggaattggatgcatggcactcatattctccagcatcttccttacttagaggagataccagcacccagccagttacttcatgcttttctgggccaccccgggtctgaatggccaggttgtcccggtcaccaggcaggagttctgtcctttgaactccatagtgacccctttttaccttgttccagatgaggacaggtgtcgggattccgatgacctcacagctcaagtacacctgggcaccagtgacattccagatgtccttggggggcgtcactatggaaggaccttgctcgcaggtgcccttgctgacctgggtgatggccttctccccgcggctctcggccctctggctggcggcgcgcagctggcagccgctcgggtaggtggtgccgtcgctgccgcacaccgggtagcggctcttgcacacgcacacgccgcttacacccggaccgccggctgctgccccggctttacccctccgcctcttgcggctcttcacgcactccatgcccggcgcgcagtaccccctgccggcgccgccacccccgcacggctcgccctcgccgcgggcgcacatagggcagcagccgcacgcgtcgcgggtctcgcccagcaggcagcccagcgggggcaggggcgggcaggaggccggctcgcaggggccgcaggtgtccgaagaggaggaagaggagaggggcaggagcaggagcagcagcccagcggcgccgaggagcagggcgcgcagcgacggccgctccatggcggggtgcggtggcagcggcaagggcgcgagtgagccgtgtcgggccggccggcgccttaaacccgccgccccgcccggcctgtccgcg

SEQ ID NO: 419589 - DNA, 5511 bp, Homo sapiens
aggcactggaggattgagctaggtgggcagaaaagagcagtgtcgttatttgtgcaacaacattgaaaaacaagcagaaataaaacattgacggaacggatacgaccgcagattgcgggagctgtcctctcaatcggcccggcagcggcggcccacaatttacgcgtgtgcaaccctaaccccggcccaagcttgacctacaatttgcgcaggcgcagatcctaactttggcgtccctgtgggcggcctttggtgtgagacgcgtggtattctgggaacgtcggagacggaagttacttcgtctttagctcctggcgctgctggcttctgggcggttttgtcttttgatttcaagagttaggagctcgagaaccgtttggcaatatgtacgacgcggatgaggatatgcaatatgatgaggatgatgatgaaatcaccccggatttgtggcaagaagcatgctggattgtaatcagttcctattttgacgagaaaggcttggttagacaacagctggattcttttgatgagtttattcagatgtctgttcaaagaattgtggaagacgctcctcctatagacctacaggctgaagctcagcatgctagtggagaagttgaagaaccgccacgatatttgctgaagtttgaacaaatttatctttccaagcctacccattgggaaagagatggtgctccttcaccaatgatgcccaatgaagctagattaaggaatctcacgtattctgctccgctttatgttgatataacaaaaacagtcattaaagaaggtgaagaacaacttcagactcagcatcagaaaacttttataggaaaaattccaattatgttgcggtcaacttactgccttttgaatggcttgacagatcgtgatctttgtgagttaaatgaatgccctttggatcctggtggctatttcattattaatggatcagaaaaggttctgattgcccaagagaaaatggcaacaaacacagtttatgtgtttgccaaaaaggattctaaatatgcctacacaggagagtgtagatcatgtcttgagaattcttcccgacccaccagtactatatgggttagcatgctggcaagaggaggacagggtgccaagaagagtgctattggtcagcgcattgtggcaactctaccatatatcaagcaagaagttcccatcattattgtgttcagagcattaggttttgtgtccgacagagatattttagaacatattatttatgattttgaagatccagagatgatggaaatggttaaaccttctctcgatgaagcttttgtcatccaagaacagaatgttgcactaaatttcattggttcaagaggagcaaagcctggtgttactaaagagaaaagaattaaatatgcaaaggaagttttacaaaaagaaatgctccctcatgttggtgtcagtgatttttgtgagaccaaaaaagcctatttcttgggatacatggttcataggttacttctggcagctttgggtagaagagaactagatgacagagatcactatggaaacaagagattggatcttgctgggccgctgcttgcattcttatttagaggtatgtttaagaatttgcttaaagaagtgcggatctatgcacagaaatttattgatcgaggaaaggattttaacttggagttggcaattaaaacacggatcatatctgatggcctaaaatactctttagctactggaaactggggtgatcaaaagaaagctcatcaagccagagctggagtatctcaggtgttaaaccgcctgacttttgcgtctactctttctcacctgcgtcgtttaaattctcctattggtagagacggcaagctagcaaaaccaagacagttgcataatacgttgtggggaatggtgtgtcctgccgagaccccagagggccatgctgtaggacttgtgaagaatttagccttgatggcgtatatttcagttggatctcaaccatctccaattctggaatttttagaagaatggagtatggaaaatttagaagaaatttctcctgcagctattgctgatgcaaccaagatttttgttaatggctgctgggttggaatacataaagatcccgaacaacttatgaacaccctaaggaaattgagacgtcagatggacatcattgtgtctgaagtttctatgatcagagatattcgagagagggagattcggatctatacggatgcaggccgtatttgtagaccacttctgattgtggaaaaacaaaagctacttttgaagaagaggcatattgaccaattgaaagagagagaatataacaactatagttggcaggatcttgtggccagtggggtagtggagtatattgataccctggaagaagaaacagtgatgcttgcaatgactccagatgatttacaggagaaagaagtagcttattgttccacatatacacactgtgagattcatccctcaatgatccttggtgtctgtgcatctattattccctttcctgatcataaccagtcccctagaaacacataccagtctgctatgggtaagcaggctatgggagtttacatcaccaacttccatgttcgcatggacacattggcccatgttctctattatcctcaaaagccacttgtgactacacggtctatggaatatctacgatttagagagctgccagcaggcatcaactcaattgtggccattgcatcatacactggatataatcaggaagactctgttatcatgaatcgttcagctgtagaccgcggcttcttcaggtctgttttctatcgctcatacaaagaacaggagtctaaaaaaggatttgatcaagaagaagtttttgagaagcctacacgtgaaacatgccagggcatgaggcatgccatttacgacaagctggatgatgatggtttgatagctccaggggttcgtgtatcaggagatgatgttattataggcaaaacagtcaccttgcctgaaaatgaagatgaattggagagcaccaatagacgctataccaagagagactgtagcacttttctcagaactagtgagacgggcattgtggatcaggttatggtaactctcaatcaggaaggatataaattttgtaaaataagggtgagtacaactttgttcatgtagctagttttagaaagtaaaccaaatccacttaactaacttatttttatatgaatttaggtacgctctgttaggattccacagattggagacaaatttgctagtcgacatggtcaaaagggtacttgtggtattcagtatagacaagaggtaggtatctttgatctccctcatgcccaaaccagttttgttaaatattttttttttaatcaaaatttgctttaacttaagagctcaaagatgatacaggttgaactttttgattttattgttgaataagtatatgaacataccatgtttaaacagaatttgggacatacagtaattcagttgggagaactgaaatgtcagttctagtttagtatatgtatctttgagtcccttttaaaatttttctttgtaggatatgcctttcacctgtgaaggtatcacccctgatatcatcatcaatccccatgccatcccctctcgtatgactattggtcacttaattgaatgccttcaagggaaggtatcggctaacaagggtgaaattggtgatgccactccatttaatgatgctgttaacgtgcagaagatttctaatcttttatctgattatggctatcatctcagaggaaatgaggtcctgtacaatgggttcactggtcgaaaaatcacatcacaaatatttattggccccacttattaccagcgtttgaagcatatggtggatgataagattcactctcgtgctaggggacctattcagatcctcaatagacagcccatggagggtagatctcgtgatggtggcctgcgttttggagaaatggaacgagattgtcagattgcccatggagcagcccagtttttaagggaaagattgtttgaggcatcagatccatatcaggttcatgtttgcaatctttgtggaataatggcgattgccaacaccaggacccatacatatgaatgcaggggctgccgcaataaaacccagatttctttggtgcgaatgccttacgcatgcaaactattgtttcaggaacttatgtctatgagtattgcaccgcgaatgatgagtgtttagctattttacaggagtcaacaagataattaaatatcttggtgtcttgtttctattgtgtggctttttaaaaatgacaaatatgtactgtgttgtgataaaaagtattttatttgtttaatgatatgcatgcttttcttctgtaaatatataataaatttttgtagatagtcttgatgtgtgatctttattttgtatttctctgtgtaaaaccagtgaatataactaaagtgttagtggattggattaaaagaaacttattaggcaagaacaggtaatgtagttatccatgactacttttaaccatgcagactaataatattctggaggtttatagctcggcaccttcaccttttttcactggtatttcatgtaaggcatcaaccactgtaatttttgctgatgctgaagcctgtccttgggaattggatgcatggcactcatattctccagcatcttccttacttagaggagataccagcacccagccagttacttcatgcttttctgggccaccccgggtctgaatggccaggttgtcccggtcaccaggcaggagttctgtcctttgaactccatagtgacccctttttaccttgttccagatgaggacaggtgtcgggattccgatgacctcacagctcaagtacacctgggcaccagtgacattccagatgtccttggggggcgtcactatggaaggaccttgctcgcaggtgcccttgctgacctgggtgatggccttctccccgcggctctcggccctctggctggcggcgcgcagctggcagccgctcgggtaggtggtgccgtcgctgccgcacaccgggtagcggctcttgcacacgcacacgccgcttacacccggaccgccggctgctgccccggctttacccctccgcctcttgcggctcttcacgcactccatgcccggcgcgcagtaccccctgccggcgccgccacccccgcacggctcgccctcgccgcgggcgcacatagggcagcagccgcacgcgtcgcgggtctcgcccagcaggcagcccagcgggggcaggggcgggcaggaggccggctcgcaggggccgcaggtgtccgaagaggaggaagaggagaggggcaggagcaggagcagcagcccagcggcgccgaggagcagggcgcgcagcgacggccgctccatggcggggtgcggtggcagcggcaagggcgcgagtgagccgtgtcgggccggccggcgccttaaacccgccgccccgcccggcctgtccgcg

SEQ ID NO: 419590 - DNA, 3998 bp, Homo sapiens
aaaaaagcagtggaggctgggtgaatcggccgaggttttgtgtccgacagagatattttagaacatattatttatgattttgaagatccagagatgatggaaatggttaaaccttctctcgatgaagcttttgtcatccaagaacagaatgttgcactaaatttcattggttcaagaggagcaaagcctggtgttactaaagagaaaagaattaaatatgcaaaggaagttttacaaaaagaaatgctccctcatgttggtgtcagtgatttttgtgagaccaaaaaagcctatttcttgggatacatggttcataggttacttctggcagctttgggtagaagagaactagatgacagagatcactatggaaacaagagattggatcttgctgggccgctgcttgcattcttatttagaggtatgtttaagaatttgcttaaagaagtgcggatctatgcacagaaatttattgatcgaggaaaggattttaacttggagttggcaattaaaacacggatcatatctgatggcctaaaatactctttagctactggaaactggggtgatcaaaagaaagctcatcaagccagagctggagtatctcaggtgttaaaccgcctgacttttgcgtctactctttctcacctgcgtcgtttaaattctcctattggtagagacggcaagctagcaaaaccaagacagttgcataatacgttgtggggaatggtgtgtcctgccgagaccccagagggccatgctgtaggacttgtgaagaatttagccttgatggcgtatatttcagttggatctcaaccatctccaattctggaatttttagaagaatggagtatggaaaatttagaagaaatttctcctgcagctattgctgatgcaaccaagatttttgttaatggctgctgggttggaatacataaagatcccgaacaacttatgaacaccctaaggaaattgagacgtcagatggacatcattgtgtctgaagtttctatgatcagagatattcgagagagggagattcggatctatacggatgcaggccgtatttgtagaccacttctgattgtggaaaaacaaaagctacttttgaagaagaggcatattgaccaattgaaagagagagaatataacaactatagttggcaggatcttgtggccagtggggtagtggagtatattgataccctggaagaagaaacagtgatgcttgcaatgactccagatgatttacaggagaaagaagtagcttattgttccacatatacacactgtgagattcatccctcaatgatccttggtgtctgtgcatctattattccctttcctgatcataaccagtcccctagaaacacataccagtctgctatgggtaagcaggctatgggagtttacatcaccaacttccatgttcgcatggacacattggcccatgttctctattatcctcaaaagccacttgtgactacacggtctatggaatatctacgatttagagagctgccagcaggcatcaactcaattgtggccattgcatcatacactggatataatcaggaagactctgttatcatgaatcgttcagctgtagaccgcggcttcttcaggtctgttttctatcgctcatacaaagaacaggagtctaaaaaaggatttgatcaagaagaagtttttgagaagcctacacgtgaaacatgccagggcatgaggcatgccatttacgacaagctggatgatgatggtttgatagctccaggggttcgtgtatcaggagatgatgttattataggcaaaacagtcaccttgcctgaaaatgaagatgaattggagagcaccaatagacgctataccaagagagactgtagcacttttctcagaactagtgagacgggcattgtggatcaggttatggtaactctcaatcaggaaggatataaattttgtaaaataagggtacgctctgttaggattccacagattggagacaaatttgctagtcgacatggtcaaaagggtacttgtggtattcagtatagacaagaggatatgcctttcacctgtgaaggtatcacccctgatatcatcatcaatccccatgccatcccctctcgtatgactattggtcacttaattgaatgccttcaagggaaggtatcggctaacaagggtgaaattggtgatgccactccatttaatgatgctgttaacgtgcagaagatttctaatcttttatctgattatggctatcatctcagaggaaatgaggtcctgtacaatgggttcactggtcgaaaaatcacatcacaaatatttattggccccacttattaccagcgtttgaagcatatggtggatgataagattcactctcgtgctaggggacctattcagatcctcaatagacagcccatggagggtagatctcgtgatggtggcctgcgttttggagaaatggaacgagattgtcagattgcccatggagcagcccagtttttaagggaaagattgtttgaggcatcagatccatatcaggttcatgtttgcaatctttgtggaataatggcgattgccaacaccaggacccatacatatgaatgcaggggctgccgcaataaaacccagatttctttggtgcgaatgccttacgcatgcaaactattgtttcaggaacttatgtctatgagtattgcaccgcgaatgatgagtgtttagctattttacaggagtcaacaagataattaaatatcttggtgtcttgtttctattgtgtggctttttaaaaatgacaaatatgtactgtgttgtgataaaaagtattttatttgtttaatgatatgcatgcttttcttctgtaaatatataataaatttttgtagatagtcttgatgtgtgatctttattttgtatttctctgtgtaaaaccagtgaatataactaaagtgttagtggattggattaaaagaaacttattaggcaagaacaggtaatgtagttatccatgactacttttaaccatgcagactaataatattctggaggtttatagctcggcaccttcaccttttttcactggtatttcatgtaaggcatcaaccactgtaatttttgctgatgctgaagcctgtccttgggaattggatgcatggcactcatattctccagcatcttccttacttagaggagataccagcacccagccagttacttcatgcttttctgggccaccccgggtctgaatggccaggttgtcccggtcaccaggcaggagttctgtcctttgaactccatagtgacccctttttaccttgttccagatgaggacaggtgtcgggattccgatgacctcacagctcaagtacacctgggcaccagtgacattccagatgtccttggggggcgtcactatggaaggaccttgctcgcaggtgcccttgctgacctgggtgatggccttctccccgcggctctcggccctctggctggcggcgcgcagctggcagccgctcgggtaggtggtgccgtcgctgccgcacaccgggtagcggctcttgcacacgcacacgccgcttacacccggaccgccggctgctgccccggctttacccctccgcctcttgcggctcttcacgcactccatgcccggcgcgcagtaccccctgccggcgccgccacccccgcacggctcgccctcgccgcgggcgcacatagggcagcagccgcacgcgtcgcgggtctcgcccagcaggcagcccagcgggggcaggggcgggcaggaggccggctcgcaggggccgcaggtgtccgaagaggaggaagaggagaggggcaggagcaggagcagcagcccagcggcgccgaggagcagggcgcgcagcgacggccgctccatggcggggtgcggtggcagcggcaagggcgcgagtgagccgtgtcgggccggccggcgccttaaacccgccgccccgcccggcctgtccgcg

SEQ ID NO: 419591 - DNA, 2946 bp, Homo sapiens
tttgtaaacatttaaaaaataaccagtgagaagaggatacctagcatttgttgtttcttctagaaaactcaaacttactttctagttatttattttgacagacacttaaaacctgcttatgcagtgggatggatgggatgttccagggaaatgcaatatctctgctacagtgttgactctgaatagcattgcatgaagtaaaatgtattttgtttcctttgccatcttcctgttactccccttccattgggtggctctgtgtagtagtgaattgatgtccagtggagttaagattgagttaagatgaaatccacaatttctgtgggaggatgtgtacagagggcatccatagatactctctttttaatttaaaaaaatttttctcctgtacccactgatggcagagatattctttctcttgtaatatagaaatcagaagatgacaacagtgctgattccaatgttcttttccttcatagacttttttttttgttttctgtgtggactgtagtattagagttcagaatagtttgtaatatttggaataagggtgtgattcatggtatagagactcctgtggccttctctctgacttggaactgattcatgtatgtggtttttaatctttgttggggattatgtgacattccgtgtctatttcctcacaggcatgaggcatgccatttacgacaagctggatgatgatggtttgatagctccaggggttcgtgtatcaggagatgatgttattataggcaaaacagtcaccttgcctgaaaatgaagatgaattggagagcaccaatagacgctataccaagagagactgtagcacttttctcagaactagtgagacgggcattgtggatcaggttatggtaactctcaatcaggaaggatataaattttgtaaaataagggtacgctctgttaggattccacagattggagacaaatttgctagtcgacatggtcaaaagggtacttgtggtattcagtatagacaagaggatatgcctttcacctgtgaaggtatcacccctgatatcatcatcaatccccatgccatcccctctcgtatgactattggtcacttaattgaatgccttcaagggaaggtatcggctaacaagggtgaaattggtgatgccactccatttaatgatgctgttaacgtgcagaagatttctaatcttttatctgattatggctatcatctcagaggaaatgaggtcctgtacaatgggttcactggtcgaaaaatcacatcacaaatatttattggccccacttattaccagcgtttgaagcatatggtggatgataagattcactctcgtgctaggggacctattcagatcctcaatagacagcccatggagggtagatctcgtgatggtggcctgcgttttggagaaatggaacgagattgtcagattgcccatggagcagcccagtttttaagggaaagattgtttgaggcatcagatccatatcaggttcatgtttgcaatctttgtggaataatggcgattgccaacaccaggacccatacatatgaatgcaggggctgccgcaataaaacccagatttctttggtgcgaatgccttacgcatgcaaactattgtttcaggaacttatgtctatgagtattgcaccgcgaatgatgagtgtttagctattttacaggagtcaacaagataattaaatatcttggtgtcttgtttctattgtgtggctttttaaaaatgacaaatatgtactgtgttgtgataaaaagtattttatttgtttaatgatatgcatgcttttcttctgtaaatatataataaatttttgtagatagtcttgatgtgtgatctttattttgtatttctctgtgtaaaaccagtgaatataactaaagtgttagtggattggattaaaagaaacttattaggcaagaacaggtaatgtagttatccatgactacttttaaccatgcagactaataatattctggaggtttatagctcggcaccttcaccttttttcactggtatttcatgtaaggcatcaaccactgtaatttttgctgatgctgaagcctgtccttgggaattggatgcatggcactcatattctccagcatcttccttacttagaggagataccagcacccagccagttacttcatgcttttctgggccaccccgggtctgaatggccaggttgtcccggtcaccaggcaggagttctgtcctttgaactccatagtgacccctttttaccttgttccagatgaggacaggtgtcgggattccgatgacctcacagctcaagtacacctgggcaccagtgacattccagatgtccttggggggcgtcactatggaaggaccttgctcgcaggtgcccttgctgacctgggtgatggccttctccccgcggctctcggccctctggctggcggcgcgcagctggcagccgctcgggtaggtggtgccgtcgctgccgcacaccgggtagcggctcttgcacacgcacacgccgcttacacccggaccgccggctgctgccccggctttacccctccgcctcttgcggctcttcacgcactccatgcccggcgcgcagtaccccctgccggcgccgccacccccgcacggctcgccctcgccgcgggcgcacatagggcagcagccgcacgcgtcgcgggtctcgcccagcaggcagcccagcgggggcaggggcgggcaggaggccggctcgcaggggccgcaggtgtccgaagaggaggaagaggagaggggcaggagcaggagcagcagcccagcggcgccgaggagcagggcgcgcagcgacggccgctccatggcggggtgcggtggcagcggcaagggcgcgagtgagccgtgtcgggccggccggcgccttaaacccgccgccccgcccggcctgtccgcg

SEQ ID NO: 419592 - DNA, 2014 bp, Homo sapiens
  misc_feature (3)..(3): n is a, c, g, or t
ctnggagcctgttttctcgccatctagtacatccctgtctggagggaggtggttgtggtattcagtatagacaagaggatatgcctttcacctgtgaaggtatcacccctgatatcatcatcaatccccatgccatcccctctcgtatgactattggtcacttaattgaatgccttcaagggaaggtatcggctaacaagggtgaaattggtgatgccactccatttaatgatgctgttaacgtgcagaagatttctaatcttttatctgattatggctatcatctcagaggaaatgaggtcctgtacaatgggttcactggtcgaaaaatcacatcacaaatatttattggccccacttattaccagcgtttgaagcatatggtggatgataagattcactctcgtgctaggggacctattcagatcctcaatagacagcccatggagggtagatctcgtgatggtggcctgcgttttggagaaatggaacgagattgtcagattgcccatggagcagcccagtttttaagggaaagattgtttgaggcatcagatccatatcaggttcatgtttgcaatctttgtggaataatggcgattgccaacaccaggacccatacatatgaatgcaggggctgccgcaataaaacccagatttctttggtgcgaatgccttacgcatgcaaactattgtttcaggaacttatgtctatgagtattgcaccgcgaatgatgagtgtttagctattttacaggagtcaacaagataattaaatatcttggtgtcttgtttctattgtgtggctttttaaaaatgacaaatatgtactgtgttgtgataaaaagtattttatttgtttaatgatatgcatgcttttcttctgtaaatatataataaatttttgtagatagtcttgatgtgtgatctttattttgtatttctctgtgtaaaaccagtgaatataactaaagtgttagtggattggattaaaagaaacttattaggcaagaacaggtaatgtagttatccatgactacttttaaccatgcagactaataatattctggaggtttatagctcggcaccttcaccttttttcactggtatttcatgtaaggcatcaaccactgtaatttttgctgatgctgaagcctgtccttgggaattggatgcatggcactcatattctccagcatcttccttacttagaggagataccagcacccagccagttacttcatgcttttctgggccaccccgggtctgaatggccaggttgtcccggtcaccaggcaggagttctgtcctttgaactccatagtgacccctttttaccttgttccagatgaggacaggtgtcgggattccgatgacctcacagctcaagtacacctgggcaccagtgacattccagatgtccttggggggcgtcactatggaaggaccttgctcgcaggtgcccttgctgacctgggtgatggccttctccccgcggctctcggccctctggctggcggcgcgcagctggcagccgctcgggtaggtggtgccgtcgctgccgcacaccgggtagcggctcttgcacacgcacacgccgcttacacccggaccgccggctgctgccccggctttacccctccgcctcttgcggctcttcacgcactccatgcccggcgcgcagtaccccctgccggcgccgccacccccgcacggctcgccctcgccgcgggcgcacatagggcagcagccgcacgcgtcgcgggtctcgcccagcaggcagcccagcgggggcaggggcgggcaggaggccggctcgcaggggccgcaggtgtccgaagaggaggaagaggagaggggcaggagcaggagcagcagcccagcggcgccgaggagcagggcgcgcagcgacggccgctccatggcggggtgcggtggcagcggcaagggcgcgagtgagccgtgtcgggccggccggcgccttaaacccgccgccccgcccggcctgtccgcg

SEQ ID NO: 419593 - DNA, 4682 bp, Homo sapiens
  misc_feature (4639)..(4639): n is a, c, g, or t
  misc_feature (4651)..(4651): n is a, c, g, or t
aggcactggaggattgagctaggtgggcagaaaagagcagtgtcgttatttgtgcaacaacattgaaaaacaagcagaaataaaacattgacggaacggatacgaccgcagattgcgggagctgtcctctcaatcggcccggcagcggcggcccacaatttacgcgtgtgcaaccctaaccccggcccaagcttgacctacaatttgcgcaggcgcagatcctaactttggcgtccctgtgggcggcctttggtgtgagacgcgtggtattctgggaacgtcggagacggaagttacttcgtctttagctcctggcgctgctggcttctgggcggttttgtcttttgatttcaagagttaggagctcgagaaccgtttggcaatatgtacgacgcggatgaggatatgcaatatgatgaggatgatgatgaaatcaccccggatttgtggcaagaagcatgctggattgtaatcagttcctattttgacgagaaaggcttggttagacaacagctggattcttttgatgagtttattcagatgtctgttcaaagaattgtggaagacgctcctcctatagacctacaggctgaagctcagcatgctagtggagaagttgaagaaccgccacgatatttgctgaagtttgaacaaatttatctttccaagcctacccattgggaaagagatggtgctccttcaccaatgatgcccaatgaagctagattaaggaatctcacgtattctgctccgctttatgttgatataacaaaaacagtcattaaagaaggtgaagaacaacttcagactcagcatcagaaaacttttataggaaaaattccaattatgttgcggtcaacttactgccttttgaatggcttgacagatcgtgatctttgtgagttaaatgaatgccctttggatcctggtggctatttcattattaatggatcagaaaaggttctgattgcccaagagaaaatggcaacaaacacagtttatgtgtttgccaaaaaggattctaaatatgcctacacaggagagtgtagatcatgtcttgagaattcttcccgacccaccagtactatatgggttagcatgctggcaagaggaggacagggtgccaagaagagtgctattggtcagcgcattgtggcaactctaccatatatcaagcaagaagttcccatcattattgtgttcagagcattaggttttgtgtccgacagagatattttagaacatattatttatgattttgaagatccagagatgatggaaatggttaaaccttctctcgatgaagcttttgtcatccaagaacagaatgttgcactaaatttcattggttcaagaggagcaaagcctggtgttactaaagagaaaagaattaaatatgcaaaggaagttttacaaaaagaaatgctccctcatgttggtgtcagtgatttttgtgagaccaaaaaagcctatttcttgggatacatggttcataggttacttctggcagctttgggtagaagagaactagatgacagagatcactatggaaacaagagattggatcttgctgggccgctgcttgcattcttatttagaggtatgtttaagaatttgcttaaagaagtgcggatctatgcacagaaatttattgatcgaggaaaggattttaacttggagttggcaattaaaacacggatcatatctgatggcctaaaatactctttagctactggaaactggggtgatcaaaagaaagctcatcaagccagagctggagtatctcaggtgttaaaccgcctgacttttgcgtctactctttctcacctgcgtcgtttaaattctcctattggtagagacggcaagctagcaaaaccaagacagttgcataatacgttgtggggaatggtgtgtcctgccgagaccccagagggccatgctgtaggacttgtgaagaatttagccttgatggcgtatatttcagttggatctcaaccatctccaattctggaatttttagaagaatggagtatggaaaatttagaagaaatttctcctgcagctattgctgatgcaaccaagatttttgttaatggctgctgggttggaatacataaagatcccgaacaacttatgaacaccctaaggaaattgagacgtcagatggacatcattgtgtctgaagtttctatgatcagagatattcgagagagggagattcggatctatacggatgcaggccgtatttgtagaccacttctgattgtggaaaaacaaaagctacttttgaagaagaggcatattgaccaattgaaagagagagaatataacaactatagttggcaggatcttgtggccagtggggtagtggagtatattgataccctggaagaagaaacagtgatgcttgcaatgactccagatgatttacaggagaaagaagtagcttattgttccacatatacacactgtgagattcatccctcaatgatccttggtgtctgtgcatctattattccctttcctgatcataaccagtcccctagaaacacataccagtctgctatgggtaagcaggctatgggagtttacatcaccaacttccatgttcgcatggacacattggcccatgttctctattatcctcaaaagccacttgtgactacacggtctatggaatatctacgatttagagagctgccagcaggcatcaactcaattgtggccattgcatcatacactggatataatcaggaagactctgttatcatgaatcgttcagctgtagaccgcggcttcttcaggtctgttttctatcgctcatacaaagaacaggagtctaaaaaaggatttgatcaagaagaagtttttgagaagcctacacgtgaaacatgccagggcatgaggcatgccatttacgacaagctggatgatgatggtttgatagctccaggggttcgtgtatcaggagatgatgttattataggcaaaacagtcaccttgcctgaaaatgaagatgaattggagagcaccaatagacgctataccaagagagactgtagcacttttctcagaactagtgagacgggcattgtggatcaggttatggtaactctcaatcaggaaggatataaattttgtaaaataagggtacgctctgttaggattccacagattggagacaaatttgctagtcgacatggtcaaaagggtacttgtggtattcagtatagacaagaggatatgcctttcacctgtgaaggtatcacccctgatatcatcatcaatccccatgccatcccctctcgtatgactattggtcacttaattgaatgccttcaagggaaggtatcggctaacaagggtgaaattggtgatgccactccatttaatgatgctgttaacgtgcagaagatttctaatcttttatctgattatggctatcatctcagaggaaatgaggtcctgtacaatgggttcactggtcgaaaaatcacatcacaaatatttattggccccacttattaccagcgtttgaagcatatggtggatgataagattcactctcgtgctaggggacctattcagatcctcaatagacagcccatggagggtagatctcgtgatggtggcctgcgttttggagaaatggaacgagattgtcagattgcccatggagcagcccagtttttaagggaaagattgtttgaggcatcagatccatatcaggttcatgtttgcaatctttgtggaataatggcgattgccaacaccaggacccatacatatgaatgcaggggctgccgcaataaaacccagatttctttggtgcgaatgccttacgcatgcaaactattgtttcaggaacttatgtctatgagtattgcaccgcgaatgatgagtgtttagctattttacaggagtcaacaagataattaaatatcttggtgtcttgtttctattgtgtggctttttaaaaatgacaaatatgtactgtgttgtgataaaaagtattttatttgtttaatgatatgcatgcttttcttctgtaaatatataataaatttttgtagatagtcttgatgtgtgatctttattttgtatttctctgtgtaaaaccagtgaatataactaaagtgttagtggattggattaaaagaaacttattaggcaagaacaggtaatgtagttatccatgactacttttaaccatgcagactaataatattctggaggtttatagctcggcaccttcaccttttttcactggtatttcatgtaaggcatcaaccactgtaatttttgctgatgctgaagcctgtccttgggaattggatgcatggcactcatattctccagcatcttccttacttagaggagataccagcacccagccagttacttcatgcttttctgggccaccccgggtctgaatggccaggttgtcccggtcaccaggcaggagttctgtcctttgaactccatagtgacccctttttaccttgttccagatgaggacaggtgtcgggattccgatgacctcacagctcaagtacacctgggcaccagtgacattccagatgtccttggggggcgtcactatggaaggaccttgctcgcaggtgcccttgatgcctgnaaggggatcctntaagattctacctacacgcatcccgcgtaca

SEQ ID NO: 419594 - DNA, 5148 bp, Homo sapiens
aggcactggaggattgagctaggtgggcagaaaagagcagtgtcgttatttgtgcaacaacattgaaaaacaagcagaaataaaacattgacggaacggatacgaccgcagattgcgggagctgtcctctcaatcggcccggcagcggcggcccacaatttacgcgtgtgcaaccctaaccccggcccaagcttgacctacaatttgcgcaggcgcagatcctaactttggcgtccctgtgggcggcctttggtgtgagacgcgtggtattctgggaacgtcggagacggaagttacttcgtctttagctcctggcgctgctggcttctgggcggttttgtcttttgatttcaagagttaggagctcgagaaccgtttggcaatatgtacgacgcggatgaggatatgcaatatgatgaggatgatgatgaaatcaccccggatttgtggcaagaagcatgctggattgtaatcagttcctattttgacgagaaaggcttggttagacaacagctggattcttttgatgagtttattcagatgtctgttcaaagaattgtggaagacgctcctcctatagacctacaggctgaagctcagcatgctagtggagaagttgaagaaccgccacgatatttgctgaagtttgaacaaatttatctttccaagcctacccattgggaaagagatggtgctccttcaccaatgatgcccaatgaagctagattaaggaatctcacgtattctgctccgctttatgttgatataacaaaaacagtcattaaagaaggtgaagaacaacttcagactcagcatcagaaaacttttataggaaaaattccaattatgttgcggtcaacttactgccttttgaatggcttgacagatcgtgatctttgtgagttaaatgaatgccctttggatcctggtggctatttcattattaatggatcagaaaaggttctgattgcccaagagaaaatggcaacaaacacagtttatgtgtttgccaaaaaggattctaaatatgcctacacaggagagtgtagatcatgtcttgagaattcttcccgacccaccagtactatatgggttagcatgctggcaagaggaggacagggtgccaagaagagtgctattggtcagcgcattgtggcaactctaccatatatcaagcaagaagttcccatcattattgtgttcagagcattaggttttgtgtccgacagagatattttagaacatattatttatgattttgaagatccagagatgatggaaatggttaaaccttctctcgatgaagcttttgtcatccaagaacagaatgttgcactaaatttcattggttcaagaggagcaaagcctggtgttactaaagagaaaagaattaaatatgcaaaggaagttttacaaaaagaaatgctccctcatgttggtgtcagtgatttttgtgagaccaaaaaagcctatttcttgggatacatggttcataggttacttctggcagctttgggtagaagagaactagatgacagagatcactatggaaacaagagattggatcttgctgggccgctgcttgcattcttatttagaggtatgtttaagaatttgcttaaagaagtgcggatctatgcacagaaatttattgatcgaggaaaggattttaacttggagttggcaattaaaacacggatcatatctgatggcctaaaatactctttagctactggaaactggggtgatcaaaagaaagctcatcaagccagagctggagtatctcaggtgttaaaccgcctgacttttgcgtctactctttctcacctgcgtcgtttaaattctcctattggtagagacggcaagctagcaaaaccaagacagttgcataatacgttgtggggaatggtgtgtcctgccgagaccccagagggccatgctgtaggacttgtgaagaatttagccttgatggcgtatatttcagttggatctcaaccatctccaattctggaatttttagaagaatggagtatggaaaatttagaagaaatttctcctgcagctattgctgatgcaaccaagatttttgttaatggctgctgggttggaatacataaagatcccgaacaacttatgaacaccctaaggaaattgagacgtcagatggacatcattgtgtctgaagtttctatgatcagagatattcgagagagggagattcggatctatacggatgcaggccgtatttgtagaccacttctgattgtggaaaaacaaaagctacttttgaagaagaggcatattgaccaattgaaagagagagaatataacaactatagttggcaggatcttgtggccagtggggtagtggagtatattgataccctggaagaagaaacagtgatgcttgcaatgactccagatgatttacaggagaaagaagtagcttattgttccacatatacacactgtgagattcatccctcaatgatccttggtgtctgtgcatctattattccctttcctgatcataaccagtcccctagaaacacataccagtctgctatgggtaagcaggctatgggagtttacatcaccaacttccatgttcgcatggacacattggcccatgttctctattatcctcaaaagccacttgtgactacacggtctatggaatatctacgatttagagagctgccagcaggcatcaactcaattgtggccattgcatcatacactggatataatcaggaagactctgttatcatgaatcgttcagctgtagaccgcggcttcttcaggtctgttttctatcgctcatacaaagaacaggagtctaaaaaaggatttgatcaagaagaagtttttgagaagcctacacgtgaaacatgccagggcatgaggcatgccatttacgacaagctggatgatgatggtttgatagctccaggggttcgtgtatcaggagatgatgttattataggcaaaacagtcaccttgcctgaaaatgaagatgaattggagagcaccaatagacgctataccaagagagactgtagcacttttctcagaactagtgagacgggcattgtggatcaggttatggtaactctcaatcaggaaggatataaattttgtaaaataagggtacgctctgttaggattccacagattggagacaaatttgctagtcgacatggtcaaaagggtacttgtggtattcagtatagacaagaggatatgcctttcacctgtgaaggtatcacccctgatatcatcatcaatccccatgccatcccctctcgtatgactattggtcacttaattgaatgccttcaagggaaggtatcggctaacaagggtgaaattggtgatgccactccatttaatgatgctgttaacgtgcagaagatttctaatcttttatctgattatggctatcatctcagaggaaatgaggtcctgtacaatgggttcactggtcgaaaaatcacatcacaaatatttattggccccacttattaccagcgtttgaagcatatggtggatgataagattcactctcgtgctaggggacctattcagatcctcaatagacagcccatggagggtagatctcgtgatggtggcctgcgttttggagaaatggaacgagattgtcagattgcccatggagcagcccagtttttaagggaaagattgtttgaggcatcagatccatatcaggttcatgtttgcaatctttgtggaataatggcgattgccaacaccaggacccatacatatgaatgcaggggctgccgcaataaaacccagatttctttggtgcgaatgccttacgcatgcaaactattgtttcaggaacttatgtctatgagtattgcaccgcgaatgatgagtgtttagctattttacaggagtcaacaagataattaaatatcttggtgtcttgtttctattgtgtggctttttaaaaatgacaaatatgtactgtgttgtgataaaaagtattttatttgtttaatgatatgcatgcttttcttctgtaaatatataataaatttttgtagatagtcttgatgtgtgatctttattttgtatttctctgtgtaaaaccagtgaatataactaaagtgttagtggattggattaaaagaaacttattaggcaagaacaggtaatgtagttatccatgactacttttaaccatgcagactaataatattctggaggtttatagctcggcaccttcacctgtttaaaaaaaaaaaaagataaaaattagttacatatggggatgtggttgacttttgaattggcaggtagttgagtgtttccaaataaatgaagatgttaaaatatggggataaaggatatatgagtaattgtataaatgatatgctggagtgctctgtggaactcaagttacatgattttagctatgaaaggcaattttgctgtattggttgatgcatcaaaggtacatcttattatagaactggaagagcacatttcacaatgagattcagagaggttaaagacctttcctttgtagtccggatctccttcaaaaggtaaagtggaggaataattagtagcagagctgagactcaaacgcatggcttgactcttagctactgttctgtttcattgcctgacattacacattatggctgaagagaatctgaccaaatacttctttacttaatatttcttttcatatcacagctgagtgatctgcacagtggaatggtttgacacatggtgacggtaaattttgttcttttgtctaagggaaagccaattcagacatcagtttcatagaactatataaatgtaaagtagcactgctatgacacaggatgggttcttcagaggaagctttttggcagtgaaggaaggggaggcagaacagaactgggtatttgccaatatactctcctttgtggccttttcttttaaaagcaaaagtgaagggcgagaattgcccacaatcattttcttttaaataggaatttaatagtcacaacacaaagggaaaatgccaagtagataggtagaaagctatgggaaatagaagccattccaggcaagtttgattttgactcttacatgttagataaggtaaaagcatctaagtcataa

SEQ ID NO: 419595 - DNA, 4648 bp, Homo sapiens
aggcactggaggattgagctaggtgggcagaaaagagcagtgtcgttatttgtgcaacaacattgaaaaacaagcagaaataaaacattgacggaacggatacgaccgcagattgcgggagctgtcctctcaatcggcccggcagcggcggcccacaatttacgcgtgtgcaaccctaaccccggcccaagcttgacctacaatttgcgcaggcgcagatcctaactttggcgtccctgtgggcggcctttggtgtgagacgcgtggtattctgggaacgtcggagacggaagttacttcgtctttagctcctggcgctgctggcttctgggcggttttgtcttttgatttcaagagttaggagctcgagaaccgtttggcaatatgtacgacgcggatgaggatatgcaatatgatgaggatgatgatgaaatcaccccggatttgtggcaagaagcatgctggattgtaatcagttcctattttgacgagaaaggcttggttagacaacagctggattcttttgatgagtttattcagatgtctgttcaaagaattgtggaagacgctcctcctatagacctacaggctgaagctcagcatgctagtggagaagttgaagaaccgccacgatatttgctgaagtttgaacaaatttatctttccaagcctacccattgggaaagagatggtgctccttcaccaatgatgcccaatgaagctagattaaggaatctcacgtattctgctccgctttatgttgatataacaaaaacagtcattaaagaaggtgaagaacaacttcagactcagcatcagaaaacttttataggaaaaattccaattatgttgcggtcaacttactgccttttgaatggcttgacagatcgtgatctttgtgagttaaatgaatgccctttggatcctggtggctatttcattattaatggatcagaaaaggttctgattgcccaagagaaaatggcaacaaacacagtttatgtgtttgccaaaaaggattctaaatatgcctacacaggagagtgtagatcatgtcttgagaattcttcccgacccaccagtactatatgggttagcatgctggcaagaggaggacagggtgccaagaagagtgctattggtcagcgcattgtggcaactctaccatatatcaagcaagaagttcccatcattattgtgttcagagcattaggttttgtgtccgacagagatattttagaacatattatttatgattttgaagatccagagatgatggaaatggttaaaccttctctcgatgaagcttttgtcatccaagaacagaatgttgcactaaatttcattggttcaagaggagcaaagcctggtgttactaaagagaaaagaattaaatatgcaaaggaagttttacaaaaagaaatgctccctcatgttggtgtcagtgatttttgtgagaccaaaaaagcctatttcttgggatacatggttcataggttacttctggcagctttgggtagaagagaactagatgacagagatcactatggaaacaagagattggatcttgctgggccgctgcttgcattcttatttagaggtatgtttaagaatttgcttaaagaagtgcggatctatgcacagaaatttattgatcgaggaaaggattttaacttggagttggcaattaaaacacggatcatatctgatggcctaaaatactctttagctactggaaactggggtgatcaaaagaaagctcatcaagccagagctggagtatctcaggtgttaaaccgcctgacttttgcgtctactctttctcacctgcgtcgtttaaattctcctattggtagagacggcaagctagcaaaaccaagacagttgcataatacgttgtggggaatggtgtgtcctgccgagaccccagagggccatgctgtaggacttgtgaagaatttagccttgatggcgtatatttcagttggatctcaaccatctccaattctggaatttttagaagaatggagtatggaaaatttagaagaaatttctcctgcagctattgctgatgcaaccaagatttttgttaatggctgctgggttggaatacataaagatcccgaacaacttatgaacaccctaaggaaattgagacgtcagatggacatcattgtgtctgaagtttctatgatcagagatattcgagagagggagattcggatctatacggatgcaggccgtatttgtagaccacttctgattgtggaaaaacaaaagctacttttgaagaagaggcatattgaccaattgaaagagagagaatataacaactatagttggcaggatcttgtggccagtggggtagtggagtatattgataccctggaagaagaaacagtgatgcttgcaatgactccagatgatttacaggagaaagaagtagcttattgttccacatatacacactgtgagattcatccctcaatgatccttggtgtctgtgcatctattattccctttcctgatcataaccagtcccctagaaacacataccagtctgctatgggtaagcaggctatgggagtttacatcaccaacttccatgttcgcatggacacattggcccatgttctctattatcctcaaaagccacttgtgactacacggtctatggaatatctacgatttagagagctgccagcaggcatcaactcaattgtggccattgcatcatacactggatataatcaggaagactctgttatcatgaatcgttcagctgtagaccgcggcttcttcaggtctgttttctatcgctcatacaaagaacaggagtctaaaaaaggatttgatcaagaagaagtttttgagaagcctacacgtgaaacatgccagggcatgaggcatgccatttacgacaagctggatgatgatggtttgatagctccaggggttcgtgtatcaggagatgatgttattataggcaaaacagtcaccttgcctgaaaatgaagatgaattggagagcaccaatagacgctataccaagagagactgtagcacttttctcagaactagtgagacgggcattgtggatcaggttatggtaactctcaatcaggaaggatataaattttgtaaaataagggtacgctctgttaggattccacagattggagacaaatttgctagtcgacatggtcaaaagggtacttgtggtattcagtatagacaagaggatatgcctttcacctgtgaaggtatcacccctgatatcatcatcaatccccatgccatcccctctcgtatgactattggtcacttaattgaatgccttcaagggaaggtatcggctaacaagggtgaaattggtgatgccactccatttaatgatgctgttaacgtgcagaagatttctaatcttttatctgattatggctatcatctcagaggaaatgaggtcctgtacaatgggttcactggtcgaaaaatcacatcacaaatatttattggccccacttattaccagcgtttgaagcatatggtggatgataagattcactctcgtgctaggggacctattcagatcctcaatagacagcccatggagggtagatctcgtgatggtggcctgcgttttggagaaatggaacgagattgtcagattgcccatggagcagcccagtttttaagggaaagattgtttgaggcatcagatccatatcaggttcatgtttgcaatctttgtggaataatggcgattgccaacaccaggacccatacatatgaatgcaggggctgccgcaataaaacccagatttctttggtgcgaatgccttacgcatgcaaactattgtttcaggaacttatgtctatgagtattgcaccgcgaatgatgagtgtttagctattttacaggagtcaacaagataattaaatatcttggtgtcttgtttctattgtgtggctttttaaaaatgacaaatatgtactgtgttgtgataaaaagtattttatttgtttaatgatatgcatgcttttcttctgtaaatatataataaatttttgtagatagtcttgatgtgtgatctttattttgtatttctctgtgtaaaaccagtgaatataactaaagtgttagtggattggattaaaagaaacttattaggcaagaacaggtaatgtagttatccatgactacttttaaccatgcagactaataatattctggaggtttatagctcggcaccttcaccttttttcactggtatttcatgtaaggcatcaaccactgtaatttttgctgatgctgaagcctgtccttgggaattggatgcatggcactcatattctccagcatcttccttacttagaggagataccagcacccagccagttacttcatgcttttctgggccaccccgggtctgaatggccaggttgtcccggtcaccaggcaggagttctgtcctttgaactccatagtgacccctttttaccttgttccagatgaggacaggtgtcgggattccgatgacctcacagctcaagtacacctgggcaccagtgacattccagatgtccttggggggcgtcactatggaaggaccttgctcgcaggtgccatatgcaagggggccgagctc

SEQ ID NO: 419596 - DNA, 4535 bp, Homo sapiens
aggcactggaggattgagctaggtgggcagaaaagagcagtgtcgttatttgtgcaacaacattgaaaaacaagcagaaataaaacattgacggaacggatacgaccgcagattgcgggagctgtcctctcaatcggcccggcagcggcggcccacaatttacgcgtgtgcaaccctaaccccggcccaagcttgacctacaatttgcgcaggcgcagatcctaactttggcgtccctgtgggcggcctttggtgtgagacgcgtggtattctgggaacgtcggagacggaagttacttcgtctttagctcctggcgctgctggcttctgggcggttttgtcttttgatttcaagagttaggagctcgagaaccgtttggcaatatgtacgacgcggatgaggatatgcaatatgatgaggatgatgatgaaatcaccccggatttgtggcaagaagcatgctggattgtaatcagttcctattttgacgagaaaggcttggttagacaacagctggattcttttgatgagtttattcagatgtctgttcaaagaattgtggaagacgctcctcctatagacctacaggctgaagctcagcatgctagtggagaagttgaagaaccgccacgatatttgctgaagtttgaacaaatttatctttccaagcctacccattgggaaagagatggtgctccttcaccaatgatgcccaatgaagctagattaaggaatctcacgtattctgctccgctttatgttgatataacaaaaacagtcattaaagaaggtgaagaacaacttcagactcagcatcagaaaacttttataggaaaaattccaattatgttgcggtcaacttactgccttttgaatggcttgacagatcgtgatctttgtgagttaaatgaatgccctttggatcctggtggctatttcattattaatggatcagaaaaggttctgattgcccaagagaaaatggcaacaaacacagtttatgtgtttgccaaaaaggattctaaatatgcctacacaggagagtgtagatcatgtcttgagaattcttcccgacccaccagtactatatgggttagcatgctggcaagaggaggacagggtgccaagaagagtgctattggtcagcgcattgtggcaactctaccatatatcaagcaagaagttcccatcattattgtgttcagagcattaggttttgtgtccgacagagatattttagaacatattatttatgattttgaagatccagagatgatggaaatggttaaaccttctctcgatgaagcttttgtcatccaagaacagaatgttgcactaaatttcattggttcaagaggagcaaagcctggtgttactaaagagaaaagaattaaatatgcaaaggaagttttacaaaaagaaatgctccctcatgttggtgtcagtgatttttgtgagaccaaaaaagcctatttcttgggatacatggttcataggttacttctggcagctttgggtagaagagaactagatgacagagatcactatggaaacaagagattggatcttgctgggccgctgcttgcattcttatttagaggtatgtttaagaatttgcttaaagaagtgcggatctatgcacagaaatttattgatcgaggaaaggattttaacttggagttggcaattaaaacacggatcatatctgatggcctaaaatactctttagctactggaaactggggtgatcaaaagaaagctcatcaagccagagctggagtatctcaggtgttaaaccgcctgacttttgcgtctactctttctcacctgcgtcgtttaaattctcctattggtagagacggcaagctagcaaaaccaagacagttgcataatacgttgtggggaatggtgtgtcctgccgagaccccagagggccatgctgtaggacttgtgaagaatttagccttgatggcgtatatttcagttggatctcaaccatctccaattctggaatttttagaagaatggagtatggaaaatttagaagaaatttctcctgcagctattgctgatgcaaccaagatttttgttaatggctgctgggttggaatacataaagatcccgaacaacttatgaacaccctaaggaaattgagacgtcagatggacatcattgtgtctgaagtttctatgatcagagatattcgagagagggagattcggatctatacggatgcaggccgtatttgtagaccacttctgattgtggaaaaacaaaagctacttttgaagaagaggcatattgaccaattgaaagagagagaatataacaactatagttggcaggatcttgtggccagtggggtagtggagtatattgataccctggaagaagaaacagtgatgcttgcaatgactccagatgatttacaggagaaagaagtagcttattgttccacatatacacactgtgagattcatccctcaatgatccttggtgtctgtgcatctattattccctttcctgatcataaccagtcccctagaaacacataccagtctgctatgggtaagcaggctatgggagtttacatcaccaacttccatgttcgcatggacacattggcccatgttctctattatcctcaaaagccacttgtgactacacggtctatggaatatctacgatttagagagctgccagcaggcatcaactcaattgtggccattgcatcatacactggatataatcaggaagactctgttatcatgaatcgttcagctgtagaccgcggcttcttcaggtctgttttctatcgctcatacaaagaacaggagtctaaaaaaggatttgatcaagaagaagtttttgagaagcctacacgtgaaacatgccagggcatgaggcatgccatttacgacaagctggatgatgatggtttgatagctccaggggttcgtgtatcaggagatgatgttattataggcaaaacagtcaccttgcctgaaaatgaagatgaattggagagcaccaatagacgctataccaagagagactgtagcacttttctcagaactagtgagacgggcattgtggatcaggttatggtaactctcaatcaggaaggatataaattttgtaaaataagggtacgctctgttaggattccacagattggagacaaatttgctagtcgacatggtcaaaagggtacttgtggtattcagtatagacaagaggatatgcctttcacctgtgaaggtatcacccctgatatcatcatcaatccccatgccatcccctctcgtatgactattggtcacttaattgaatgccttcaagggaaggtatcggctaacaagggtgaaattggtgatgccactccatttaatgatgctgttaacgtgcagaagatttctaatcttttatctgattatggctatcatctcagaggaaatgaggtcctgtacaatgggttcactggtcgaaaaatcacatcacaaatatttattggccccacttattaccagcgtttgaagcatatggtggatgataagattcactctcgtgctaggggacctattcagatcctcaatagacagcccatggagggtagatctcgtgatggtggcctgcgttttggagaaatggaacgagattgtcagattgcccatggagcagcccagtttttaagggaaagattgtttgaggcatcagatccatatcaggttcatgtttgcaatctttgtggaataatggcgattgccaacaccaggacccatacatatgaatgcaggggctgccgcaataaaacccagatttctttggtgcgaatgccttacgcatgcaaactattgtttcaggaacttatgtctatgagtattgcaccgcgaatgatgagtgtttagctattttacaggagtcaacaagataattaaatatcttggtgtcttgtttctattgtgtggctttttaaaaatgacaaatatgtactgtgttgtgataaaaagtattttatttgtttaatgatatgcatgcttttcttctgtaaatatataataaatttttgtagatagtcttgatgtgtgatctttattttgtatttctctgtgtaaaaccagtgaatataactaaagtgttagtggattggattaaaagaaacttattaggcaagaacaggtaatgtagttatccatgactacttttaaccatgcagactaataatattctggaggtttatagctcggcaccttcaccttttttcactggtatttcatgtaaggcatcaaccactgtaatttttgctgatgctgaagcctgtccttgggaattggatgcatggcactcatattctccagcatcttccttacttagaggagataccagcacccagccagttacttcatgcttttctgggccaccccgggtctgaatggccaggttgtcccggtcaccaggcaggagttctgtcctttgaactccatagtgacccctttttacttgttccctaagcggatcagcgggccgagctcga

SEQ ID NO: 419597 - DNA, 3837 bp, Homo sapiens
aggcactggaggattgagctaggtgggcagaaaagagcagtgtcgttatttgtgcaacaacattgaaaaacaagcagaaataaaacattgacggaacggatacgaccgcagattgcgggagctgtcctctcaatcggcccggcagcggcggcccacaatttacgcgtgtgcaaccctaaccccggcccaagcttgacctacaatttgcgcaggcgcagatcctaactttggcgtccctgtgggcggcctttggtgtgagacgcgtggtattctgggaacgtcggagacggaagttacttcgtctttagctcctggcgctgctggcttctgggcggttttgtcttttgatttcaagagttaggagctcgagaaccgtttggcaatatgtacgacgcggatgaggatatgcaatatgatgaggatgatgatgaaatcaccccggatttgtggcaagaagcatgctggattgtaatcagttcctattttgacgagaaaggcttggttagacaacagctggattcttttgatgagtttattcagatgtctgttcaaagaattgtggaagacgctcctcctatagacctacaggctgaagctcagcatgctagtggagaagttgaagaaccgccacgatatttgctgaagtttgaacaaatttatctttccaagcctacccattgggaaagagatggtgctccttcaccaatgatgcccaatgaagctagattaaggaatctcacgtattctgctccgctttatgttgatataacaaaaacagtcattaaagaaggtgaagaacaacttcagactcagcatcagaaaacttttataggaaaaattccaattatgttgcggtcaacttactgccttttgaatggcttgacagatcgtgatctttgtgagttaaatgaatgccctttggatcctggtggctatttcattattaatggatcagaaaaggttctgattgcccaagagaaaatggcaacaaacacagtttatgtgtttgccaaaaaggattctaaatatgcctacacaggagagtgtagatcatgtcttgagaattcttcccgacccaccagtactatatgggttagcatgctggcaagaggaggacagggtgccaagaagagtgctattggtcagcgcattgtggcaactctaccatatatcaagcaagaagttcccatcattattgtgttcagagcattaggttttgtgtccgacagagatattttagaacatattatttatgattttgaagatccagagatgatggaaatggttaaaccttctctcgatgaagcttttgtcatccaagaacagaatgttgcactaaatttcattggttcaagaggagcaaagcctggtgttactaaagagaaaagaattaaatatgcaaaggaagttttacaaaaagaaatgctccctcatgttggtgtcagtgatttttgtgagaccaaaaaagcctatttcttgggatacatggttcataggttacttctggcagctttgggtagaagagaactagatgacagagatcactatggaaacaagagattggatcttgctgggccgctgcttgcattcttatttagaggtatgtttaagaatttgcttaaagaagtgcggatctatgcacagaaatttattgatcgaggaaaggattttaacttggagttggcaattaaaacacggatcatatctgatggcctaaaatactctttagctactggaaactggggtgatcaaaagaaagctcatcaagccagagctggagtatctcaggtgttaaaccgcctgacttttgcgtctactctttctcacctgcgtcgtttaaattctcctattggtagagacggcaagctagcaaaaccaagacagttgcataatacgttgtggggaatggtgtgtcctgccgagaccccagagggccatgctgtaggacttgtgaagaatttagccttgatggcgtatatttcagttggatctcaaccatctccaattctggaatttttagaagaatggagtatggaaaatttagaagaaatttctcctgcagctattgctgatgcaaccaagatttttgttaatggctgctgggttggaatacataaagatcccgaacaacttatgaacaccctaaggaaattgagacgtcagatggacatcattgtgtctgaagtttctatgatcagagatattcgagagagggagattcggatctatacggatgcaggccgtatttgtagaccacttctgattgtggaaaaacaaaagctacttttgaagaagaggcatattgaccaattgaaagagagagaatataacaactatagttggcaggatcttgtggccagtggggtagtggagtatattgataccctggaagaagaaacagtgatgcttgcaatgactccagatgatttacaggagaaagaagtagcttattgttccacatatacacactgtgagattcatccctcaatgatccttggtgtctgtgcatctattattccctttcctgatcataaccagtcccctagaaacacataccagtctgctatgggtaagcaggctatgggagtttacatcaccaacttccatgttcgcatggacacattggcccatgttctctattatcctcaaaagccacttgtgactacacggtctatggaatatctacgatttagagagctgccagcaggcatcaactcaattgtggccattgcatcatacactggatataatcaggaagactctgttatcatgaatcgttcagctgtagaccgcggcttcttcaggtctgttttctatcgctcatacaaagaacaggagtctaaaaaaggatttgatcaagaagaagtttttgagaagcctacacgtgaaacatgccagggcatgaggcatgccatttacgacaagctggatgatgatggtttgatagctccaggggttcgtgtatcaggagatgatgttattataggcaaaacagtcaccttgcctgaaaatgaagatgaattggagagcaccaatagacgctataccaagagagactgtagcacttttctcagaactagtgagacgggcattgtggatcaggttatggtaactctcaatcaggaaggatataaattttgtaaaataagggtacgctctgttaggattccacagattggagacaaatttgctagtcgacatggtcaaaagggtacttgtggtattcagtatagacaagaggtaggtatctttgatctccctcatgcccaaaccagttttgttaaatattttttttttaatcaaaatttgctttaacttaagagctcaaagatgatacaggttgaactttttgattttattgttgaataagtatatgaacataccatgtttaaacagaatttgggacatacagtaattcagttgggagaactgaaatgtcagttctagtttagtatatgtatctttgagtcccttttaaaatttttctttgtaggatatgcctttcacctgtgaaggtatcacccctgatatcatcatcaatccccatgccatcccctctcgtatgactattggtcacttaattgaatgccttcaagggaaggtaagagatgttcttcaaaaatatagattctaagctgatgcttcttctaaaactctgataggtgattgctctcacatttgagccagggtactttgtaaaaagctagtgtgagacttacttttctgctttcaaattgcttatgattctgccattttttttggcaatttgcaaagttatggacaagtcagaatttttgtgagatatactacattcaactaatacttacatatgtgatt

SEQ ID NO: 419598 - DNA, 1181 bp, Homo sapiens
aggcactggaggattgagctaggtgggcagaaaagagcagtgtcgttatttgtgcaacaacattgaaaaacaagcagaaataaaacattgacggaacggatacgaccgcagattgcgggagctgtcctctcaatcggcccggcagcggcggcccacaatttacgcgtgtgcaaccctaaccccggcccaagcttgacctacaatttgcgcaggcgcagatcctaactttggcgtccctgtgggcggcctttggtgtgagacgcgtggtattctgggaacgtcggagacggaagttacttcgtctttagctcctggcgctgctggcttctgggcggttttgtcttttgatttcaagagttaggagctcgagaaccgtttggcaatatgtacgacgcggatgaggatatgcaatatgatgaggatgatgatgaaatcaccccggatttgtggcaagaagcatgctggattgtaatcagttcctattttgacgagaaaggcttggttagacaacagctggattcttttgatgagtttattcagatgtctgttcaaagaattgtggaagacgctcctcctatagacctacaggctgaagctcagcatgctagtggagaagttgaagaaccgccacgatatttgctgaagtttgaacaaatttatctttccaagcctacccattgggaaagagatggtgctccttcaccaatgatgcccaatgaagctagattaaggaatctcacgtattctgctccgctttatgttgatataacaaaaacagtcattaaagaaggtgaagaacaacttcagactcagcatcagaaaacttttataggaaaaattccaattatgttgcggtcaacttactgccttttgaatggcttgacagatcgtgatctttgtgagttaaatgaatgccctttggatcctggtggctatttcattattaatggatcagaaaaggttctgattgcccaagagaaaatggcaacaaacacagtttatgtgtttgccaaaaaggattctaaatatgcctacacaggagagtgtggctcaatggcctcgaggaatacacggccccgaaccagcaaggactcaatgggtagcacaaggcggccagaagggagggacaggtggacaagaaaaaggggtaaaaggccacaggactagggcggagatacagc

SEQ ID NO: 419599 - DNA, 3449 bp, Homo sapiens
ctcgtgccgaattcggcacgagaccgcgtgttcgcgcctggtagagatttctcgaagacaccagtgggcccgtgtggaaccaaacctgcgcgcgtggccgggccgtgggacaacgaggccgcggagacgaaggcgcaatggcgaggaagttatctgtaatcttgatcctgacctttgccctctctgtcacaaatccccttcatgaactaaaagcagctgctttcccccagaccactgagaaaattagtccgaattgggaatctggcattaatgttgacttggcaatttccacacggcaatatcatctacaacagcttttctaccgctatggagaaaataattctttgtcagttgaagggttcagaaaattacttcaaaatataggcatagataagattaaaagaatccatatacaccatgaccacgaccatcactcagaccacgagcatcactcagaccatgagcgtcactcagaccatgagcatcactcagaccacgagcatcactctgaccataatcatgctgcttctggtaaaaataagcgaaaagctctttgcccagaccatgactcagatagttcaggtaaagatcctagaaacagccaggggaaaggagctcaccgaccagaacatgccagtggtagaaggaatgtcaaggacagtgttagtgctagtgaagtgacctcaactgtgtacaacactgtctctgaaggaactcactttctagagacaatagagactccaagacctggaaaactcttccccaaagatgtaagcagctccactccacccagtgtcacatcaaagagccgggtgagccggctggctggtaggaaaacaaatgaatctgtgagtgagccccgaaaaggctttatgtattccagaaacacaaatgaaaatcctcaggagtgtttcaatgcatcaaagctactgacatctcatggcatgggcatccaggttccgctgaatgcaacagagttcaactatctctgtccagccatcatcaaccaaattgatgctagatcttgtctgattcatacaagtgaaaagaaggctgaaatccctccaaagacctattcattacaaatagcctgggttggtggttttatagccatttccatcatcagtttcctgtctctgctgggggttatcttagtgcctctcatgaatcgggtgtttttcaaatttctcctgagtttccttgtggcactggccgttgggactttgagtggtgatgcttttttacaccttcttccacattctcatgcaagtcaccaccatagtcatagccatgaagaaccagcaatggaaatgaaaagaggaccacttttcagtcatctgtcttctcaaaacatagaagaaagtgcctattttgattccacgtggaagggtctaacagctctaggaggcctgtatttcatgtttcttgttgaacatgtcctcacattgatcaaacaatttaaagataagaagaaaaagaatcagaagaaacctgaaaatgatgatgatgtggagattaagaagcagttgtccaagtatgaatctcaactttcaacaaatgaggagaaagtagatacagatgatcgaactgaaggctatttacgagcagactcacaagagccctcccactttgattctcagcagcctgcagtcttggaagaagaagaggtcatgatagctcatgctcatccacaggaagtctacaatgaatatgtacccagagggtgcaagaataaatgccattcacatttccacgatacactcggccagtcagacgatctcattcaccaccatcatgactaccatcatattctccatcatcaccaccaccaaaaccaccatcctcacagtcacagccagcgctactctcgggaggagctgaaagatgccggcgtcgccactctggcctggatggtgataatgggtgatggcctgcacaatttcagcgatggcctagcaattggtgctgcttttactgaaggcttatcaagtggtttaagtacttctgttgctgtgttctgtcatgagttgcctcatgaattaggtgactttgctgttctactaaaggctggcatgaccgttaagcaggctgtcctttataatgcattgtcagccatgctggcgtatcttggaatggcaacaggaattttcattggtcattatgctgaaaatgtttctatgtggatatttgcacttactgctggcttattcatgtatgttgctctggttgatatggtacctgaaatgctgcacaatgatgctagtgaccatggatgtagccgctgggggtatttctttttacagaatgctgggatgcttttgggttttggaattatgttacttatttccatatttgaacataaaatcgtgtttcgtataaatttctagttaaggtttaaatgctagagtagcttaaaaagttgtcatagtttcagtaggtcatagggagatgagtttgtatgctgtactatgcagcgtttaaagttagtgggttttgtgatttttgtattgaatattgctgtctgttacaaagtcagttaaaggtacgttttaatatttaagttattctatcttggagataaaatctgtatgtgcaattcaccggtattaccagtttattatgtaaacaagagatttggcatgacatgttctgtatgtttcagggaaaaatgtctttaatgctttttcaagaactaacacagttattcctatactggattttaggtctctgaagaactgctggtgtttaggaataagaatgtgcatgaagcctaaaataccaagaaagcttatactgaatttaagcaaagaaataaaggagaaaagagaagaatctgagaattggggaggcatagattcttataaaaatcacaaaatttgttgtaaattagaggggagaaatttagaattaagtataaaaaggcagaattagtatagagtacattcattaaacatttttgtcaggattatttcccgtaaaaacgtagtgagcacttttcatatactaatttagttgtacatttaactttgtataatacagaaatctaaatatatttaatgaattcaagcaatatatcacttgaccaagaaattggaatttcaaaatgttcgtgcgggtatataccagatgagtacagtgagtagttttatgtatcaccagactgggttattgccaagttatatatcaccaaaagctgtatgactggatgttctggttacctggtttacaaaattatcagagtagtaaaactttgatatatatgaggatattaaaactacactaagtatcatttgattcgattcagaaagtactttgatatctctcagtgcttcagtgctatcattgtgagcaattgtcttttatatacggtactgtagccatactaggcctgtctgtggcattctctagatgtttcttttttacacaataaattccttatatcagcttga

SEQ ID NO: 419600 - DNA, 2982 bp, Homo sapiens
cgactatagacgatccccagtacgctacatgatcatcactctcaccataatcatgctgcttctggtaaaaataagcgaaaagctctttgcccagaccatgactcagatagttcaggtaaagatcctagaaacagccaggggaaaggagctcaccgaccagaacatgccagtggtagaaggaatgtcaaggacagtgttagtgctagtgaagtgacctcaactgtgtacaacactgtctctgaaggaactcactttctagagacaatagagactccaagacctggaaaactcttccccaaagatgtaagcagctccactccacccagtgtcacatcaaagagccgggtgagccggctggctggtaggaaaacaaatgaatctgtgagtgagccccgaaaaggctttatgtattccagaaacacaaatgaaaatcctcaggagtgtttcaatgcatcaaagctactgacatctcatggcatgggcatccaggttccgctgaatgcaacagagttcaactatctctgtccagccatcatcaaccaaattgatgctagatcttgtctgattcatacaagtgaaaagaaggctgaaatccctccaaagacctattcattacaaatagcctgggttggtggttttatagccatttccatcatcagtttcctgtctctgctgggggttatcttagtgcctctcatgaatcgggtgtttttcaaatttctcctgagtttccttgtggcactggccgttgggactttgagtggtgatgcttttttacaccttcttccacattctcatgcaagtcaccaccatagtcatagccatgaagaaccagcaatggaaatgaaaagaggaccacttttcagtcatctgtcttctcaaaacatagaagaaagtgcctattttgattccacgtggaagggtctaacagctctaggaggcctgtatttcatgtttcttgttgaacatgtcctcacattgatcaaacaatttaaagataagaagaaaaagaatcagaagaaacctgaaaatgatgatgatgtggagattaagaagcagttgtccaagtatgaatctcaactttcaacaaatgaggagaaagtagatacagatgatcgaactgaaggctatttacgagcagactcacaagagccctcccactttgattctcagcagcctgcagtcttggaagaagaagaggtcatgatagctcatgctcatccacaggaagtctacaatgaatatgtacccagagggtgcaagaataaatgccattcacatttccacgatacactcggccagtcagacgatctcattcaccaccatcatgactaccatcatattctccatcatcaccaccaccaaaaccaccatcctcacagtcacagccagcgctactctcgggaggagctgaaagatgccggcgtcgccactctggcctggatggtgataatgggtgatggcctgcacaatttcagcgatggcctagcaattggtgctgcttttactgaaggcttatcaagtggtttaagtacttctgttgctgtgttctgtcatgagttgcctcatgaattaggtgactttgctgttctactaaaggctggcatgaccgttaagcaggctgtcctttataatgcattgtcagccatgctggcgtatcttggaatggcaacaggaattttcattggtcattatgctgaaaatgtttctatgtggatatttgcacttactgctggcttattcatgtatgttgctctggttgatatggtacctgaaatgctgcacaatgatgctagtgaccatggatgtagccgctgggggtatttctttttacagaatgctgggatgcttttgggttttggaattatgttacttatttccatatttgaacataaaatcgtgtttcgtataaatttctagttaaggtttaaatgctagagtagcttaaaaagttgtcatagtttcagtaggtcatagggagatgagtttgtatgctgtactatgcagcgtttaaagttagtgggttttgtgatttttgtattgaatattgctgtctgttacaaagtcagttaaaggtacgttttaatatttaagttattctatcttggagataaaatctgtatgtgcaattcaccggtattaccagtttattatgtaaacaagagatttggcatgacatgttctgtatgtttcagggaaaaatgtctttaatgctttttcaagaactaacacagttattcctatactggattttaggtctctgaagaactgctggtgtttaggaataagaatgtgcatgaagcctaaaataccaagaaagcttatactgaatttaagcaaagaaataaaggagaaaagagaagaatctgagaattggggaggcatagattcttataaaaatcacaaaatttgttgtaaattagaggggagaaatttagaattaagtataaaaaggcagaattagtatagagtacattcattaaacatttttgtcaggattatttcccgtaaaaacgtagtgagcacttttcatatactaatttagttgtacatttaactttgtataatacagaaatctaaatatatttaatgaattcaagcaatatatcacttgaccaagaaattggaatttcaaaatgttcgtgcgggtatataccagatgagtacagtgagtagttttatgtatcaccagactgggttattgccaagttatatatcaccaaaagctgtatgactggatgttctggttacctggtttacaaaattatcagagtagtaaaactttgatatatatgaggatattaaaactacactaagtatcatttgattcgattcagaaagtactttgatatctctcagtgcttcagtgctatcattgtgagcaattgtcttttatatacggtactgtagccatactaggcctgtctgtggcattctctagatgtttcttttttacacaataaattccttatatcagcttga

SEQ ID NO: 419601 - DNA, 3521 bp, Homo sapiens
ctcgtgccgaattcggcacgagaccgcgtgttcgcgcctggtagagatttctcgaagacaccagtgggcccgtgtggaaccaaacctgcgcgcgtggccgggccgtgggacaacgaggccgcggagacgaaggcgcaatggcgaggaagttatctgtaatcttgatcctgacctttgccctctctgtcacaaatccccttcatgaactaaaagcagctgctttcccccagaccactgagaaaattagtccgaattgggaatctggcattaatgttgacttggcaatttccacacggcaatatcatctacaacagcttttctaccgctatggagaaaataattctttgtcagttgaagggttcagaaaattacttcaaaatataggcatagataagattaaaagaatccatatacaccatgaccacgaccatcactcagaccacgagcatcactcagaccatgagcgtcactcagaccatgagcatcactcagaccacgagcatcactctgaccataatcatgctgcttctggtaaaaataagcgaaaagctctttgcccagaccatgactcagatagttcaggtaaagatcctagaaacagccaggggaaaggagctcaccgaccagaacatgccagtggtagaaggaatgtcaaggacagtgttagtgctagtgaagtgacctcaactgtgtacaacactgtctctgaaggaactcactttctagagacaatagagactccaagacctggaaaactcttccccaaagatgtaagcagctccactccacccagtgtcacatcaaagagccgggtgagccggctggctggtaggaaaacaaatgaatctgtgagtgagccccgaaaaggctttatgtattccagaaacacaaatgaaaatcctcaggagtgtttcaatgcatcaaagctactgacatctcatggcatgggcatccaggttccgctgaatgcaacagagttcaactatctctgtccagccatcatcaaccaaattgatgctagatcttgtctgattcatacaagtgaaaagaaggctgaaatccctccaaagacctattcattacaaatagcctgggttggtggttttatagccatttccatcatcagtttcctgtctctgctgggggttatcttagtgcctctcatgaatcgggtgtttttcaaatttctcctgagtttccttgtggcactggccgttgggactttgagtggtgatgcttttttacaccttcttccacattctcatgcaagtcaccaccatagtcatagccatgaagaaccagcaatggaaatgaaaagaggaccacttttcagtcatctgtcttctcaaaacatagaagaaagtgcctattttgattccacgtggaagggtctaacagctctaggaggcctgtatttcatgtttcttgttgaacatgtcctcacattgatcaaacaatttaaagataagaagaaaaagaatcagaagaaacctgaaaatgatgatgatgtggagattaagaagcagttgtccaagtatgaatctcaactttcaacaaatgaggagaaagtagatacagatgatcgaactgaaggctatttacgagcagactcacaagagccctcccactttgattctcagcagcctgcagtcttggaagaagaagaggtcatgatagctcatgctcatccacaggaagtctacaatgaatatgtacccagagggtgcaagaataaatgccattcacatttccacgatacactcggccagtcagacgatctcattcaccaccatcatgactaccatcatattctccatcatcaccaccaccaaaaccaccatcctcacagtcacagccagcgctactctcgggaggagctgaaagatgccggcgtcgccactctggcctggatggtgataatgggtgatggcctgcacaatttcagcgatggcctagcaattggtgctgcttttactgaaggcttatcaagtggtttaagtacttctgttgctgtgttctgtcatgagttgcctcatgaattaggtgactttgctgttctactaaaggctggcatgaccgttaagcaggctgtcctttataatgcattgtcagccatgctggcgtatcttggaatggcaacaggaattttcattggtcattatgctgaaaatgtttctatgtggatatttgcacttactgctggcttattcatgtatgttgctctggttgatatggtacctgaaatgctgcacaatgatgctagtgaccatggatgtagccgctgggggtatttctttttacagaatgctgggatgcttttgggttttggaattatgttacttatttccatatttgaacataaaatcgtgtttcgtataaatttctagttaaggtttaaatgctagagtagcttaaaaagttgtcatagtttcagtaggtcatagggagatgagtttgtatgctgtactatgcagcgtttaaagttagtgggttttgtgatttttgtattgaatattgctgtctgttacaaagtcagttaaaggtacgttttaatatttaagttattctatcttggagataaaatctgtatgtgcaattcaccggtattaccagtttattatgtaaacaagagatttggcatgacatgttctgtatgtttcagggaaaaatgtctttaatgctttttcaagaactaacacagttattcctatactggattttaggtctctgaagaactgctggtgtttaggaataagaatgtgcatgaagcctaaaataccaagaaagcttatactgaatttaagcaaagaaataaaggagaaaagagaagaatctgagaattggggaggcatagattcttataaaaatcacaaaatttgttgtaaattagaggggagaaatttagaattaagtataaaaaggcagaattagtatagagtacattcattaaacatttttgtcaggattatttcccgtaaaaacgtagtgagcacttttcatatactaatttagttgtacatttaactttgtataatacagaaatctaaatatatttaatgaattcaagcaatatatcacttgaccaagaaattggaatttcaaaatgttcgtgcgggtatataccagatgagtacagtgagtagttttatgtatcaccagactgggttattgccaagttatatatcaccaaaagctgtatgactggatgttctggttacctggtttacaaaattatcagagtagtaaaactttgatatatatgaggatattaaaactacactaagtatcatttgattcgattcagaaagtactttgatatctctcagtgcttcagtgctatcattgtgagcaattgtcttttatatacggtactgtagccatactaggcctgtctgtggcattctctagatgtttcttttttacacaataaattccttatatcagcttgaaaaaaaaaagttttaagtatgaagaagttagcttatagggatataaaaaaaaacttttaggggggggcccca

SEQ ID NO: 419602 - DNA, 2565 bp, Homo sapiens
ctgtgctttgggacggcggattcgggaactgactgctgtagttcagaagaggttggctttccagagggcagtgttccgctgaatgcaacagagttcaactatctctgtccagccatcatcaaccaaattgatgctagatcttgtctgattcatacaagtgaaaagaaggctgaaatccctccaaagacctattcattacaaatagcctgggttggtggttttatagccatttccatcatcagtttcctgtctctgctgggggttatcttagtgcctctcatgaatcgggtgtttttcaaatttctcctgagtttccttgtggcactggccgttgggactttgagtggtgatgcttttttacaccttcttccacattctcatgcaagtcaccaccatagtcatagccatgaagaaccagcaatggaaatgaaaagaggaccacttttcagtcatctgtcttctcaaaacatagaagaaagtgcctattttgattccacgtggaagggtctaacagctctaggaggcctgtatttcatgtttcttgttgaacatgtcctcacattgatcaaacaatttaaagataagaagaaaaagaatcagaagaaacctgaaaatgatgatgatgtggagattaagaagcagttgtccaagtatgaatctcaactttcaacaaatgaggagaaagtagatacagatgatcgaactgaaggctatttacgagcagactcacaagagccctcccactttgattctcagcagcctgcagtcttggaagaagaagaggtcatgatagctcatgctcatccacaggaagtctacaatgaatatgtacccagagggtgcaagaataaatgccattcacatttccacgatacactcggccagtcagacgatctcattcaccaccatcatgactaccatcatattctccatcatcaccaccaccaaaaccaccatcctcacagtcacagccagcgctactctcgggaggagctgaaagatgccggcgtcgccactctggcctggatggtgataatgggtgatggcctgcacaatttcagcgatggcctagcaattggtgctgcttttactgaaggcttatcaagtggtttaagtacttctgttgctgtgttctgtcatgagttgcctcatgaattaggtgactttgctgttctactaaaggctggcatgaccgttaagcaggctgtcctttataatgcattgtcagccatgctggcgtatcttggaatggcaacaggaattttcattggtcattatgctgaaaatgtttctatgtggatatttgcacttactgctggcttattcatgtatgttgctctggttgatatggtacctgaaatgctgcacaatgatgctagtgaccatggatgtagccgctgggggtatttctttttacagaatgctgggatgcttttgggttttggaattatgttacttatttccatatttgaacataaaatcgtgtttcgtataaatttctagttaaggtttaaatgctagagtagcttaaaaagttgtcatagtttcagtaggtcatagggagatgagtttgtatgctgtactatgcagcgtttaaagttagtgggttttgtgatttttgtattgaatattgctgtctgttacaaagtcagttaaaggtacgttttaatatttaagttattctatcttggagataaaatctgtatgtgcaattcaccggtattaccagtttattatgtaaacaagagatttggcatgacatgttctgtatgtttcagggaaaaatgtctttaatgctttttcaagaactaacacagttattcctatactggattttaggtctctgaagaactgctggtgtttaggaataagaatgtgcatgaagcctaaaataccaagaaagcttatactgaatttaagcaaagaaataaaggagaaaagagaagaatctgagaattggggaggcatagattcttataaaaatcacaaaatttgttgtaaattagaggggagaaatttagaattaagtataaaaaggcagaattagtatagagtacattcattaaacatttttgtcaggattatttcccgtaaaaacgtagtgagcacttttcatatactaatttagttgtacatttaactttgtataatacagaaatctaaatatatttaatgaattcaagcaatatatcacttgaccaagaaattggaatttcaaaatgttcgtgcgggtatataccagatgagtacagtgagtagttttatgtatcaccagactgggttattgccaagttatatatcaccaaaagctgtatgactggatgttctggttacctggtttacaaaattatcagagtagtaaaactttgatatatatgaggatattaaaactacactaagtatcatttgattcgattcagaaagtactttgatatctctcagtgcttcagtgctatcattgtgagcaattgtcttttatatacggtactgtagccatactaggcctgtctgtggcattctctagatgtttcttttttacacaataaattccttatatcagcttga

SEQ ID NO: 419603 - DNA, 1504 bp, Homo sapiens
cacgacatatgtatagctcgatcccggtgttaatttcgtcacgagggactagctgtctgttgctatgttactgtcactgacgttgcctcatgaataaggtgactttgctgttctactaaaggctggcatgaccgttaagcaggctgtcctttataatgcattgtcagccatgctggcgtatcttggaatggcaacaggaattttcattggtcattatgctgaaaatgtttctatgtggatatttgcacttactgctggcttattcatgtatgttgctctggttgatatggtacctgaaatgctgcacaatgatgctagtgaccatggatgtagccgctgggggtatttctttttacagaatgctgggatgcttttgggttttggaattatgttacttatttccatatttgaacataaaatcgtgtttcgtataaatttctagttaaggtttaaatgctagagtagcttaaaaagttgtcatagtttcagtaggtcatagggagatgagtttgtatgctgtactatgcagcgtttaaagttagtgggttttgtgatttttgtattgaatattgctgtctgttacaaagtcagttaaaggtacgttttaatatttaagttattctatcttggagataaaatctgtatgtgcaattcaccggtattaccagtttattatgtaaacaagagatttggcatgacatgttctgtatgtttcagggaaaaatgtctttaatgctttttcaagaactaacacagttattcctatactggattttaggtctctgaagaactgctggtgtttaggaataagaatgtgcatgaagcctaaaataccaagaaagcttatactgaatttaagcaaagaaataaaggagaaaagagaagaatctgagaattggggaggcatagattcttataaaaatcacaaaatttgttgtaaattagaggggagaaatttagaattaagtataaaaaggcagaattagtatagagtacattcattaaacatttttgtcaggattatttcccgtaaaaacgtagtgagcacttttcatatactaatttagttgtacatttaactttgtataatacagaaatctaaatatatttaatgaattcaagcaatatatcacttgaccaagaaattggaatttcaaaatgttcgtgcgggtatataccagatgagtacagtgagtagttttatgtatcaccagactgggttattgccaagttatatatcaccaaaagctgtatgactggatgttctggttacctggtttacaaaattatcagagtagtaaaactttgatatatatgaggatattaaaactacactaagtatcatttgattcgattcagaaagtactttgatatctctcagtgcttcagtgctatcattgtgagcaattgtcttttatatacggtactgtagccatactaggcctgtctgtggcattctctagatgtttcttttttacacaataaattccttatatcagcttga

SEQ ID NO: 419604 - DNA, 2307 bp, Homo sapiens
ctcgtgccgaattcggcacgagaccgcgtgttcgcgcctggtagagatttctcgaagacaccagtgggcccgtgtggaaccaaacctgcgcgcgtggccgggccgtgggacaacgaggccgcggagacgaaggcgcaatggcgaggaagttatctgtaatcttgatcctgacctttgccctctctgtcacaaatccccttcatgaactaaaagcagctgctttcccccagaccactgagaaaattagtccgaattgggaatctggcattaatgttgacttggcaatttccacacggcaatatcatctacaacagcttttctaccgctatggagaaaataattctttgtcagttgaagggttcagaaaattacttcaaaatataggcatagataagattaaaagaatccatatacaccatgaccacgaccatcactcagaccacgagcatcactcagaccatgagcgtcactcagaccatgagcatcactcagaccacgagcatcactctgaccataatcatgctgcttctggtaaaaataagcgaaaagctctttgcccagaccatgactcagatagttcaggtaaagatcctagaaacagccaggggaaaggagctcaccgaccagaacatgccagtggtagaaggaatgtcaaggacagtgttagtgctagtgaagtgacctcaactgtgtacaacactgtctctgaaggaactcactttctagagacaatagagactccaagacctggaaaactcttccccaaagatgtaagcagctccactccacccagtgtcacatcaaagagccgggtgagccggctggctggtaggaaaacaaatgaatctgtgagtgagccccgaaaaggctttatgtattccagaaacacaaatgaaaatcctcaggagtgtttcaatgcatcaaagctactgacatctcatggcatgggcatccaggttccgctgaatgcaacagagttcaactatctctgtccagccatcatcaaccaaattgatgctagatcttgtctgattcatacaagtgaaaagaaggctgaaatccctccaaagacctattcattacaaatagcctgggttggtggttttatagccatttccatcatcagtttcctgtctctgctgggggttatcttagtgcctctcatgaatcgggtgtttttcaaatttctcctgagtttccttgtggcactggccgttgggactttgagtggtgatgcttttttacaccttcttccacattctcatgcaagtcaccaccatagtcatagccatgaagaaccagcaatggaaatgaaaagaggaccacttttcagtcatctgtcttctcaaaacatagaagaaagtgcctattttgattccacgtggaagggtctaacagctctaggaggcctgtatttcatgtttcttgttgaacatgtcctcacattgatcaaacaatttaaagataagaagaaaaagaatcagaagaaacctgaaaatgatgatgatgtggagattaagaagcagttgtccaagtatgaatctcaactttcaacaaatgaggagaaagtagatacagatgatcgaactgaaggctatttacgagcagactcacaagagccctcccactttgattctcagcagcctgcagtcttggaagaagaagaggtcatgatagctcatgctcatccacaggaagtctacaatgaatatgtacccagagggtgcaagaataaatgccattcacatttccacgatacactcggccagtcagacgatctcattcaccaccatcatgactaccatcatattctccatcatcaccaccaccaaaaccaccatcctcacagtcacagccagcgctactctcgggaggagctgaaagatgccggcgtcgccactctggcctggatggtgataatgggtgatggcctgcacaatttcagcgatggcctagcaattggtgctgcttttactgaaggcttatcaagtggtttaagtacttctgttgctgtgttctgtcatgagttgcctcatgaattaggtgactttgctgttctactaaaggctggcatgaccgttaagcaggctgtcctttataatgcattgtcagccatgctggcgtatcttggaatggcaacaggaattttcattggtcattatgctgaaaatgtttctatgtggatatttgcacttactgctggcttattcatgtatgttgctctggttgatatggtaagtttttaagaagtcttattacattattgaccaacaataaaatagagaaaatattcggtaaagcctcatt

SEQ ID NO: 419605 - DNA, 2213 bp, Homo sapiens
  misc_feature (2192)..(2192): n is a, c, g, or t
ctcgtgccgaattcggcacgagaccgcgtgttcgcgcctggtagagatttctcgaagacaccagtgggcccgtgtggaaccaaacctgcgcgcgtggccgggccgtgggacaacgaggccgcggagacgaaggcgcaatggcgaggaagttatctgtaatcttgatcctgacctttgccctctctgtcacaaatccccttcatgaactaaaagcagctgctttcccccagaccactgagaaaattagtccgaattgggaatctggcattaatgttgacttggcaatttccacacggcaatatcatctacaacagcttttctaccgctatggagaaaataattctttgtcagttgaagggttcagaaaattacttcaaaatataggcatagataagattaaaagaatccatatacaccatgaccacgaccatcactcagaccacgagcatcactcagaccatgagcgtcactcagaccatgagcatcactcagaccacgagcatcactctgaccataatcatgctgcttctggtaaaaataagcgaaaagctctttgcccagaccatgactcagatagttcaggtaaagatcctagaaacagccaggggaaaggagctcaccgaccagaacatgccagtggtagaaggaatgtcaaggacagtgttagtgctagtgaagtgacctcaactgtgtacaacactgtctctgaaggaactcactttctagagacaatagagactccaagacctggaaaactcttccccaaagatgtaagcagctccactccacccagtgtcacatcaaagagccgggtgagccggctggctggtaggaaaacaaatgaatctgtgagtgagccccgaaaaggctttatgtattccagaaacacaaatgaaaatcctcaggagtgtttcaatgcatcaaagctactgacatctcatggcatgggcatccaggttccgctgaatgcaacagagttcaactatctctgtccagccatcatcaaccaaattgatgctagatcttgtctgattcatacaagtgaaaagaaggctgaaatccctccaaagacctattcattacaaatagcctgggttggtggttttatagccatttccatcatcagtttcctgtctctgctgggggttatcttagtgcctctcatgaatcgggtgtttttcaaatttctcctgagtttccttgtggcactggccgttgggactttgagtggtgatgcttttttacaccttcttccacattctcatgcaagtcaccaccatagtcatagccatgaagaaccagcaatggaaatgaaaagaggaccacttttcagtcatctgtcttctcaaaacatagaagaaagtgcctattttgattccacgtggaagggtctaacagctctaggaggcctgtatttcatgtttcttgttgaacatgtcctcacattgatcaaacaatttaaagataagaagaaaaagaatcagaagaaacctgaaaatgatgatgatgtggagattaagaagcagttgtccaagtatgaatctcaactttcaacaaatgaggagaaagtagatacagatgatcgaactgaaggctatttacgagcagactcacaagagccctcccactttgattctcagcagcctgcagtcttggaagaagaagaggtcatgatagctcatgctcatccacaggaagtctacaatgaatatgtacccagagggtgcaagaataaatgccattcacatttccacgatacactcggccagtcagacgatctcattcaccaccatcatgactaccatcatattctccatcatcaccaccaccaaaaccaccatcctcacagtcacagccagcgctactctcgggaggagctgaaagatgccggcgtcgccactctggcctggatggtgataatgggtgatggcctgcacaatttcagcgatggcctagcaattggtgctgcttttactgaaggcttatcaagtggtttaagtacttctgttgctgtgttctgtcatgagttgcctcatgaattaggtgactttgctgttctactaaaggctggcatgaccgttaagcaggctgtcctttataatgcattgtcagccatgctggcgtatcttggaatggcaacaggaattttcattggtcattatgctgaaaatgtttctatgtggatatttgantggtttagggtaccgagctcg

SEQ ID NO: 419606 - DNA, 2046 bp, Homo sapiens
ctcgtgccgaattcggcacgagaccgcgtgttcgcgcctggtagagatttctcgaagacaccagtgggcccgtgtggaaccaaacctgcgcgcgtggccgggccgtgggacaacgaggccgcggagacgaaggcgcaatggcgaggaagttatctgtaatcttgatcctgacctttgccctctctgtcacaaatccccttcatgaactaaaagcagctgctttcccccagaccactgagaaaattagtccgaattgggaatctggcattaatgttgacttggcaatttccacacggcaatatcatctacaacagcttttctaccgctatggagaaaataattctttgtcagttgaagggttcagaaaattacttcaaaatataggcatagataagattaaaagaatccatatacaccatgaccacgaccatcactcagaccacgagcatcactcagaccatgagcgtcactcagaccatgagcatcactcagaccacgagcatcactctgaccataatcatgctgcttctggtaaaaataagcgaaaagctctttgcccagaccatgactcagatagttcaggtaaagatcctagaaacagccaggggaaaggagctcaccgaccagaacatgccagtggtagaaggaatgtcaaggacagtgttagtgctagtgaagtgacctcaactgtgtacaacactgtctctgaaggaactcactttctagagacaatagagactccaagacctggaaaactcttccccaaagatgtaagcagctccactccacccagtgtcacatcaaagagccgggtgagccggctggctggtaggaaaacaaatgaatctgtgagtgagccccgaaaaggctttatgtattccagaaacacaaatgaaaatcctcaggagtgtttcaatgcatcaaagctactgacatctcatggcatgggcatccaggttccgctgaatgcaacagagttcaactatctctgtccagccatcatcaaccaaattgatgctagatcttgtctgattcatacaagtgaaaagaaggctgaaatccctccaaagacctattcattacaaatagcctgggttggtggttttatagccatttccatcatcagtttcctgtctctgctgggggttatcttagtgcctctcatgaatcgggtgtttttcaaatttctcctgagtttccttgtggcactggccgttgggactttgagtggtgatgcttttttacaccttcttccacattctcatgcaagtcaccaccatagtcatagccatgaagaaccagcaatggaaatgaaaagaggaccacttttcagtcatctgtcttctcaaaacatagaagaaagtgcctattttgattccacgtggaagggtctaacagctctaggaggcctgtatttcatgtttcttgttgaacatgtcctcacattgatcaaacaatttaaagataagaagaaaaagaatcagaagaaacctgaaaatgatgatgatgtggagattaagaagcagttgtccaagtatgaatctcaactttcaacaaatgaggagaaagtagatacagatgatcgaactgaaggctatttacgagcagactcacaagagccctcccactttgattctcagcagcctgcagtcttggaagaagaagaggtcatgatagctcatgctcatccacaggaagtctacaatgaatatgtacccagagggtgcaagaataaatgccattcacatttccacgatacactcggccagtcagacgatctcattcaccaccatcatgactaccatcatattctccatcatcaccaccaccaaaaccaccatcctcacagtcacagccagcgctactctcgggaggagctgaaagatgccggcgtcgccactctggcctggatggtgataatgggtgatggcctgcacaatttcagcgatggcctagcaattgctgctgcttttaactgaaggcttatcaacgtggttttaagtaactcgttcccttgtgttgttcaactcgcgggatcctcagagt

SEQ ID NO: 419607 - DNA, 3398 bp, Homo sapiens
cgctgttgctgtggctgcctagagatcccccatgttgccagacgtggtcgggccgtgggacaacgaggcgcggagacgaaggcgcaatggcgaggaagttatctgtaatcttgatcctgacctttgccctctctgtcacaaatccccttcatgaactaaaagcagctgctttcccccagaccactgagaaaattagtccgaattgggaatctggcattaatgttgacttggcaatttccacacggcaatatcatctacaacagcttttctaccgctatggagaaaataattctttgtcagttgaagggttcagaaaattacttcaaaatataggcatagataagattaaaagaatccatatacaccatgaccacgaccatcactcagaccacgagcatcactcagaccatgagcgtcactcagaccatgagcatcactcagaccacgagcatcactctgaccataatcatgctgcttctggtaaaaataagcgaaaagctctttgcccagaccatgactcagatagttcaggtaaagatcctagaaacagccaggggaaaggagctcaccgaccagaacatgccagtggtagaaggaatgtcaaggacagtgttagtgctagtgaagtgacctcaactgtgtacaacactgtctctgaaggaactcactttctagagacaatagagactccaagacctggaaaactcttccccaaagatgtaagcagctccactccacccagtgtcacatcaaagagccgggtgagccggctggctggtaggaaaacaaatgaatctgtgagtgagccccgaaaaggctttatgtattccagaaacacaaatgaaaatcctcaggagtgtttcaatgcatcaaagctactgacatctcatggcatgggcatccaggttccgctgaatgcaacagagttcaactatctctgtccagccatcatcaaccaaattgatgctagatcttgtctgattcatacaagtgaaaagaaggctgaaatccctccaaagacctattcattacaaatagcctgggttggtggttttatagccatttccatcatcagtttcctgtctctgctgggggttatcttagtgcctctcatgaatcgggtgtttttcaaatttctcctgagtttccttgtggcactggccgttgggactttgagtggtgatgcttttttacaccttcttccacattctcatgcaagtcaccaccatagtcatagccatgaagaaccagcaatggaaatgaaaagaggaccacttttcagtcatctgtcttctcaaaacatagaagaaagtgcctattttgattccacgtggaagggtctaacagctctaggaggcctgtatttcatgtttcttgttgaacatgtcctcacattgatcaaacaatttaaagataagaagaaaaagaatcagaagaaacctgaaaatgatgatgatgtggagattaagaagcagttgtccaagtatgaatctcaactttcaacaaatgaggagaaagtagatacagatgatcgaactgaaggctatttacgagcagactcacaagagccctcccactttgattctcagcagcctgcagtcttggaagaagaagaggtcatgatagctcatgctcatccacaggaagtctacaatgaatatgtacccagagggtgcaagaataaatgccattcacatttccacgatacactcggccagtcagacgatctcattcaccaccatcatgactaccatcatattctccatcatcaccaccaccaaaaccaccatcctcacagtcacagccagcgctactctcgggaggagctgaaagatgccggcgtcgccactctggcctggatggtgataatgggtgatggcctgcacaatttcagcgatggcctagcaattggtgctgcttttactgaaggcttatcaagtggtttaagtacttctgttgctgtgttctgtcatgagttgcctcatgaattaggtgactttgctgttctactaaaggctggcatgaccgttaagcaggctgtcctttataatgcattgtcagccatgctggcgtatcttggaatggcaacaggaattttcattggtcattatgctgaaaatgtttctatgtggatatttgcacttactgctggcttattcatgtatgttgctctggttgatatggtacctgaaatgctgcacaatgatgctagtgaccatggatgtagccgctgggggtatttctttttacagaatgctgggatgcttttgggttttggaattatgttacttatttccatatttgaacataaaatcgtgtttcgtataaatttctagttaaggtttaaatgctagagtagcttaaaaagttgtcatagtttcagtaggtcatagggagatgagtttgtatgctgtactatgcagcgtttaaagttagtgggttttgtgatttttgtattgaatattgctgtctgttacaaagtcagttaaaggtacgttttaatatttaagttattctatcttggagataaaatctgtatgtgcaattcaccggtattaccagtttattatgtaaacaagagatttggcatgacatgttctgtatgtttcagggaaaaatgtctttaatgctttttcaagaactaacacagttattcctatactggattttaggtctctgaagaactgctggtgtttaggaataagaatgtgcatgaagcctaaaataccaagaaagcttatactgaatttaagcaaagaaataaaggagaaaagagaagaatctgagaattggggaggcatagattcttataaaaatcacaaaatttgttgtaaattagaggggagaaatttagaattaagtataaaaaggcagaattagtatagagtacattcattaaacatttttgtcaggattatttcccgtaaaaacgtagtgagcacttttcatatactaatttagttgtacatttaactttgtataatacagaaatctaaatatatttaatgaattcaagcaatatatcacttgaccaagaaattggaatttcaaaatgttcgtgcgggtatataccagatgagtacagtgagtagttttatgtatcaccagactgggttattgccaagttatatatcaccaaaagctgtatgactggatgttctggttacctggtttacaaaattatcagagtagtaaaactttgatatatatgaggatattaaaactacactaagtatcatttgattcgattcagaaagtactttgatatctctcagtgcttcagtgctatcattgtgagcaattgtcttttatatacggtactgtagccatactaggcctgtctgtggcattctctagatgtttcttttttacacaataaattccttatatcagcttga

SEQ ID NO: 419608 - DNA, 2575 bp, Homo sapiens
  misc_feature (15)..(15): n is a, c, g, or t
cttttggtgattttnactgctttgtttctttcagtgtttcaatgcatcaaagctactgacatctcatggcatgggcatccaggttccgctgaatgcaacagagttcaactatctctgtccagccatcatcaaccaaattgatgctagatcttgtctgattcatacaagtgaaaagaaggctgaaatccctccaaagacctattcattacaaatagcctgggttggtggttttatagccatttccatcatcagtttcctgtctctgctgggggttatcttagtgcctctcatgaatcgggtgtttttcaaatttctcctgagtttccttgtggcactggccgttgggactttgagtggtgatgcttttttacaccttcttccacattctcatgcaagtcaccaccatagtcatagccatgaagaaccagcaatggaaatgaaaagaggaccacttttcagtcatctgtcttctcaaaacatagaagaaagtgcctattttgattccacgtggaagggtctaacagctctaggaggcctgtatttcatgtttcttgttgaacatgtcctcacattgatcaaacaatttaaagataagaagaaaaagaatcagaagaaacctgaaaatgatgatgatgtggagattaagaagcagttgtccaagtatgaatctcaactttcaacaaatgaggagaaagtagatacagatgatcgaactgaaggctatttacgagcagactcacaagagccctcccactttgattctcagcagcctgcagtcttggaagaagaagaggtcatgatagctcatgctcatccacaggaagtctacaatgaatatgtacccagagggtgcaagaataaatgccattcacatttccacgatacactcggccagtcagacgatctcattcaccaccatcatgactaccatcatattctccatcatcaccaccaccaaaaccaccatcctcacagtcacagccagcgctactctcgggaggagctgaaagatgccggcgtcgccactctggcctggatggtgataatgggtgatggcctgcacaatttcagcgatggcctagcaattggtgctgcttttactgaaggcttatcaagtggtttaagtacttctgttgctgtgttctgtcatgagttgcctcatgaattaggtgactttgctgttctactaaaggctggcatgaccgttaagcaggctgtcctttataatgcattgtcagccatgctggcgtatcttggaatggcaacaggaattttcattggtcattatgctgaaaatgtttctatgtggatatttgcacttactgctggcttattcatgtatgttgctctggttgatatggtacctgaaatgctgcacaatgatgctagtgaccatggatgtagccgctgggggtatttctttttacagaatgctgggatgcttttgggttttggaattatgttacttatttccatatttgaacataaaatcgtgtttcgtataaatttctagttaaggtttaaatgctagagtagcttaaaaagttgtcatagtttcagtaggtcatagggagatgagtttgtatgctgtactatgcagcgtttaaagttagtgggttttgtgatttttgtattgaatattgctgtctgttacaaagtcagttaaaggtacgttttaatatttaagttattctatcttggagataaaatctgtatgtgcaattcaccggtattaccagtttattatgtaaacaagagatttggcatgacatgttctgtatgtttcagggaaaaatgtctttaatgctttttcaagaactaacacagttattcctatactggattttaggtctctgaagaactgctggtgtttaggaataagaatgtgcatgaagcctaaaataccaagaaagcttatactgaatttaagcaaagaaataaaggagaaaagagaagaatctgagaattggggaggcatagattcttataaaaatcacaaaatttgttgtaaattagaggggagaaatttagaattaagtataaaaaggcagaattagtatagagtacattcattaaacatttttgtcaggattatttcccgtaaaaacgtagtgagcacttttcatatactaatttagttgtacatttaactttgtataatacagaaatctaaatatatttaatgaattcaagcaatatatcacttgaccaagaaattggaatttcaaaatgttcgtgcgggtatataccagatgagtacagtgagtagttttatgtatcaccagactgggttattgccaagttatatatcaccaaaagctgtatgactggatgttctggttacctggtttacaaaattatcagagtagtaaaactttgatatatatgaggatattaaaactacactaagtatcatttgattcgattcagaaagtactttgatatctctcagtgcttcagtgctatcattgtgagcaattgtcttttatatacggtactgtagccatactaggcctgtctgtggcattctctagatgtttcttttttacacaataaattccttatatcagcttga

SEQ ID NO: 419609 - DNA, 2026 bp, Homo sapiens
agaaggtgtaaaaaagcatcaccactcaaagtcccaacggccagtgccacaaggaaatcagaagaaacctgaaaatgatgatgatgtggagattaagaagcagttgtccaagtatgaatctcaactttcaacaaatgaggagaaagtagatacagatgatcgaactgaaggctatttacgagcagactcacaagagccctcccactttgattctcagcagcctgcagtcttggaagaagaagaggtcatgatagctcatgctcatccacaggaagtctacaatgaatatgtacccagagggtgcaagaataaatgccattcacatttccacgatacactcggccagtcagacgatctcattcaccaccatcatgactaccatcatattctccatcatcaccaccaccaaaaccaccatcctcacagtcacagccagcgctactctcgggaggagctgaaagatgccggcgtcgccactctggcctggatggtgataatgggtgatggcctgcacaatttcagcgatggcctagcaattggtgctgcttttactgaaggcttatcaagtggtttaagtacttctgttgctgtgttctgtcatgagttgcctcatgaattaggtgactttgctgttctactaaaggctggcatgaccgttaagcaggctgtcctttataatgcattgtcagccatgctggcgtatcttggaatggcaacaggaattttcattggtcattatgctgaaaatgtttctatgtggatatttgcacttactgctggcttattcatgtatgttgctctggttgatatggtacctgaaatgctgcacaatgatgctagtgaccatggatgtagccgctgggggtatttctttttacagaatgctgggatgcttttgggttttggaattatgttacttatttccatatttgaacataaaatcgtgtttcgtataaatttctagttaaggtttaaatgctagagtagcttaaaaagttgtcatagtttcagtaggtcatagggagatgagtttgtatgctgtactatgcagcgtttaaagttagtgggttttgtgatttttgtattgaatattgctgtctgttacaaagtcagttaaaggtacgttttaatatttaagttattctatcttggagataaaatctgtatgtgcaattcaccggtattaccagtttattatgtaaacaagagatttggcatgacatgttctgtatgtttcagggaaaaatgtctttaatgctttttcaagaactaacacagttattcctatactggattttaggtctctgaagaactgctggtgtttaggaataagaatgtgcatgaagcctaaaataccaagaaagcttatactgaatttaagcaaagaaataaaggagaaaagagaagaatctgagaattggggaggcatagattcttataaaaatcacaaaatttgttgtaaattagaggggagaaatttagaattaagtataaaaaggcagaattagtatagagtacattcattaaacatttttgtcaggattatttcccgtaaaaacgtagtgagcacttttcatatactaatttagttgtacatttaactttgtataatacagaaatctaaatatatttaatgaattcaagcaatatatcacttgaccaagaaattggaatttcaaaatgttcgtgcgggtatataccagatgagtacagtgagtagttttatgtatcaccagactgggttattgccaagttatatatcaccaaaagctgtatgactggatgttctggttacctggtttacaaaattatcagagtagtaaaactttgatatatatgaggatattaaaactacactaagtatcatttgattcgattcagaaagtactttgatatctctcagtgcttcagtgctatcattgtgagcaattgtcttttatatacggtactgtagccatactaggcctgtctgtggcattctctagatgtttcttttttacacaataaattccttatatcagcttga

SEQ ID NO: 419610 - DNA, 3433 bp, Homo sapiens
ctcgtgccgaattcggcacgagaccgcgtgttcgcgcctggtagagatttctcgaagacaccagtgggcccgtgtggaaccaaacctgcgcgcgtggccgggccgtgggacaacgaggccgcggagacgaaggcgcaatggcgaggaagttatctgtaatcttgatcctgacctttgccctctctgtcacaaatccccttcatgaactaaaagcagctgctttcccccagaccactgagaaaattagtccgaattgggaatctggcattaatgttgacttggcaatttccacacggcaatatcatctacaacagcttttctaccgctatggagaaaataattctttgtcagttgaagggttcagaaaattacttcaaaatataggcatagataagattaaaagaatccatatacaccatgaccacgaccatcactcagaccacgagcatcactcagaccatgagcgtcactcagaccatgagcatcactcagaccacgagcatcactctgaccataatcatgctgcttctggtaaaaataagcgaaaagctctttgcccagaccatgactcagatagttcaggtaaagatcctagaaacagccaggggaaaggagctcaccgaccagaacatgccagtggtagaaggaatgtcaaggacagtgttagtgctagtgaagtgacctcaactgtgtacaacactgtctctgaaggaactcactttctagagacaatagagactccaagacctggaaaactcttccccaaagatgtaagcagctccactccacccagtgtcacatcaaagagccgggtgagccggctggctggtaggaaaacaaatgaatctgtgagtgagccccgaaaaggctttatgtattccagaaacacaaatgaaaatcctcaggagtgtttcaatgcatcaaagctactgacatctcatggcatgggcatccaggttccgctgaatgcaacagagttcaactatctctgtccagccatcatcaaccaaattgatgctagatcttgtctgattcatacaagtgaaaagaaggctgaaatccctccaaagacctattcattacaaatagcctgggttggtggttttatagccatttccatcatcagtttcctgtctctgctgggggttatcttagtgcctctcatgaatcgggtgtttttcaaatttctcctgagtttccttgtggcactggccgttgggactttgagtggtgatgcttttttacaccttcttccacattctcatgcaagtcaccaccatagtcatagccatgaagaaccagcaatggaaatgaaaagaggaccacttttcagtcatctgtcttctcaaaacatagaagaaagtgcctattttgattccacgtggaagggtctaacagctctaggaggcctgtatttcatgtttcttgttgaacatgtcctcacattgatcaaacaatttaaagataagaagaaaaagaatcagaagaaacctgaaaatgatgatgatgtggagattaagaagcagttgtccaagtatgaatctcaactttcaacaaatgaggagaaagtagatacagatgatcgaactgaaggctatttacgagcagactcacaagagccctcccactttgattctcagcagcctgcagtcttggaagaagaagaggtcatgatagctcatgctcatccacaggaagtctacaatgaatatgtacccagagggtgcaagaataaatgccattcacatttccacgatacactcggccagtcagacgatctcattcaccaccatcatgactaccatcatattctccatcatcaccaccaccaaaaccaccatcctcacagtcacagccagcgctactctcgggaggagctgaaagatgccggcgtcgccacttaatgggtgatggcctgcacaatttcagcgatggcctagcaattggtgctgcttttactgaaggcttatcaagtggtttaagtacttctgttgctgtgttctgtcatgagttgcctcatgaattaggtgactttgctgttctactaaaggctggcatgaccgttaagcaggctgtcctttataatgcattgtcagccatgctggcgtatcttggaatggcaacaggaattttcattggtcattatgctgaaaatgtttctatgtggatatttgcacttactgctggcttattcatgtatgttgctctggttgatatggtacctgaaatgctgcacaatgatgctagtgaccatggatgtagccgctgggggtatttctttttacagaatgctgggatgcttttgggttttggaattatgttacttatttccatatttgaacataaaatcgtgtttcgtataaatttctagttaaggtttaaatgctagagtagcttaaaaagttgtcatagtttcagtaggtcatagggagatgagtttgtatgctgtactatgcagcgtttaaagttagtgggttttgtgatttttgtattgaatattgctgtctgttacaaagtcagttaaaggtacgttttaatatttaagttattctatcttggagataaaatctgtatgtgcaattcaccggtattaccagtttattatgtaaacaagagatttggcatgacatgttctgtatgtttcagggaaaaatgtctttaatgctttttcaagaactaacacagttattcctatactggattttaggtctctgaagaactgctggtgtttaggaataagaatgtgcatgaagcctaaaataccaagaaagcttatactgaatttaagcaaagaaataaaggagaaaagagaagaatctgagaattggggaggcatagattcttataaaaatcacaaaatttgttgtaaattagaggggagaaatttagaattaagtataaaaaggcagaattagtatagagtacattcattaaacatttttgtcaggattatttcccgtaaaaacgtagtgagcacttttcatatactaatttagttgtacatttaactttgtataatacagaaatctaaatatatttaatgaattcaagcaatatatcacttgaccaagaaattggaatttcaaaatgttcgtgcgggtatataccagatgagtacagtgagtagttttatgtatcaccagactgggttattgccaagttatatatcaccaaaagctgtatgactggatgttctggttacctggtttacaaaattatcagagtagtaaaactttgatatatatgaggatattaaaactacactaagtatcatttgattcgattcagaaagtactttgatatctctcagtgcttcagtgctatcattgtgagcaattgtcttttatatacggtactgtagccatactaggcctgtctgtggcattctctagatgtttcttttttacacaataaattccttatatcagcttga

SEQ ID NO: 419611 - DNA, 2291 bp, Homo sapiens
ctcgtgccgaattcggcacgagaccgcgtgttcgcgcctggtagagatttctcgaagacaccagtgggcccgtgtggaaccaaacctgcgcgcgtggccgggccgtgggacaacgaggccgcggagacgaaggcgcaatggcgaggaagttatctgtaatcttgatcctgacctttgccctctctgtcacaaatccccttcatgaactaaaagcagctgctttcccccagaccactgagaaaattagtccgaattgggaatctggcattaatgttgacttggcaatttccacacggcaatatcatctacaacagcttttctaccgctatggagaaaataattctttgtcagttgaagggttcagaaaattacttcaaaatataggcatagataagattaaaagaatccatatacaccatgaccacgaccatcactcagaccacgagcatcactcagaccatgagcgtcactcagaccatgagcatcactcagaccacgagcatcactctgaccataatcatgctgcttctggtaaaaataagcgaaaagctctttgcccagaccatgactcagatagttcaggtaaagatcctagaaacagccaggggaaaggagctcaccgaccagaacatgccagtggtagaaggaatgtcaaggacagtgttagtgctagtgaagtgacctcaactgtgtacaacactgtctctgaaggaactcactttctagagacaatagagactccaagacctggaaaactcttccccaaagatgtaagcagctccactccacccagtgtcacatcaaagagccgggtgagccggctggctggtaggaaaacaaatgaatctgtgagtgagccccgaaaaggctttatgtattccagaaacacaaatgaaaatcctcaggagtgtttcaatgcatcaaagctactgacatctcatggcatgggcatccaggttccgctgaatgcaacagagttcaactatctctgtccagccatcatcaaccaaattgatgctagatcttgtctgattcatacaagtgaaaagaaggctgaaatccctccaaagacctattcattacaaatagcctgggttggtggttttatagccatttccatcatcagtttcctgtctctgctgggggttatcttagtgcctctcatgaatcgggtgtttttcaaatttctcctgagtttccttgtggcactggccgttgggactttgagtggtgatgcttttttacaccttcttccacattctcatgcaagtcaccaccatagtcatagccatgaagaaccagcaatggaaatgaaaagaggaccacttttcagtcatctgtcttctcaaaacatagaagaaagtgcctattttgattccacgtggaagggtctaacagctctaggaggcctgtatttcatgtttcttgttgaacatgtcctcacattgatcaaacaatttaaagataagaagaaaaagaatcagaagaaacctgaaaatgatgatgatgtggagattaagaagcagttgtccaagtatgaatctcaactttcaacaaatgaggagaaagtagatacagatgatcgaactgaaggctatttacgagcagactcacaagagccctcccactttgattctcagcagcctgcagtcttggaagaagaagaggtcatgatagctcatgctcatccacaggaagtctacaatgaatatgtacccagagggtgcaagaataaatgccattcacatttccacgatacactcggccagtcagacgatctcattcaccaccatcatgactaccatcatattctccatcatcaccaccaccaaaaccaccatcctcacagtcacagccagcgctactctcgggaggagctgaaagatgccggcgtcgccacttaatgggtgatggcctgcacaatttcagcgatggcctagcaattggtgctgcttttactgaaggcttatcaagtggtttaagtacttctgttgctgtgttctgtcatgagttgcctcatgaattaggtgactttgctgttctactaaaggctggcatgaccgttaagcaggctgtcctttataatgcattgtcagccatgctggcgtatcttggaatggcaacaggaattttcattggtcattatgctgaaaatgtttctatgtggatatttgcacttactgctggcttattcatgtatgttgctctggttgatatggtaagtttttaagaagtcttattacattattgaccaacaataaaatagagaaaatattcggtaaagcctcatt

SEQ ID NO: 419612 - DNA, 311 bp, Homo sapiens
agacgatctcattcaccaccatcatgactaccatcatattctccatcatcaccaccaccaaaaccaccatcctcacagtcacagccagcgctactctcgggaggagctgaaagatgccggcgtcgccactctggcctggatggtgataatgggtgatggcctgcacaatttcagcgatggcctagcaattggtatatatctacatatttgttccttgttgattgattctgaaaatgtcacattaaacacctagtcaaattttaacaaagaatagattagtttagatgaggatattagtgacttccaagatt

SEQ ID NO: 419613 - DNA, 1417 bp, Homo sapiens
acggcagaggactatccgccagccccgcccccgcctcgccgcaggtcgcgcgcagctggcgcctgaggaactgcggctgcggttccgagcggggtctggggctgttaccattgagtgaccagaaaggctctcggtgcaaagcgttcctgcagaattgcttccacgtaaagggaccttcgggaaatttcgctggataccggctggcattgacaaacccagcgtccctgagccttgtgaggtttccaggcaggctgattgcgaggcaacatgtctgcttcggtgaaagaaagccttcagcttcagctactggagatggaaatgctgttttctatgtttcctaaccaaggagaagtaaaacttgaagatgtaaatgccctgacgaatataaagaggtatttggaaggcacaagggaggcgctgccaccaaaaatcgaatttgtaattacactccagattgaagagcccaaggtgaaaattgatttgcaagtgaccatgcctcacagctacccctatgtagcattgcagctgtttggacggtcatctgaacttgacagacatcagcagctacttctcaacaaaggtctcacttcttacatagggacttttgatccaggtgagctctgtgtatgtgcagcaatccagtggctacaggacaacagtgcatcttatttcctgaacagaaagcttgtatatgaaccatctacacaagcaaagccagtcaagaacacattcctccgaatgtggatctacagtcaccatatatatcagcaggacctaaggaaaaagattttggatgttgggaaaaggttagatgtgactggattttgcatgacaggaaagcctggtataatctgtgtggagggtttcaaagagcactgtgaggagttctggcacacaattaggtaccccaattggaagcacatttcctgtaagcatgctgaaagcgtggagacagaaggaaatggtgaggacctgcgccttttccattcttttgaagagttactccttgaggctcatggtgactatggattaaggaatgactatcacatgaatctgggccaattcttagaatttctcaagaagcacaaaagtgagcatgtttttcagatactatttggtattgaaagcaaaagttcagactcataaaaagcgattaagaggcctatgcctgtaatttcactaagtcagtatttctgttaataagaccaaattaaaaaggctagtggctgtgtagcatcctcagtgcaaaacccagctccagaattttcacctggtaacgaatttcaactgacagtgaaatgaataggcctttaaactttataacattgcaattgtgatgttatctctaggtttttgtgtgaagtcattcaaaaactatttcattgtaaattaataaaaacaatccatttaaaaaaaa

SEQ ID NO: 419614 - DNA, 1494 bp, Homo sapiens
acggcagaggactatccgccagccccgcccccgcctcgccgcaggtcgcgcgcagctggcgcctgaggaactgcggctgcggttccgagcggggtctggggctgttaccattgagtgaccagaaaggctctcggtgcaaagcgttcctgcagaattgcttccacgtaaagggaccttcgggaaatttcgctggataccggctggcattgacaaacccagcgtccctgagccttgtgaggtttccaggcaggctgattgcgaggcaacatgtctgcttcggtgaaagaaagccttcagcttcagctactggagatggaaatgctgttttctatgtttcctaaccaaggagaagtaaaacttgaagatgtaaatgccctgacgaatataaagaggtatttggaaggcacaagggaggcgctgccaccaaaaatcgaatttgtaattacactccagattgaagagcccaagaggagactttctggttctccagactggattctgtcccgctggttacacacttcaatggaaccctccacttttccatggtgaaaattgatttgcaagtgaccatgcctcacagctacccctatgtagcattgcagctgtttggacggtcatctgaacttgacagacatcagcagctacttctcaacaaaggtctcacttcttacatagggacttttgatccaggtgagctctgtgtatgtgcagcaatccagtggctacaggacaacagtgcatcttatttcctgaacagaaagcttgtatatgaaccatctacacaagcaaagccagtcaagaacacattcctccgaatgtggatctacagtcaccatatatatcagcaggacctaaggaaaaagattttggatgttgggaaaaggttagatgtgactggattttgcatgacaggaaagcctggtataatctgtgtggagggtttcaaagagcactgtgaggagttctggcacacaattaggtaccccaattggaagcacatttcctgtaagcatgctgaaagcgtggagacagaaggaaatggtgaggacctgcgccttttccattcttttgaagagttactccttgaggctcatggtgactatggattaaggaatgactatcacatgaatctgggccaattcttagaatttctcaagaagcacaaaagtgagcatgtttttcagatactatttggtattgaaagcaaaagttcagactcataaaaagcgattaagaggcctatgcctgtaatttcactaagtcagtatttctgttaataagaccaaattaaaaaggctagtggctgtgtagcatcctcagtgcaaaacccagctccagaattttcacctggtaacgaatttcaactgacagtgaaatgaataggcctttaaactttataacattgcaattgtgatgttatctctaggtttttgtgtgaagtcattcaaaaactatttcattgtaaattaataaaaacaatccatttaaaaaaaa

SEQ ID NO: 419615 - DNA, 1198 bp, Homo sapiens
acggcagaggactatccgccagccccgcccccgcctcgccgcaggtcgcgcgcagctggcgcctgaggaactgcggctgcggttccgagcggggtctggggctgttaccattgagtgaccagaaagggagaagtaaaacttgaagatgtaaatgccctgacgaatataaagaggtatttggaaggcacaagggaggcgctgccaccaaaaatcgaatttgtaattacactccagattgaagagcccaaggtgaaaattgatttgcaagtgaccatgcctcacagctacccctatgtagcattgcagctgtttggacggtcatctgaacttgacagacatcagcagctacttctcaacaaaggtctcacttcttacatagggacttttgatccaggtgagctctgtgtatgtgcagcaatccagtggctacaggacaacagtgcatcttatttcctgaacagaaagcttgtatatgaaccatctacacaagcaaagccagtcaagaacacattcctccgaatgtggatctacagtcaccatatatatcagcaggacctaaggaaaaagattttggatgttgggaaaaggttagatgtgactggattttgcatgacaggaaagcctggtataatctgtgtggagggtttcaaagagcactgtgaggagttctggcacacaattaggtaccccaattggaagcacatttcctgtaagcatgctgaaagcgtggagacagaaggaaatggtgaggacctgcgccttttccattcttttgaagagttactccttgaggctcatggtgactatggattaaggaatgactatcacatgaatctgggccaattcttagaatttctcaagaagcacaaaagtgagcatgtttttcagatactatttggtattgaaagcaaaagttcagactcataaaaagcgattaagaggcctatgcctgtaatttcactaagtcagtatttctgttaataagaccaaattaaaaaggctagtggctgtgtagcatcctcagtgcaaaacccagctccagaattttcacctggtaacgaatttcaactgacagtgaaatgaataggcctttaaactttataacattgcaattgtgatgttatctctaggtttttgtgtgaagtcattcaaaaactatttcattgtaaattaataaaaacaatccatttaaaaaaaa

SEQ ID NO: 419616 - DNA, 342 bp, Homo sapiens
gagaagtaaaacttgaagatgtaaatgccctgacgaatataaagaggtatttggaaggcacaagggaggcgctgccaccaaaaatcgaatttgtaattacactccagattgaagagcccaaggtaggtaccctgatttaagtgtttgccaggtgcccagtttttaattgaaacatctagaacatgagctttctgtcaaggaaagatagaaatattccaggtgcatatttccttgtttgaaagatacggaatgctctataaattgtcttcagtaaatatctttaattttatgtaaacatatacacctttttaacaaatatacctggagtttttattgacgcta

SEQ ID NO: 419617 - DNA, 921 bp, Homo sapiens
cacttccgcccatccccctccggatccctctgttcgggctcgggtttccgccgagacgacagggactgccaggtcggctagtgtgaggctcgtgggcggagccaagcgccgccatgtccgccgccctgctgcggcggggcctggagctgctggcggcgtccgaggccccccgggaccctccaggtcaggccaagccgagaggggctccggtgaaacggccccggaagacgaaggcaattcaggcccagaaactgcggaactcggccaagggaaaggtgcccaagtcggcactggacgagtaccggaagcgagagtgtcgagaccacctcagagtaaacctgaagtttctgaccaggacgagaagcaccgtggctgagtctgtgagccagcagattttgcgccagaaccggggccgcaaggcctgtgaccggcctgtggccaagaccaagaagaagaaggctgagggcaccgtgttcaccgaggaagacttccagaagttccagcaggaatacttcggcagctaggctccctggagggcacggtgaagaggccttcaagccctgcagcctccgactcctgctggctccaggaaccggccgtgccgcgcggccagcagatggcgatgcaggaccagcctggctcgaggaagccgcggagctgagccgagtggaggctggaatggagctggtgggccggaagtcctggggaggatttacacacagaccggagctggcttccgcaggcctgggcagagcatctgcacctgccggaaaggaacgtatctgttttgtttgcttttgcccaggtggggcctctgggctgtttgctgtggagcaaggctaattcctgagcccttggggacgacagctccaggagtaggaagaagggtgggcttccaagttacaataaatgtgaacccaa

SEQ ID NO: 419618 - DNA, 610 bp, Homo sapiens
  misc_feature (25)..(25): n is a, c, g, or t
  misc_feature (30)..(30): n is a, c, g, or t
  misc_feature (76)..(76): n is a, c, g, or t
ccggctcagaatccgcacgaaaatntgttnagggctaaagggagaactgaaaggtttaccttttctaaagtgtggnctttctaatgtactatttttctggttgcatcttttctacttcagtacacttggtgtactgggttatggctatactgtattggctctgtgaaaacatatttgtgaaaagagtatgtatggcttcttttgaactgttagatgctgaatatctgttcacttttcaatcccaattctgtcccaatcttaccagatgctactggacttgaatggttaataaaactgcacagtgctgttaaaaaaaaaaaaaaaaaaactcgaggaagccgcggagctgagccgagtggaggctggaatggagctggtgggccggaagtcctggggaggatttacacacagaccggagctggcttccgcaggcctgggcagagcatctgcacctgccggaaaggaacgtatctgttttgtttgcttttgcccaggtggggcctctgggctgtttgctgtggagcaaggctaattcctgagcccttggggacgacagctccaggagtaggaagaagggtgggcttccaagttacaataaatgtgaacccaa

SEQ ID NO: 419619 - DNA, 824 bp, Homo sapiens
cacttccgcccatccccctccggatccctctgttcgggctcgggtttccgccgagacgacagggactgccaggtcggctagtgtgaggctcgtgggcggagccaagcgccgccatgtccgccgccctgctgcggcggggcctggagctgctggcggcgtccgaggccccccgggaccctccaggtcaggccaagccgagaggggctccggtgaaacggccccggaagacgaaggcaattcaggcccagaaactgcggaactcggccaagggaaaggtgcccaagtcggcactgggtaagttcgggaaggggctgaaagtgctgcctccggtgctgggacctgcgccccagaggaggtggcgcttgaggcagggcttgaagcgttcgcccggtattgctagacctactgtgtgccaggcgcggagcggggccctggacatacgaaggtgacagaacacgccaccgtcctggtcctcgtggactacggccctagtggggagagaagcatcaaagaatatcaaacccagtgtgtcattgctaagtgcattgaagcctatgaattaaaagactacggtactctgatggggacttaggccaagtcagccttctctgaggaagcgacatttcagccgagagctgaaggatgtataagagtgagctaggtgaaaagtaggagaatattctaggaagaatagtatgtgcaaaggtcctgagtcagaaaggaggttgttgcctttgagaatttgaaaaaataaaggctggtaaaggtgacctagtgaatgaggatcaaagatggagcatttaaacacattcactaacactctg

SEQ ID NO: 419620 - DNA, 1334 bp, Homo sapiens
gcctcccgagtagctgggattacaggtgcccaccaccacacccagctaattttcgttatttttaatacagacggggtttcaccatgttggccacgctgatctcgaactcctgacctcaggtgacctgcctgcctcggcctcccaaagtgctgagattacaggtgtgagccaccgcacccagccattccagctgttttgtgtttttcaaacacatttgacacatttctgcttcagggcctttgcactgggtgttccctctacctagacaaatgctctttccccggatatccacagctctcttcgagtcatttcagtgagaccttctcattccctcctatttgaaattgcaccctccacccctggaattccccttttctgtttcctcttttgtttttctccatgaaatgtttgcgcttctaaaatactgggtcctttgtccttcatctctcactgaagcgaaagctccagagtagctcccttggtgagtagtattcaggacataattgttggaaaatgggggtgggggccaagagcctggggctttcagcaggacctgtgtggagaatgcatttgatggagaagagcccagccgctgtaataacctgggaagggaacgatgaggtctttggcagggccatgggccagggactgagaatggttccagggggagtgaatctgaaatggtgctccctgcctgctacccacagacgagtaccggaagcgagagtgtcgagaccacctcagagtaaacctgaagtttctgaccaggacgagaagcaccgtggctgagtctgtgagccagcagattttgcgccagaaccggggccgcaaggcctgtgaccggcctgtggccaagaccaagaagaagaaggctgagggcaccgtgttcaccgaggaagacttccagaagttccagcaggaatacttcggcagctaggctccctggagggcacggtgaagaggccttcaagccctgcagcctccgactcctgctggctccaggaaccggccgtgccgcgcggccagcagatggcgatgcaggaccagcctggctcgaggaagccgcggagctgagccgagtggaggctggaatggagctggtgggccggaagtcctggggaggatttacacacagaccggagctggcttccgcaggcctgggcagagcatctgcacctgccggaaaggaacgtatctgttttgtttgcttttgcccaggtggggcctctgggctgtttgctgtggagcaaggctaattcctgagcccttggggacgacagctccaggagtaggaagaagggtgggcttccaagttacaataaatgtgaacccaa

SEQ ID NO: 419621 - DNA, 923 bp, Homo sapiens
tgcgcggattctagggaaacaccaatagccacaagactccatgttatcactgtctatgcgagattaagcagggagatttaacagggtgtctcataagacttgaaagcaggggaacgccaaaatagccacagttatttgctgggacaagatggtgggttattttaagaacagcagctgaaataggagggtgggagggttgcccactccaatattaggcaagtgcagtgtgactatggtaaagacagaagaagctagagcagtctagccccaacgaactctcaaaatggaactactggacgagtaccggaagcgagagtgtcgagaccacctcagagtaaacctgaagtttctgaccaggacgagaagcaccgtggctgagtctgtgagccagcagattttgcgccagaaccggggccgcaaggcctgtgaccggcctgtggccaagaccaagaagaagaaggctgagggcaccgtgttcaccgaggaagacttccagaagttccagcaggaatacttcggcagctaggctccctggagggcacggtgaagaggccttcaagccctgcagcctccgactcctgctggctccaggaaccggccgtgccgcgcggccagcagatggcgatgcaggaccagcctggctcgaggaagccgcggagctgagccgagtggaggctggaatggagctggtgggccggaagtcctggggaggatttacacacagaccggagctggcttccgcaggcctgggcagagcatctgcacctgccggaaaggaacgtatctgttttgtttgcttttgcccaggtggggcctctgggctgtttgctgtggagcaaggctaattcctgagcccttggggacgacagctccaggagtaggaagaagggtgggcttccaagttacaataaatgtgaacccaa

SEQ ID NO: 419622 - DNA, 803 bp, Homo sapiens
cacttccgcccatccccctccggatccctctgttcgggctcgggtttccgccgagacgacagggactgccaggtcggctagtgtgaggctcgtgggcggagccaagcgccgccatgtccgccgccctgctgcggcggggcctggagctgctggcggcgtccgaggccccccgggaccctccaggtcaggccaagccgagaggggctccggtgaaacggccccggaagacgaaggcaattcaggcccagaaactgcggaactcggccaagggaaaggtgcccaagtcggcactggacgagtaccggaagcgagagtgtcgagaccacctcagagtaaacctgaagtttctgaccaggacgagaagcaccgtggctgagtctgtgagccagcagattttgcgccagaaccggggccgcaaggcctgtgaccggcctgtggccaagaccaagaagaagaaggctgagggcaccgtgttcaccgaggaagacttccagaagttccagcaggaatacttcggcagctaggctccctggagggcacggtgaagaggccttcaagccctgcagcctccgactcctgctggctccaggaaccggccgtgccgcgcggccagcagatggcgatgcaggaccagcctggctcgaggaagccgcggagctgagccgagtggaggctggaatggagctggtggggcctctgggctgtttgctgtggagcaaggctaattcctgagcccttggggacgacagctccaggagtaggaagaagggtgggcttccaagttacaataaatgtgaacccaa

SEQ ID NO: 419623 - DNA, 1015 bp, Homo sapiens
  misc_feature (985)..(985): n is a, c, g, or t
  misc_feature (988)..(988): n is a, c, g, or t
gcctcccgagtagctgggattacaggtgcccaccaccacacccagctaattttcgttatttttaatacagacggggtttcaccatgttggccacgctgatctcgaactcctgacctcaggtgacctgcctgcctcggcctcccaaagtgctgagattacaggtgtgagccaccgcacccagccattccagctgttttgtgtttttcaaacacatttgacacatttctgcttcagggcctttgcactgggtgttccctctacctagacaaatgctctttccccggatatccacagctctcttcgagtcatttcagtgagaccttctcattccctcctatttgaaattgcaccctccacccctggaattccccttttctgtttcctcttttgtttttctccatgaaatgtttgcgcttctaaaatactgggtcctttgtccttcatctctcactgaagcgaaagctccagagtagctcccttggtgagtagtattcaggacataattgttggaaaatgggggtgggggccaagagcctggggctttcagcaggacctgtgtggagaatgcatttgatggagaagagcccagccgctgtaataacctgggaagggaacgatgaggtctttggcagggccatgggccagggactgagaatggttccagggggagtgaatctgaaatggtgctccctgcctgctacccacagacgagtaccggaagcgagagtgtcgagaccacctcagagtaaacctgaagtttctgaccaggacgagaagcaccgtggctgagtctgtgagccagcagattttgcgccagaaccggggccgcaaggcctgtgaccggcctgtggccaagaccaagaagaagaaggctgagggcaccgtgttcaccgaggaagacttccagaagttccagcaggaatacttcggcagctaggctccctggagggcacggtgacgtgcgttggcccaacacggtgcgtgnccnacacggtgcgtgcccaccggtgcgtgg

SEQ ID NO: 419624 - DNA, 367 bp, Homo sapiens
taatacagacggggtttcaccatgttggccacgctgatctcgaactcctgacctcaggtgacctgcctgcctcggcctcccaaagtgctgagattacaggtgtgagccaccgcacccagccattccagctgttttgtgtttttcaaacacatttgacacatttctgcttcagggcctttgcactgggtgttccctctacctagacaaatgctctttccccggatatccacagctctcttcgagtcatttcagtgagaccttctcattccctcctatttgaaattgcaccctccacccctggaattccccttttctgtttcctcttttgtttttctccatgaaatgtttgcgcttctaaaatactggg

SEQ ID NO: 419625 - DNA, 429 bp, Homo sapiens
ctataggaagggacctgggaggtgagagccgaggctgttcccctagggacccatggcggtctcagccctgagcatagggtgggaggctgggccagccctgccctgcgccgaactcccctgtgacctttgcgggcctcctctgctcttgaaatgatgggccctcggtcccgcaccctcgccagattttgcgccagaaccggggccgcaaggcctgtgaccggcctgtggccaagaccaagaagaagaaggctgagggcaccgtgttcaccgaggaagacttccagaagttccagcaggaatacttcggcagctaggctccctggagggcacggtgaagaggccttcaagccctgcagcctccgactcctgctggctccaggaaccggccgtgccgcgcggccagcagatggcgatgcaggaccagcctgg

SEQ ID NO: 419626 - DNA, 1432 bp, Homo sapiens
cacttccgcccatccccctccggatccctctgttcgggctcgggtttccgccgagacgacagggactgccaggtcggctagtgtgaggctcgtgggcggagccaagcgccgccatgtccgccgccctgctgcggcggggcctggagctgctggcggcgtccgaggccccccgggaccctccaggtcaggccaagccgagaggggctccggtgaaacggccccggaagacgaaggcaattcaggcccagaaactgcggaactcggccaagggaaaggtgcccaagtcggcactggacgagtaccggaagcgagagtgtcgagaccacctcagagtaaacctgaagtttctgaccaggacgagaagcaccgtggctgagtctgtgagccagcagattttgcgccagaaccggggccgcaaggcctgtgaccggcctgtggccaagaccaagaagaagaaggctgagggcaccgtgttcaccgaggaagacttccagaagttccagcaggaatacttcggcagctaggctccctggagggcacggtgaagaggccttcaagccctgcagcctccgactcctgctggctccaggaaccggccgtgccgcgcggccagcagatggcgatgcaggaccagcctggctcgaggaagccgcggagctgagccgagtggaggctggaatggagctggtgggccggaagtcctggggaggatttacacacagaccggagctggcttccgcaggcctgggcagagcatctgcacctgccggaaaggaacgtatctgttttgtttgcttttgcccaggtggggcctctgggctgtttgctgtggagcaaggctaattcctgagcccttggggacgacagctccaggagtaggaagaagggtgggcttccaagttacaataaatgtgaacccaaaaaaaaaaaaaaaaaaagcaaagaaaaacaaaaaaaaaaaaaaaaataaagaagaaaaaaagaagcaaacaaaaaaaaaaaaggggggggggggcaaacaaatcccccgggggggggccaatatgggcccccctttttttgaaaaggggggccccccatggggggccatataaaccgaaacgcgcggggcgcggccgggtgttcacaacaacgcggcggcgcgacaggagcagaaaaaccggtaggctctagcgggagcgcaaccgctggggacagaccacgaccaccccatccgccgcgggcgggcgcagcgaaccaaaaaggggcgggaaacaccacacccaacccacgagggacatgcacaccagcccgctcccgcagaagcaccaaacacacacccacgacaacggacgacagagcggctgccacaccaacacaccgcgaaacaatcgccggcccgcacacaaaacaacaccgcccccaccgcggacgccctcgcgcacaacatcaa

SEQ ID NO: 419627 - DNA, 966 bp, Homo sapiens
cacttccgcccatccccctccggatccctctgttcgggctcgggtttccgccgagacgacagggactgccaggtcggctagtgtgaggctcgtgggcggagccaagcgccgccatgtccgccgccctgctgcggcggggcctggagctgctggcggcgtccgagggtgaggagggctggccaggggacgtccggcgcgggcaggaggatggtagtggctgcgggcgggagccctggatggaaaacaatccaggccgggcttagccccagtggcatgggaacgctgcgcgccctctgacctgggtctcttcctctctcttcccctacagccccccgggaccctccaggtcaggccaagccgagaggggctccggtgaaacggccccggaagacgaaggcaattcaggcccagaaactgcggaactcggccaagggaaaggtgcccaagtcggcactggacgagtaccggaagcgagagtgtcgagaccacctcagagtaaacctgaagtttctgaccaggacgagaagcaccgtggctgagtctgtgagccagcagattttgcgccagaaccggggccgcaaggcctgtgaccggcctgtggccaagaccaagaagaagaaggctgagggcaccgtgttcaccgaggaagacttccagaagttccagcaggaatacttcggcagctaggctccctggagggcacggtgaagaggccttcaagccctgcagcctccgactcctgctggctccaggaaccggccgtgccgcgcggccagcagatggcgatgcaggaccagcctggctcgaggaagccgcggagctgagccgagtggaggctggaatggagctggtggggcctctgggctgtttgctgtggagcaaggctaattcctgagcccttggggacgacagctccaggagtaggaagaagggtgggcttccaagttacaataaatgtgaacccaa

SEQ ID NO: 419628 - DNA, 981 bp, Homo sapiens
gcacatgcgcagaatcatcgtggtgcagggctctccctttgcttcttcggttgcagtcctcttgcttcttgcgcgtgcgtgtagcgcttttgcaaagccgcggaggtgaagtgaacttagaggttgtggggccgaggggtcgtcttatagctaccagcccacaggcatttagtctacgttggaggtaaacaaatacgggtcctgcttaggagaaaagaaaaacgtcttacagccagtgtctaaactccaaacaacggaatgtatcaatgagaccttgtatatggatacacgtgcatttaaaaccgccctgccggcttgtagagcttttgccgttctccagcgctttacaggggttatcgcacttaagcctcggaacaactttaccagtgattctaccagaaaggaatgaagaacagaaccttcaggaattgagtcacaatgcagacaaatatcaaatgggagattgttgcaaggaagagattgatgatagtattttctactagccattgggaagataaaaggagacagaagattgaagcctttgccagccattctttccctttttgcttccaaactcctcaactgggaaccttcatatgtgcagtatttatattggatcatactggtgattataaaagttcctaggaggctagaagagccaaccaacagagaagggaaagcagtctgttctgaacatagggacataagttcattcatgccaagtatctttccagcatgtttctcccatttagaatatctagcatgtaaggcctttcaatattaatataagcccaatatcagctctttctctttgtatttcatctctttctactctcctatttgtattttgtgttcctatcaaagtgtcgtatctgggagatgacctgccttatcctgttctataacagttttgtttgctgctgtgtctttagaacagtgcctggcacacagtaagcactcaataaatctttgatgaatgaa

SEQ ID NO: 419629 - DNA, 1034 bp, Homo sapiens
gcacatgcgcagaatcatcgtggtgcagggctctccctttgcttcttcggttgcagtcctcttgcttcttgcgcgtgcgtgtagcgcttttgcaaagccgcggaggtgaagtgaacttagaggttgtggggccgaggggtcgtcttatagctaccagcccacaggcatttagtctacgttggaggtaaacaaatacgggtcctgcttaggagaaaagaaaaacgtcttacagccagtgtctaaactccaaacaacggaatgtatcaatgagaccttgtatatggatacacgtgcatttaaaaccgccctgccggcttgtagagcttttgccgttctccagcgctttacaggggttatcgcacttaagcctcggaacaactttaccagatgaggacacctgaggttcagattaagaaatctgccccaaagtcttagaactgtgattctaccagaaaggaatgaagaacagaaccttcaggaattgagtcacaatgcagacaaatatcaaatgggagattgttgcaaggaagagattgatgatagtattttctactagccattgggaagataaaaggagacagaagattgaagcctttgccagccattctttccctttttgcttccaaactcctcaactgggaaccttcatatgtgcagtatttatattggatcatactggtgattataaaagttcctaggaggctagaagagccaaccaacagagaagggaaagcagtctgttctgaacatagggacataagttcattcatgccaagtatctttccagcatgtttctcccatttagaatatctagcatgtaaggcctttcaatattaatataagcccaatatcagctctttctctttgtatttcatctctttctactctcctatttgtattttgtgttcctatcaaagtgtcgtatctgggagatgacctgccttatcctgttctataacagttttgtttgctgctgtgtctttagaacagtgcctggcacacagtaagcactcaataaatctttgatgaatgaa

SEQ ID NO: 419630 - DNA, 670 bp, Homo sapiens
  misc_feature (40)..(40): n is a, c, g, or t
cccacgaccaatacgcctgatcacccccgacgccccaagnagtgagggctgtagcttctcaccacacaggatttagtgattctaccagaaaggaatgaagaacagaaccttcaggaattgagtcacaatgcagacaaatatcaaatgggagattgttgcaaggaagagattgatgatagtattttctactagccattgggaagataaaaggagacagaagattgaagcctttgccagccattctttccctttttgcttccaaactcctcaactgggaaccttcatatgtgcagtatttatattggatcatactggtgattataaaagttcctaggaggctagaagagccaaccaacagagaagggaaagcagtctgttctgaacatagggacataagttcattcatgccaagtatctttccagcatgtttctcccatttagaatatctagcatgtaaggcctttcaatattaatataagcccaatatcagctctttctctttgtatttcatctctttctactctcctatttgtattttgtgttcctatcaaagtgtcgtatctgggagatgacctgccttatcctgttctataacagttttgtttgctgctgtgtctttagaacagtgcctggcacacagtaagcactcaataaatctttgatgaatgaa

SEQ ID NO: 419631 - DNA, 656 bp, Homo sapiens
ggatgaagtagggcgcgacaaccaacgttttagcataactggcccgtttcgcgcatctaccatgattctaccagaaaggaatgaagaacagaaccttcaggaattgagtcacaatgcagacaaatatcaaatgggagattgttgcaaggaagagattgatgatagtattttctactagccattgggaagataaaaggagacagaagattgaagcctttgccagccattctttccctttttgcttccaaactcctcaactgggaaccttcatatgtgcagtatttatattggatcatactggtgattataaaagttcctaggaggctagaagagccaaccaacagagaagggaaagcagtctgttctgaacatagggacataagttcattcatgccaagtatctttccagcatgtttctcccatttagaatatctagcatgtaaggcctttcaatattaatataagcccaatatcagctctttctctttgtatttcatctctttctactctcctatttgtattttgtgttcctatcaaagtgtcgtatctgggagatgacctgccttatcctgttctataacagttttgtttgctgctgtgtctttagaacagtgcctggcacacagtaagcactcaataaatctttgatgaatgaa

SEQ ID NO: 419632 - DNA, 2544 bp, Homo sapiens
  misc_feature (2510)..(2510): n is a, c, g, or t
  misc_feature (2519)..(2519): n is a, c, g, or t
  misc_feature (2528)..(2528): n is a, c, g, or t
gcacatgcgcagaatcatcgtggtgcagggctctccctttgcttcttcggttgcagtcctcttgcttcttgcgcgtgcgtgtagcgcttttgcaaagccgcggaggtgaagtgaacttagaggttgtggggccgaggggtcgtcttatagctaccagcccacaggcatttagtctacgttggaggtaaacaaatacgggtcctgcttaggagaaaagaaaaacgtcttacagccagtgtctaaactccaaacaacggaatgtatcaatgagaccttgtatatggatacacgtgcatttaaaaccgccctgccggcttgtagagcttttgccgttctccagcgctttacaggggttatcgcacttaagcctcggaacaactttaccagattcagctggctaccccacttggctacagagtactaaagaagagactgaacttgatcctgctgcccttgcatacacaacactcccattgacgctagtgaagacttaagcgcatgaaaggattccaggatcaaaaggttagctctatggggagctgtgtctgggcaatccatttttttctattgacagtgaaaacgttttatagttctttttcaaagttttcccaaacttttacaataacaggcaacttgtgaaaaagtgagaaggcatctaattgaactatatccagaggagatcatggcagagaccaacaggaagaaaaacatttccaaaccacagcgatattggtcaaatcaattgtatttgaagaataaagcatttgaggcgtcggctgagaaaaattttcattatgaaacttggttggactatgaagcagaatgtgagataaaataaaacacagagctcatgagtttttatctttgtctgctaatgacttatgctagcaggattatactttttttttgcattttatgagatgtatgaactaggaagaaaatacatgctatatctaaatggattagacgtgcagattcttaactaacatttaattcattgctagtaaaacaaatgccttaaaacatttaaaaaagtgaaattatcttaaggagataattaacaagcagagtagaatagcatttttgaagaaagtgtaatatggttctacactggcattttctgcatttattgaagatacttagtctatccaacaattcactcattcattctttcatgaaaccctgtctctactaaaaatacaaaaaaaaattagctgggcacgggggtaggcccttgtagtcccagctactcgggaggctgaggcaggagaatggcgtgaacccgggaggcagagcttgtagtgaaccaagatcgcgtcactgcactccagcctaggtgacagagcgagactccgtctcaaaacaacaacaacaacaacaacaacaacaacaacaacaacaaatttctttgtgcacttactatatgcccaatgctaatctaatagttttacaagacctcaattgaacaagtgtctgaggaaatggattgcatctaataaagcaagacacaccaactgtggatgggtggtgtgtctagagtattttgcattcctaaatcactcttctggagaaaatttgtatcaataattttgtctagcttcacctggagttacacattttgattggtaagtggttgctctggctatatcaaataaaagtgtcaagagtgagcatccttgccttgtgctgaatcacaaaggaatacctttcagtttttctccattgattatgatagcagtgggcttttcacagtgggctttactgtgttgaggtaccctaatgacaagttcaccccagtgttttctgaggagtctacctggaaatgagaaccatctgtccttcctatagtagttcttctcagaatgccgactctatgctaatggaggaggtctgatggccgggaggacaggaagaaggaacccacaatgaagcaaaagttgcgtttaactctgtcctcaccattcctctcctggacctgtcctaaactggaagctgggggaggatggagtgctggaatgctgcagaagtctcatgggagggcgcctggtgttcaccacatgtgtacactgttgcacgaccagatggaaatttgaatgctggggctcagtggaacacctgaaggaagctggtgaggcagatgtcccgctatgccttccaagtgtcatgcaaccagttcatgcctgtcagcatctctgccggtggactctgtgagtcagcaaatctacagagcagagagccacaagtggggacagatgtggtcaaatgccatttaaatcagtgattctcaacccaggagttgtcatggcactggccttgagtgagctggaccaagggaagtggtagaattccccatgaaggaccaagtgagcagatagaagtttctccattttaactttttctgagtcaatttaaaaaacacctagtgcctttttctgtacatagtgcctgtgggtttaatttaagcctacccaaatgtgcttttatcccacctattttgaaccttgcatgtntccgggatnagaattaanataagctataaatatt

SEQ ID NO: 419633 - DNA, 1563 bp, Homo sapiens
  misc_feature (1529)..(1529): n is a, c, g, or t
  misc_feature (1538)..(1538): n is a, c, g, or t
  misc_feature (1547)..(1547): n is a, c, g, or t
gcacatgcgcagaatcatcgtggtgcagggctctccctttgcttcttcggttgcagtcctcttgcttcttgcgcgtgcgtgtagcgcttttgcaaagccgcggaggtgaagtgaacttagaggttgtggggccgaggggtcgtcttatagctaccagcccacaggcatttagtctacgttggaggtaaacaaatacgggtcctgcttaggagaaaagaaaaacgtcttacagccagtgtctaaactccaaacaacggaatgtatcaatgagaccttgtatatggatacacgtgcatttaaaaccgccctgccggcttgtagagcttttgccgttctccagcgctttacaggggttatcgcacttaagcctcggaacaactttaccagatgaggacacctgaggttcagattaagaaatctgccccaaagtcttagaactggtattctccactggttgaatgcaaatggaagccagaggaaaagggaacccttgacacagttttcatatagattggcctccagggcagacagcaggagtggggtttaatctggactgaattggaggaaaggaactggcaccagagtggaggctggaaggatggtggaactgacactgggacagaacacagaaaacagaatctaatgctattgctctggctatatcaaataaaagtgtcaagagtgagcatccttgccttgtgctgaatcacaaaggaatacctttcagtttttctccattgattatgatagcagtgggcttttcacagtgggctttactgtgttgaggaggaggtctgatggccgggaggacaggaagaaggaacccacaatgaagcaaaagttgcgtttaactctgtcctcaccattcctctcctggacctgtcctaaactggaagctgggggaggatggagtgctggaatgctgcagaagtctcatgggagggcgcctggtgttcaccacatgtgtacactgttgcacgaccaggttggcactttgcatgtgggaaacgatcagagaatggtgggggatgcttaagaggcatcactggaatcctacggtaccacagaccagagccttcccttcccttcctctcccacagatggaaatttgaatgctggggctcagtggaacacctgaaggaagctggtgaggcagatgtcccgctatgccttccaagtgtcatgcaaccagttcatgcctgtcagcatctctgccggtggactctgtgagtcagcaaatctacagagcagagagccacaagtggggacagatgtggtcaaatgccatttaaatcagtgattctcaacccaggagttgtcatggcactggccttgagtgagctggaccaagggaagtggtagaattccccatgaaggaccaagtgagcagatagaagtttctccattttaactttttctgagtcaatttaaaaaacacctagtgcctttttctgtacatagtgcctgtgggtttaatttaagcctacccaaatgtgcttttatcccacctattttgaaccttgcatgtntccgggatnagaattaanataagctataaatatt

SEQ ID NO: 419634 - DNA, 1559 bp, Homo sapiens
  misc_feature (1525)..(1525): n is a, c, g, or t
  misc_feature (1534)..(1534): n is a, c, g, or t
  misc_feature (1543)..(1543): n is a, c, g, or t
gcacatgcgcagaatcatcgtggtgcagggctctccctttgcttcttcggttgcagtcctcttgcttcttgcgcgtgcgtgtagcgcttttgcaaagccgcggaggtgaagtgaacttagaggttgtggggccgaggggtcgtcttatagctaccagcccacaggcatttagtctacgttggaggtaaacaaatacgggtcctgcttaggagaaaagaaaaacgtcttacagccagtgtctaaactccaaacaacggaatgtatcaatgagaccttgtatatggatacacgtgcatttaaaaccgccctgccggcttgtagagcttttgccgttctccagcgctttacaggggttatcgcacttaagcctcggaacaactttaccagatgaggacacctgaggttcagattaagaaatctgccccaaagtcttagaactggtattctccactggttgaatgcaaatggaagccagaggaaaagggaacccttgacacagttttcatatagattggcctccagggcagacagcaggagtggggtttaatctggactgaattggaggaaaggaactggcaccagagtggaggctggaaggatggtggaactgacactgggacagaacacagaaaacagaatctaatgctattgctctggctatatcaaataaaagtgtcaagagtgagcatccttgccttgtgctgaatcacaaaggaatacctttcagtttttctccattgattatgatagcagtgggcttttcacagtgggctttactgtgttgaggtaccctaatgacaagttcaccccagtgttttctgaggagtctacctggaaatgagaaccatctgtccttcctatagtagttcttctcagaatgccgactctatgctaatggaggaggtctgatggccgggaggacaggaagaaggaacccacaatgaagcaaaagttgcgtttaactctgtcctcaccattcctctcctggacctgtcctaaactggaagctgggggaggatggagtgctggaatgctgcagaagtctcatgggagggcgcctggtgttcaccacatgtgtacactgttgcacgaccagatggaaatttgaatgctggggctcagtggaacacctgaaggaagctggtgaggcagatgtcccgctatgccttccaagtgtcatgcaaccagttcatgcctgtcagcatctctgccggtggactctgtgagtcagcaaatctacagagcagagagccacaagtggggacagatgtggtcaaatgccatttaaatcagtgattctcaacccaggagttgtcatggcactggccttgagtgagctggaccaagggaagtggtagaattccccatgaaggaccaagtgagcagatagaagtttctccattttaactttttctgagtcaatttaaaaaacacctagtgcctttttctgtacatagtgcctgtgggtttaatttaagcctacccaaatgtgcttttatcccacctattttgaaccttgcatgtntccgggatnagaattaanataagctataaatatt

SEQ ID NO: 419635 - DNA, 1448 bp, Homo sapiens
  misc_feature (1414)..(1414): n is a, c, g, or t
  misc_feature (1423)..(1423): n is a, c, g, or t
  misc_feature (1432)..(1432): n is a, c, g, or t
gcacatgcgcagaatcatcgtggtgcagggctctccctttgcttcttcggttgcagtcctcttgcttcttgcgcgtgcgtgtagcgcttttgcaaagccgcggaggtgaagtgaacttagaggttgtggggccgaggggtcgtcttatagctaccagcccacaggcatttagtctacgttggaggtaaacaaatacgggtcctgcttaggagaaaagaaaaacgtcttacagccagtgtctaaactccaaacaacggaatgtatcaatgagaccttgtatatggatacacgtgcatttaaaaccgccctgccggcttgtagagcttttgccgttctccagcgctttacaggggttatcgcacttaagcctcggaacaactttaccagatgaggacacctgaggttcagattaagaaatctgccccaaagtcttagaactggtattctccactggttgaatgcaaatggaagccagaggaaaagggaacccttgacacagttttcatatagattggcctccagggcagacagcaggagtggggtttaatctggactgaattggaggaaaggaactggcaccagagtggaggctggaaggatggtggaactgacactgggacagaacacagaaaacagaatctaatgctattgctctggctatatcaaataaaagtgtcaagagtgagcatccttgccttgtgctgaatcacaaaggaatacctttcagtttttctccattgattatgatagcagtgggcttttcacagtgggctttactgtgttgaggaggaggtctgatggccgggaggacaggaagaaggaacccacaatgaagcaaaagttgcgtttaactctgtcctcaccattcctctcctggacctgtcctaaactggaagctgggggaggatggagtgctggaatgctgcagaagtctcatgggagggcgcctggtgttcaccacatgtgtacactgttgcacgaccagatggaaatttgaatgctggggctcagtggaacacctgaaggaagctggtgaggcagatgtcccgctatgccttccaagtgtcatgcaaccagttcatgcctgtcagcatctctgccggtggactctgtgagtcagcaaatctacagagcagagagccacaagtggggacagatgtggtcaaatgccatttaaatcagtgattctcaacccaggagttgtcatggcactggccttgagtgagctggaccaagggaagtggtagaattccccatgaaggaccaagtgagcagatagaagtttctccattttaactttttctgagtcaatttaaaaaacacctagtgcctttttctgtacatagtgcctgtgggtttaatttaagcctacccaaatgtgcttttatcccacctattttgaaccttgcatgtntccgggatnagaattaanataagctataaatatt

SEQ ID NO: 419636 - DNA, 1249 bp, Homo sapiens
  misc_feature (1215)..(1215): n is a, c, g, or t
  misc_feature (1224)..(1224): n is a, c, g, or t
  misc_feature (1233)..(1233): n is a, c, g, or t
gcacatgcgcagaatcatcgtggtgcagggctctccctttgcttcttcggttgcagtcctcttgcttcttgcgcgtgcgtgtagcgcttttgcaaagccgcggaggtgaagtgaacttagaggttgtggggccgaggggtcgtcttatagctaccagcccacaggcatttagtctacgttggaggtaaacaaatacgggtcctgcttaggagaaaagaaaaacgtcttacagccagtgtctaaactccaaacaacggaatgtatcaatgagaccttgtatatggatacacgtgcatttaaaaccgccctgccggcttgtagagcttttgccgttctccagcgctttacaggggttatcgcacttaagcctcggaacaactttaccagatgaggacacctgaggttcagattaagaaatctgccccaaagtcttagaactggtattctccactggttgaatgcaaatggaagccagaggaaaagggaacccttgacacagttttcatatagattggcctccagggcagacagcaggagtggggtttaatctggactgaattggaggaaaggaactggcaccagagtggaggctggaaggatggtggaactgacactgggacagaacacagaaaacagaatctaatgctattgctctggctatatcaaataaaagtgtcaagagtgagcatccttgccttgtgctgaatcacaaaggaatacctttcagtttttctccattgattatgatagcagtgggcttttcacagtgggctttactgtgttgagatggaaatttgaatgctggggctcagtggaacacctgaaggaagctggtgaggcagatgtcccgctatgccttccaagtgtcatgcaaccagttcatgcctgtcagcatctctgccggtggactctgtgagtcagcaaatctacagagcagagagccacaagtggggacagatgtggtcaaatgccatttaaatcagtgattctcaacccaggagttgtcatggcactggccttgagtgagctggaccaagggaagtggtagaattccccatgaaggaccaagtgagcagatagaagtttctccattttaactttttctgagtcaatttaaaaaacacctagtgcctttttctgtacatagtgcctgtgggtttaatttaagcctacccaaatgtgcttttatcccacctattttgaaccttgcatgtntccgggatnagaattaanataagctataaatatt

SEQ ID NO: 419637 - DNA, 1266 bp, Homo sapiens
  misc_feature (1232)..(1232): n is a, c, g, or t
  misc_feature (1241)..(1241): n is a, c, g, or t
  misc_feature (1250)..(1250): n is a, c, g, or t
gcacatgcgcagaatcatcgtggtgcagggctctccctttgcttcttcggttgcagtcctcttgcttcttgcgcgtgcgtgtagcgcttttgcaaagccgcggaggtgaagtgaacttagaggttgtggggccgaggggtcgtcttatagctaccagcccacaggcatttagtctacgttggaggtaaacaaatacgggtcctgcttaggagaaaagaaaaacgtcttacagccagtgtctaaactccaaacaacggaatgtatcaatgagaccttgtatatggatacacgtgcatttaaaaccgccctgccggcttgtagagcttttgccgttctccagcgctttacaggggttatcgcacttaagcctcggaacaactttaccagatgaggacacctgaggttcagattaagaaatctgccccaaagtcttagaactggagtggggtttaatctggactgaattggaggaaaggaactggcaccagagtggaggctggaaggatggtggaactgacactgggacagaacacagaaaacagaatctaatgctattgctctggctatatcaaataaaagtgtcaagagtgagcatccttgccttgtgctgaatcacaaaggaatacctttcagtttttctccattgattatgatagcagtgggcttttcacagtgggctttactgtgttgaggtaccctaatgacaagttcaccccagtgttttctgaggagtctacctggaaatgagaaccatctgtccttcctatagtagttcttctcagaatgccgactctatgctaatgatggaaatttgaatgctggggctcagtggaacacctgaaggaagctggtgaggcagatgtcccgctatgccttccaagtgtcatgcaaccagttcatgcctgtcagcatctctgccggtggactctgtgagtcagcaaatctacagagcagagagccacaagtggggacagatgtggtcaaatgccatttaaatcagtgattctcaacccaggagttgtcatggcactggccttgagtgagctggaccaagggaagtggtagaattccccatgaaggaccaagtgagcagatagaagtttctccattttaactttttctgagtcaatttaaaaaacacctagtgcctttttctgtacatagtgcctgtgggtttaatttaagcctacccaaatgtgcttttatcccacctattttgaaccttgcatgtntccgggatnagaattaanataagctataaatatt

SEQ ID NO: 419638 - DNA, 615 bp, Homo sapiens
  misc_feature (445)..(445): n is a, c, g, or t
  misc_feature (534)..(534): n is a, c, g, or t
  misc_feature (615)..(615): n is a, c, g, or t
gcacatgcgcagaatcatcgtggtgcagggctctccctttgcttcttcggttgcagtcctcttgcttcttgcgcgtgcgtgtagcgcttttgcaaagccgcggaggtgaagtgaacttagaggttgtggggccgaggggtcgtcttatagctaccagcccacaggcatttagtctacgttggaggtaaacaaatacgggtcctgcttaggagaaaagaaaaacgtcttacagccagtgtctaaactccaaacaacggaatgtatcaatgagaccttgtatatggatacacgtgcatttaaaaccgccctgccggcttgtagagcttttgccgttctccagcgctttacaggggttatcgcacttaagcctcggaacaactttaccagatgaggacacctgaggttcagattaagaaatctgccccaaagtcttagaactgtgggncgactctggaaccgagctgcctgggtgaatcccagctccactacttactagctgtgccttgttgggtaaattatctgttggaccttttntaaaacaagtactattaatacctcattggactgttgtaaggatgtaaatgagctaacatattaaaggaatttcaacagtgn

SEQ ID NO: 419639 - DNA, 908 bp, Homo sapiens
gcacatgcgcagaatcatcgtggtgcagggctctccctttgcttcttcggttgcagtcctcttgcttcttgcgcgtgcgtgtagcgcttttgcaaagccgcggaggtgaagtgaacttagaggttgtggggccgaggggtcgtcttatagctaccagcccacaggcatttagtctacgttggaggtaaacaaatacgggtcctgcttaggagaaaagaaaaacgtcttacagccagtgtctaaactccaaacaacggaatgtatcaatgagaccttgtatatggatacacgtgcatttaaaaccgccctgccggcttgtagagcttttgccgttctccagcgctttacaggggttatcgcacttaagcctcggaacaactttaccaggtattctccactggttgaatgcaaatggaagccagaggaaaagggaacccttgacacagttttcatatagattggcctccagggcagacagcaggagtggggtttaatctggactgaattggaggaaaggaactggcaccagagtggaggctggaaggatggtggaactgacactgggacagaacacagaaaacagaatctaatgctattgctctggctatatcaaataaaagtgtcaagagtgagcatccttgccttgtgctgaatcacaaaggaatacctttcagtttttctccattgattatgatagcagtgggcttttcacagtgggctttactgtgttgaggtaagttccttctgtacctattttgttgagttttcattacgaatgatgttgatttggtcaaatgctttttctgcatctgttgaaatggtcatgtggtttttatctttcattctgttaatatgatgtaacaccttgattgatttgcatatattaaaccagccttgcatcccaggaa

SEQ ID NO: 419640 - DNA, 452 bp, Homo sapiens
agcacaggtggcacagaagtggatgaatccacatctgtcagattcagcagccctggagttctctaccacgctgtacgattcaacctgagcccacacaggaggcgtggtctccttcttcaacggtgtgtgtgtgtgtgcgcgcgcgcctgcctagagttaatgattaagtttgctgaagcccttcttcccggtcctaagctgcctgttgcgaaggcgctttcattgaattcagtttctcttaccgtcttaacttgttcataaactttttgagataggaatgggcagtttttctgtgtcacttaggatgattttttttttaatggcgtgataagtgaactgaatccagcaaagacgagtttctgttgtgcaacacgttggtatactgacagctaccacgtattgactgtgtactgtgtgctgggcactgtgctaaataaatgatttacgaatta

SEQ ID NO: 419641 - DNA, 763 bp, Homo sapiens
agcacaggtggcacagaagtggatgaatccacatctgtcagattcagcagccctggagttctctaccacgctgtacgattcaacctgagcccacacaggaggcgtggtctccttcttcaacggtgtgtgtgtgtgtgcgcgcgcgcctgcctagagttaatgattaagtttgctgaagcccttcttcccggtcctaagctgcctgttgcgaaggcgctttcattgaattcagtttctcttaccgtcttaacttgttcataaactttttgagataggaatgggcagtttttctgtgtcacttaggatgattttttttttaatggcgtgataagtgaactgaatccagcaaagacgagtttctgttgtgcaacacgttggtatactgacagctaccacgtattgactgtgtactgtgtgctgggcactgtgctaaataaatgatttacgaattaatcgtgtttattgctcacaacagccttatgaagtaggtattatcttcactttacagatgaggacacctgaggttcagattaagaaatctgccccaaagtcttagaactggtaagtagaagcaccatatctaggcaaacctgtctaccttcaaaaaaaatgggcactctgataggacaattaacgataataaagttgtaatttttttttttttttttgagataggaatgggcagtttttctgtgtcacttaggatgatttttttttttaatggcgtgataagtgaactgaatccagcaaagacgagtttctg

SEQ ID NO: 419642 - DNA, 2654 bp, Homo sapiens
  misc_feature (55)..(55): n is a, c, g, or t
  misc_feature (2191)..(2192): n is a, c, g, or t
  misc_feature (2231)..(2231): n is a, c, g, or t
  misc_feature (2253)..(2253): n is a, c, g, or t
cagcatcatgtaagatgtgcctgctcccccttccgccatgattgtaagtttcccnaggcctcctcagccatgtggaactatgagaaaactgaagataagaaaaattctgcagcttgcctagaatatggctgctagcaaatgttgtaaaggaactcagatctgcccattcccagagcctgaggtcttaatctattctgctgacttaaattctgtatcatgagtttcacaacctgaagcttgggaactcctgtggagccctggagtgatgtttaaggaatacttcagtgagctgtacacactacaactcccatattgcattttagtttttaaaaatagtttctttaaaataaatgcaagaggggtctctgaacaatatgctcaggtctccaaactggctgaatttaccacggactatttttctagcatttggattttaacagaagcagagcaaagttgggatgaccacacccttcctgggcttcaaggactttaaaaatgtcctggctgccccagaagttggagagctctacatttcagcgttggtggtattctccactggttgaatgcaaatggaagccagaggaaaagggaacccttgacacagttttcatatagattggcctccagggcagacagcagattccaagaaccaggaggttgtttgctgtactctcccttgtacagttagctgtctctagtgcctgaatgcactaattgtcctttgggtatggatgaggtaatgaaggaaagggatgctgggaagagaggccacatgagaaggctgcagcaaactaagtgttgcttgctaaagaaaaatgaaagctggaatttcagcagggaagaaagtatatgccccaccgtgatgagtacaaacacacagcatcagggaagccacacagaatgaagctctgagaagactgttagcattttccctccacgccccaggggaaaaggttggttctctaacttgatgtatacaaattttctgagaagattatttaaaaagtagtttccacccaatccaaggattccgattcagcagggctgaggtactccgaagcagggtatggattctgctttcatcttccaatgcaagcctgtttccacagggttgagatctggcatggacaatttcagcctgaaacgattacttttggaaatttgcagatattgttaacttcttagtcctttgaagaaaaatcaaattttttcttaagaagagacttttgaaactcacaatatgaattcaagaagcaaaaaagaaaatcgaatttcacaaatgggataccaatagcttggaaaaatccattgcttttgcagggtttgttattgagggaaccctgcctttcccagcatccttaacatttcttcctcaaataaaagaggcacattgatttgaatagttaaagatttgtctcatttccttgccaaggaggattatgtttccagctttttgttaattctgggcatttcaaccactgcttctgataacatcctgctttactgtgctaggcattccttggacccaggactggggagtggggtttaatctggactgaattggaggaaaggaactggcaccagagtggaggctggaaggatggtggaactgacactgggacagaacacagaaaacagaatctaatgctattgctctggctatatcaaataaaagtgtcaagagtgagcatccttgccttgtgctgaatcacaaaggaatacctttcagtttttctccattgattatgatagcagtgggcttttcacagtgggctttactgtgttgaggtaccctaatgacaagttcaccccagtgttttctgaggagtctacctggaaatgagaaccatctgtccttcctatagtagttcttctcagaatgccgactctatgctaatggtgtagttattattcaatttataatttggcatcctaccatatatataatttaacatctactcttttaaccagcttaggacttgtcaacccactgcttgttctgtgttccacactggtattcaaagatgtgaaagcaagaagaaggctaggatgagcaacacaacagaataactcaagcaacagagcaattctgaaacacaaggaaaaaggacttactcatacttccctcatggattatctgagaattgaatgaaaacaatcagtaatgtattcaattcataacaaatgtcannagtgaaaagaacagagaactgacaaaagctaaaactacncaaagtgagatttgctcatgcnttatgtaaacaggaaaaaataaaatcctgggaatttgtatgggtaactgcactggctattgagagatcaaatgatatgcaccttcaggaactcttccagcaagagctactcagtgaggagacattcatcattagcacattcagaaattatagctctgatatgttttctgggtggccggatgcaaaggatcatccatagttatgaaaactcaagaacagggaagtcaattagtatatttataaatctgtattcctctcctgtcaaggaatctccctgtatatgaatgatagctgtgtccttgatttgagtaactctttttcctaatcaaaagaaactcaaatgaacaggcccatatgtcttatcagaacaaactatcctgtaataaaatggaaagaggtttt

SEQ ID NO: 419643 - DNA, 2234 bp, Homo sapiens
  misc_feature (55)..(55): n is a, c, g, or t
  misc_feature (2200)..(2200): n is a, c, g, or t
  misc_feature (2209)..(2209): n is a, c, g, or t
  misc_feature (2218)..(2218): n is a, c, g, or t
cagcatcatgtaagatgtgcctgctcccccttccgccatgattgtaagtttcccnaggcctcctcagccatgtggaactatgagaaaactgaagataagaaaaattctgcagcttgcctagaatatggctgctagcaaatgttgtaaaggaactcagatctgcccattcccagagcctgaggtcttaatctattctgctgacttaaattctgtatcatgagtttcacaacctgaagcttgggaactcctgtggagccctggagtgatgtttaaggaatacttcagtgagctgtacacactacaactcccatattgcattttagtttttaaaaatagtttctttaaaataaatgcaagaggggtctctgaacaatatgctcaggtctccaaactggctgaatttaccacggactatttttctagcatttggattttaacagaagcagagcaaagttgggatgaccacacccttcctgggcttcaaggactttaaaaatgtcctggctgccccagaagttggagagctctacatttcagcgttggtggtattctccactggttgaatgcaaatggaagccagaggaaaagggaacccttgacacagttttcatatagattggcctccagggcagacagcagattccaagaaccaggaggttgtttgctgtactctcccttgtacagttagctgtctctagtgcctgaatgcactaattgtcctttgggtatggatgaggtaatgaaggaaagggatgctgggaagagaggccacatgagaaggctgcagcaaactaagtgttgcttgctaaagaaaaatgaaagctggaatttcagcagggaagaaagtatatgccccaccgtgatgagtacaaacacacagcatcagggaagccacacagaatgaagctctgagaagactgttagcattttccctccacgccccaggggaaaaggttggttctctaacttgatgtatacaaattttctgagaagattatttaaaaagtagtttccacccaatccaaggattccgattcagcagggctgaggtactccgaagcagggtatggattctgctttcatcttccaatgcaagcctgtttccacagggttgagatctggcatggacaatttcagcctgaaacgattacttttggaaatttgcagtgagtggaaacagtcatgtagagctgtggatcttgctacctggatcaataacttcttctagttaagcttcttgccaaggaaaagcaaggaatatcaaatttcatagacctaatgaaccactggaaactgcttgcacccatgtgtgcaaggatcgctttttatgatttatacaaaccaaagcactcattggaataagaataatagctaacgtttatttatcatttattatcctggccactgtgccaagtatttatatacagtgagttatttaatccctgcaacaacccatgggagtggggtttaatctggactgaattggaggaaaggaactggcaccagagtggaggctggaaggatggtggaactgacactgggacagaacacagaaaacagaatctaatgctagaggaggtctgatggccgggaggacaggaagaaggaacccacaatgaagcaaaagttgcgtttaactctgtcctcaccattcctctcctggacctgtcctaaactggaagctgggggaggatggagtgctggaatgctgcagaagtctcatgggagggcgcctggtgttcaccacatgtgtacactgttgcacgaccagatggaaatttgaatgctggggctcagtggaacacctgaaggaagctggtgaggcagatgtcccgctatgccttccaagtgtcatgcaaccagttcatgcctgtcagcatctctgccggtggactctgtgagtcagcaaatctacagagcagagagccacaagtggggacagatgtggtcaaatgccatttaaatcagtgattctcaacccaggagttgtcatggcactggccttgagtgagctggaccaagggaagtggtagaattccccatgaaggaccaagtgagcagatagaagtttctccattttaactttttctgagtcaatttaaaaaacacctagtgcctttttctgtacatagtgcctgtgggtttaatttaagcctacccaaatgtgcttttatcccacctattttgaaccttgcatgtntccgggatnagaattaanataagctataaatatt

SEQ ID NO: 419644 - DNA, 2549 bp, Homo sapiens
  misc_feature (2086)..(2087): n is a, c, g, or t
  misc_feature (2126)..(2126): n is a, c, g, or t
  misc_feature (2148)..(2148): n is a, c, g, or t
gcacatgcgcagaatcatcgtggtgcagggctctccctttgcttcttcggttgcagtcctcttgcttcttgcgcgtgcgtgtagcgcttttgcaaagccgcggaggtgaagtgaacttagaggttgtggggccgaggggtcgtcttatagctaccagcccacaggcatttagtctacgttggaggtaaacaaatacgggtcctgcttaggagaaaagaaaaacgtcttacagccagtgtctaaactccaaacaacggaatgtatcaatgagaccttgtatatggatacacgtgcatttaaaaccgccctgccggcttgtagagcttttgccgttctccagcgctttacaggggttatcgcacttaagcctcggaacaactttaccagatgaggacacctgaggttcagattaagaaatctgccccaaagtcttagaactggtattctccactggttgaatgcaaatggaagccagaggaaaagggaacccttgacacagttttcatatagattggcctccagggcagacagcagattccaagaaccaggaggttgtttgctgtactctcccttgtacagttagctgtctctagtgcctgaatgcactaattgtcctttgggtatggatgaggtaatgaaggaaagggatgctgggaagagaggccacatgagaaggctgcagcaaactaagtgttgcttgctaaagaaaaatgaaagctggaatttcagcagggaagaaagtatatgccccaccgtgatgagtacaaacacacagcatcagggaagccacacagaatgaagctctgagaagactgttagcattttccctccacgccccaggggaaaaggttggttctctaacttgatgtatacaaattttctgagaagattatttaaaaagtagtttccacccaatccaaggattccgattcagcagggctgaggtactccgaagcagggtatggattctgctttcatcttccaatgcaagcctgtttccacagggttgagatctggcatggacaatttcagcctgaaacgattacttttggaaatttgcagatattgttaacttcttagtcctttgaagaaaaatcaaattttttcttaagaagagacttttgaaactcacaatatgaattcaagaagcaaaaaagaaaatcgaatttcacaaatgggataccaatagcttggaaaaatccattgcttttgcagggtttgttattgagggaaccctgcctttcccagcatccttaacatttcttcctcaaataaaagaggcacattgatttgaatagttaaagatttgtctcatttccttgccaaggaggattatgtttccagctttttgttaattctgggcatttcaaccactgcttctgataacatcctgctttactgtgctaggcattccttggacccaggactggggagtggggtttaatctggactgaattggaggaaaggaactggcaccagagtggaggctggaaggatggtggaactgacactgggacagaacacagaaaacagaatctaatgctattgctctggctatatcaaataaaagtgtcaagagtgagcatccttgccttgtgctgaatcacaaaggaatacctttcagtttttctccattgattatgatagcagtgggcttttcacagtgggctttactgtgttgaggtaccctaatgacaagttcaccccagtgttttctgaggagtctacctggaaatgagaaccatctgtccttcctatagtagttcttctcagaatgccgactctatgctaatggtgtagttattattcaatttataatttggcatcctaccatatatataatttaacatctactcttttaaccagcttaggacttgtcaacccactgcttgttctgtgttccacactggtattcaaagatgtgaaagcaagaagaaggctaggatgagcaacacaacagaataactcaagcaacagagcaattctgaaacacaaggaaaaaggacttactcatacttccctcatggattatctgagaattgaatgaaaacaatcagtaatgtattcaattcataacaaatgtcannagtgaaaagaacagagaactgacaaaagctaaaactacncaaagtgagatttgctcatgcnttatgtaaacaggaaaaaataaaatcctgggaatttgtatgggtaactgcactggctattgagagatcaaatgatatgcaccttcaggaactcttccagcaagagctactcagtgaggagacattcatcattagcacattcagaaattatagctctgatatgttttctgggtggccggatgcaaaggatcatccatagttatgaaaactcaagaacagggaagtcaattagtatatttataaatctgtattcctctcctgtcaaggaatctccctgtatatgaatgatagctgtgtccttgatttgagtaactctttttcctaatcaaaagaaactcaaatgaacaggcccatatgtcttatcagaacaaactatcctgtaataaaatggaaagaggtttt

SEQ ID NO: 419645 - DNA, 2968 bp, Homo sapiens
  misc_feature (55)..(55): n is a, c, g, or t
cagcatcatgtaagatgtgcctgctcccccttccgccatgattgtaagtttcccnaggcctcctcagccatgtggaactatgagaaaactgaagataagaaaaattctgcagcttgcctagaatatggctgctagcaaatgttgtaaaggaactcagatctgcccattcccagagcctgaggtcttaatctattctgctgacttaaattctgtatcatgagtttcacaacctgaagcttgggaactcctgtggagccctggagtgatgtttaaggaatacttcagtgagctgtacacactacaactcccatattgcattttagtttttaaaaatagtttctttaaaataaatgcaagaggggtctctgaacaatatgctcaggtctccaaactggctgaatttaccacggactatttttctagcatttggattttaacagaagcagagcaaagttgggatgaccacacccttcctgggcttcaaggactttaaaaatgtcctggctgccccagaagttggagagctctacatttcagcgttggtggtattctccactggttgaatgcaaatggaagccagaggaaaagggaacccttgacacagttttcatatagattggcctccagggcagacagcagattccaagaaccaggaggttgtttgctgtactctcccttgtacagttagctgtctctagtgcctgaatgcactaattgtcctttgggtatggatgaggtaatgaaggaaagggatgctgggaagagaggccacatgagaagtggttctctaacttgatgtatacaaattttctgagaagattatttaaaaagtagtttccacccaatccaaggattccgattcagcagggctgaggtactccgaagcagggtatggattctgctttcatcttccaatgcaagcctgtttccacagggttgagatctggcatggacaatttcagcctgaaacgattacttttggaaatttgcagtgagtggaaacagtcatgtagagctgtggatcttgctacctggatcaataacttcttctagttaagcttcttgccaaggaaaagcaaggaatatcaaatttcatagacctaatgaaccactggaaactgcttgcacccatgtgtgcaaggatcgctttttatgatttatacaaaccaaagcactcattggaataagaataatagctaacgtttatttatcatttattatcctggccactgtgccaagtatttatatacagtgagttatttaatccctgcaacaacccatgggtaggtactattatttttccttctttatagataagaacattgaggcacaaaaatgctaaattacagagtgggatcaatgtgttgctcgcttagaaaatgagtcaagttccatatgtgtgagtaaatgtgaacattcccacttccttgtcacttggttttctttctcaagtttggtgtgtttgctctgtgttcacaggatattgttaacttcttagtcctttgaagaaaaatcaaattttttcttaagaagagacttttgaaactcacaatatgaattcaagaagcaaaaaagaaaatcgaatttcacaaatgggataccaatagcttggaaaaatccattgcttttgcagggtttgttattgagggaaccctgcctttcccagcatccttaacatttcttcctcaaataaaagaggcacattgatttgaatagttaaagatttgtctcatttccttgccaaggaggattatgtttccagctttttgttaattctgggcatttcaaccactgcttctgataacatcctgctttactgtgctaggcattccttggacccaggactggggagtggggtttaatctggactgaattggaggaaaggaactggcaccagagtggaggctggaaggatggtggaactgacactgggacagaacacagaaaacagaatctaatgctattgctctggctatatcaaataaaagtgtcaagagtgagcatccttgccttgtgctgaatcacaaaggaatacctttcagtttttctccattgattatgatagcagtgggcttttcacagtgggctttactgtgttgaggaggaggtctgatggccgggaggacaggaagaaggaacccacaatgaagcaaaagttgcgtttaactctgtcctcaccattcctctcctggacctgtcctaaactggaagctgggggaggatggagtgctggaatgctgcagaagtctcatgggagggcgcctggtgttcaccacatgtgtacactgttgcacgaccaggaaccttcagaaagggcagaaaggaagtttacttctgcctctacaatggatttgcctactttagacatgttttcaagatttatccacgtcatggcatataccagaacttcatttcttttatgattgaataatattacatggttttaatatactatattttgtttatctgttcatcaattaataaatctttgggttgttttcacttttaggctataataattaacgctgttaggaatatttacttgtaagtttttgttatatgtttttaattctcctgggtagatacttagggataaaattgctgaattagattgtaactttatgtttagaaactgcccaactgttttccaaagtaactatcattttaatatttcaccagcattgtatgacagttctggtctttccttatttaaactaatacttaattattgccttttattgtagctatcctagtagatatgaagtgttatctcattatggttttgatttgcattctctaatgactaataatatcaagcatcttttcatgtgtatacaagatatttgtatatcttctttagagaaatgtctactcaaatcctgtgcctatgttttaattggataatttatgtttttattgttgagttgtaatagtttttaaatatattctggatcctagacctttaaca

SEQ ID NO: 419646 - DNA, 2457 bp, Homo sapiens
  misc_feature (269)..(269): n is a, c, g, or t
  misc_feature (1994)..(1995): n is a, c, g, or t
  misc_feature (2034)..(2034): n is a, c, g, or t
  misc_feature (2056)..(2056): n is a, c, g, or t
cttccaaaccaacatgtgtgaaacataatggagtctcactctgttacccagactggagtgcagtggcatgatctcggctctacaacctccgcctcccaggttcagattatttggaaatttccagctttgtgcactagacagaagacctttgacctctgggatgacagcataaaggcgagggtagatttctaaagaaaaggatctgtgaacatttaggaaagcaagcagtggtcaccaggaatttgtgtggattgctgataaagaagtcnttctgcactaacttcatctcttctttggcattatggctcatctgataaataaatgcaatagacatatctttggatttcagtattctccactggttgaatgcaaatggaagccagaggaaaagggaacccttgacacagttttcatatagattggcctccagggcagacagcagattccaagaaccaggaggttgtttgctgtactctcccttgtacagttagctgtctctagtgcctgaatgcactaattgtcctttgggtatggatgaggtaatgaaggaaagggatgctgggaagagaggccacatgagaaggctgcagcaaactaagtgttgcttgctaaagaaaaatgaaagctggaatttcagcagggaagaaagtatatgccccaccgtgatgagtacaaacacacagcatcagggaagccacacagaatgaagctctgagaagactgttagcattttccctccacgccccaggggaaaaggttggttctctaacttgatgtatacaaattttctgagaagattatttaaaaagtagtttccacccaatccaaggattccgattcagcagggctgaggtactccgaagcagggtatggattctgctttcatcttccaatgcaagcctgtttccacagggttgagatctggcatggacaatttcagcctgaaacgattacttttggaaatttgcagatattgttaacttcttagtcctttgaagaaaaatcaaattttttcttaagaagagacttttgaaactcacaatatgaattcaagaagcaaaaaagaaaatcgaatttcacaaatgggataccaatagcttggaaaaatccattgcttttgcagggtttgttattgagggaaccctgcctttcccagcatccttaacatttcttcctcaaataaaagaggcacattgatttgaatagttaaagatttgtctcatttccttgccaaggaggattatgtttccagctttttgttaattctgggcatttcaaccactgcttctgataacatcctgctttactgtgctaggcattccttggacccaggactggggagtggggtttaatctggactgaattggaggaaaggaactggcaccagagtggaggctggaaggatggtggaactgacactgggacagaacacagaaaacagaatctaatgctattgctctggctatatcaaataaaagtgtcaagagtgagcatccttgccttgtgctgaatcacaaaggaatacctttcagtttttctccattgattatgatagcagtgggcttttcacagtgggctttactgtgttgaggtaccctaatgacaagttcaccccagtgttttctgaggagtctacctggaaatgagaaccatctgtccttcctatagtagttcttctcagaatgccgactctatgctaatggtgtagttattattcaatttataatttggcatcctaccatatatataatttaacatctactcttttaaccagcttaggacttgtcaacccactgcttgttctgtgttccacactggtattcaaagatgtgaaagcaagaagaaggctaggatgagcaacacaacagaataactcaagcaacagagcaattctgaaacacaaggaaaaaggacttactcatacttccctcatggattatctgagaattgaatgaaaacaatcagtaatgtattcaattcataacaaatgtcannagtgaaaagaacagagaactgacaaaagctaaaactacncaaagtgagatttgctcatgcnttatgtaaacaggaaaaaataaaatcctgggaatttgtatgggtaactgcactggctattgagagatcaaatgatatgcaccttcaggaactcttccagcaagagctactcagtgaggagacattcatcattagcacattcagaaattatagctctgatatgttttctgggtggccggatgcaaaggatcatccatagttatgaaaactcaagaacagggaagtcaattagtatatttataaatctgtattcctctcctgtcaaggaatctccctgtatatgaatgatagctgtgtccttgatttgagtaactctttttcctaatcaaaagaaactcaaatgaacaggcccatatgtcttatcagaacaaactatcctgtaataaaatggaaagaggtttt

SEQ ID NO: 419647 - DNA, 2496 bp, Homo sapiens
  misc_feature (2033)..(2034): n is a, c, g, or t
  misc_feature (2073)..(2073): n is a, c, g, or t
  misc_feature (2095)..(2095): n is a, c, g, or t
gcacatgcgcagaatcatcgtggtgcagggctctccctttgcttcttcggttgcagtcctcttgcttcttgcgcgtgcgtgtagcgcttttgcaaagccgcggaggtgaagtgaacttagaggttgtggggccgaggggtcgtcttatagctaccagcccacaggcatttagtctacgttggaggtaaacaaatacgggtcctgcttaggagaaaagaaaaacgtcttacagccagtgtctaaactccaaacaacggaatgtatcaatgagaccttgtatatggatacacgtgcatttaaaaccgccctgccggcttgtagagcttttgccgttctccagcgctttacaggggttatcgcacttaagcctcggaacaactttaccaggtattctccactggttgaatgcaaatggaagccagaggaaaagggaacccttgacacagttttcatatagattggcctccagggcagacagcagattccaagaaccaggaggttgtttgctgtactctcccttgtacagttagctgtctctagtgcctgaatgcactaattgtcctttgggtatggatgaggtaatgaaggaaagggatgctgggaagagaggccacatgagaaggctgcagcaaactaagtgttgcttgctaaagaaaaatgaaagctggaatttcagcagggaagaaagtatatgccccaccgtgatgagtacaaacacacagcatcagggaagccacacagaatgaagctctgagaagactgttagcattttccctccacgccccaggggaaaaggttggttctctaacttgatgtatacaaattttctgagaagattatttaaaaagtagtttccacccaatccaaggattccgattcagcagggctgaggtactccgaagcagggtatggattctgctttcatcttccaatgcaagcctgtttccacagggttgagatctggcatggacaatttcagcctgaaacgattacttttggaaatttgcagatattgttaacttcttagtcctttgaagaaaaatcaaattttttcttaagaagagacttttgaaactcacaatatgaattcaagaagcaaaaaagaaaatcgaatttcacaaatgggataccaatagcttggaaaaatccattgcttttgcagggtttgttattgagggaaccctgcctttcccagcatccttaacatttcttcctcaaataaaagaggcacattgatttgaatagttaaagatttgtctcatttccttgccaaggaggattatgtttccagctttttgttaattctgggcatttcaaccactgcttctgataacatcctgctttactgtgctaggcattccttggacccaggactggggagtggggtttaatctggactgaattggaggaaaggaactggcaccagagtggaggctggaaggatggtggaactgacactgggacagaacacagaaaacagaatctaatgctattgctctggctatatcaaataaaagtgtcaagagtgagcatccttgccttgtgctgaatcacaaaggaatacctttcagtttttctccattgattatgatagcagtgggcttttcacagtgggctttactgtgttgaggtaccctaatgacaagttcaccccagtgttttctgaggagtctacctggaaatgagaaccatctgtccttcctatagtagttcttctcagaatgccgactctatgctaatggtgtagttattattcaatttataatttggcatcctaccatatatataatttaacatctactcttttaaccagcttaggacttgtcaacccactgcttgttctgtgttccacactggtattcaaagatgtgaaagcaagaagaaggctaggatgagcaacacaacagaataactcaagcaacagagcaattctgaaacacaaggaaaaaggacttactcatacttccctcatggattatctgagaattgaatgaaaacaatcagtaatgtattcaattcataacaaatgtcannagtgaaaagaacagagaactgacaaaagctaaaactacncaaagtgagatttgctcatgcnttatgtaaacaggaaaaaataaaatcctgggaatttgtatgggtaactgcactggctattgagagatcaaatgatatgcaccttcaggaactcttccagcaagagctactcagtgaggagacattcatcattagcacattcagaaattatagctctgatatgttttctgggtggccggatgcaaaggatcatccatagttatgaaaactcaagaacagggaagtcaattagtatatttataaatctgtattcctctcctgtcaaggaatctccctgtatatgaatgatagctgtgtccttgatttgagtaactctttttcctaatcaaaagaaactcaaatgaacaggcccatatgtcttatcagaacaaactatcctgtaataaaatggaaagaggtttt

SEQ ID NO: 419648 - DNA, 2880 bp, Homo sapiens
  misc_feature (55)..(55): n is a, c, g, or t
cagcatcatgtaagatgtgcctgctcccccttccgccatgattgtaagtttcccnaggcctcctcagccatgtggaactatgagaaaactgaagataagaaaaattctgcagcttgcctagaatatggctgctagcaaatgttgtaaaggaactcagatctgcccattcccagagcctgaggtcttaatctattctgctgacttaaattctgtatcatgagtttcacaacctgaagcttgggaactcctgtggagccctggagtgatgtttaaggaatacttcagtgagctgtacacactacaactcccatattgcattttagtttttaaaaatagtttctttaaaataaatgcaagaggggtctctgaacaatatgctcaggtctccaaactggctgaatttaccacggactatttttctagcatttggattttaacagaagcagagcaaagttgggatgaccacacccttcctgggcttcaaggactttaaaaatgtcctggctgccccagaagttggagagctctacatttcagcgttggtggtattctccactggttgaatgcaaatggaagccagaggaaaagggaacccttgacacagttttcatatagattggcctccagggcagacagcagattccaagaaccaggaggttgtttgctgtactctcccttgtacagttagctgtctctagtgcctgaatgcactaattgtcctttgggtatggatgaggtaatgaaggaaagggatgctgggaagagaggccacatgagaagtggttctctaacttgatgtatacaaattttctgagaagattatttaaaaagtagtttccacccaatccaaggattccgattcagcagggctgaggtactccgaagcagggtatggattctgctttcatcttccaatgcaagcctgtttccacagggttgagatctggcatggacaatttcagcctgaaacgattacttttggaaatttgcagtgagtggaaacagtcatgtagagctgtggatcttgctacctggatcaataacttcttctagttaagcttcttgccaaggaaaagcaaggaatatcaaatttcatagacctaatgaaccactggaaactgcttgcacccatgtgtgcaaggatcgctttttatgatttatacaaaccaaagcactcattggaataagaataatagctaacgtttatttatcatttattatcctggccactgtgccaagtatttatatacagtgagttatttaatccctgcaacaacccatgggtaggtactattatttttccttctttatagataagaacattgaggcacaaaaatgctaaattacagagtgggatcaatgtgttgctcgcttagaaaatgagtcaagttccatatgtgtgagtaaatgtgaacattcccacttccttgtcacttggttttctttctcaagtttggtgtgtttgctctgtgttcacaggatattgttaacttcttagtcctttgaagaaaaatcaaattttttcttaagaagagacttttgaaactcacaatatgaattcaagaagcaaaaaagaaaatcgaatttcacaaatgggataccaatagcttggaaaaatccattgcttttgcagggtttgttattgagggaaccctgcctttcccagcatccttaacatttcttcctcaaataaaagaggcacattgatttgaatagttaaagatttgtctcatttccttgccaaggaggattatgtttccagctttttgttaattctgggcatttcaaccactgcttctgataacatcctgctttactgtgctaggcattccttggacccaggactggggagtggggtttaatctggactgaattggaggaaaggaactggcaccagagtggaggctggaaggatggtggaactgacactgggacagaacacagaaaacagaatctaatgctattgctctggctatatcaaataaaagtgtcaagagtgagcatccttgccttgtgctgaatcacaaaggaatacctttcagtttttctccattgattatgatagcagtgggcttttcacagtgggctttactgtgttgaggtaccctaatgacaagttcaccccagtgttttctgaggagtctacctggaaatgagaaccatctgtccttcctatagtagttcttctcagaatgccgactctatgctaatggaaccttcagaaagggcagaaaggaagtttacttctgcctctacaatggatttgcctactttagacatgttttcaagatttatccacgtcatggcatataccagaacttcatttcttttatgattgaataatattacatggttttaatatactatattttgtttatctgttcatcaattaataaatctttgggttgttttcacttttaggctataataattaacgctgttaggaatatttacttgtaagtttttgttatatgtttttaattctcctgggtagatacttagggataaaattgctgaattagattgtaactttatgtttagaaactgcccaactgttttccaaagtaactatcattttaatatttcaccagcattgtatgacagttctggtctttccttatttaaactaatacttaattattgccttttattgtagctatcctagtagatatgaagtgttatctcattatggttttgatttgcattctctaatgactaataatatcaagcatcttttcatgtgtatacaagatatttgtatatcttctttagagaaatgtctactcaaatcctgtgcctatgttttaattggataatttatgtttttattgttgagttgtaatagtttttaaatatattctggatcctagacctttaaca

SEQ ID NO: 419649 - DNA, 2206 bp, Homo sapiens
  misc_feature (1743)..(1744): n is a, c, g, or t
  misc_feature (1783)..(1783): n is a, c, g, or t
  misc_feature (1805)..(1805): n is a, c, g, or t
ccaaagaaaaattatccttatcagtgatgtctgcctggtggctggtgaatggtaaaaactggcaggagagaccaatccgatgggaaatcaagttcaggtattctccactggttgaatgcaaatggaagccagaggaaaagggaacccttgacacagttttcatatagattggcctccagggcagacagcagattccaagaaccaggaggttgtttgctgtactctcccttgtacagttagctgtctctagtgcctgaatgcactaattgtcctttgggtatggatgaggtaatgaaggaaagggatgctgggaagagaggccacatgagaaggctgcagcaaactaagtgttgcttgctaaagaaaaatgaaagctggaatttcagcagggaagaaagtatatgccccaccgtgatgagtacaaacacacagcatcagggaagccacacagaatgaagctctgagaagactgttagcattttccctccacgccccaggggaaaaggttggttctctaacttgatgtatacaaattttctgagaagattatttaaaaagtagtttccacccaatccaaggattccgattcagcagggctgaggtactccgaagcagggtatggattctgctttcatcttccaatgcaagcctgtttccacagggttgagatctggcatggacaatttcagcctgaaacgattacttttggaaatttgcagatattgttaacttcttagtcctttgaagaaaaatcaaattttttcttaagaagagacttttgaaactcacaatatgaattcaagaagcaaaaaagaaaatcgaatttcacaaatgggataccaatagcttggaaaaatccattgcttttgcagggtttgttattgagggaaccctgcctttcccagcatccttaacatttcttcctcaaataaaagaggcacattgatttgaatagttaaagatttgtctcatttccttgccaaggaggattatgtttccagctttttgttaattctgggcatttcaaccactgcttctgataacatcctgctttactgtgctaggcattccttggacccaggactggggagtggggtttaatctggactgaattggaggaaaggaactggcaccagagtggaggctggaaggatggtggaactgacactgggacagaacacagaaaacagaatctaatgctattgctctggctatatcaaataaaagtgtcaagagtgagcatccttgccttgtgctgaatcacaaaggaatacctttcagtttttctccattgattatgatagcagtgggcttttcacagtgggctttactgtgttgaggtaccctaatgacaagttcaccccagtgttttctgaggagtctacctggaaatgagaaccatctgtccttcctatagtagttcttctcagaatgccgactctatgctaatggtgtagttattattcaatttataatttggcatcctaccatatatataatttaacatctactcttttaaccagcttaggacttgtcaacccactgcttgttctgtgttccacactggtattcaaagatgtgaaagcaagaagaaggctaggatgagcaacacaacagaataactcaagcaacagagcaattctgaaacacaaggaaaaaggacttactcatacttccctcatggattatctgagaattgaatgaaaacaatcagtaatgtattcaattcataacaaatgtcannagtgaaaagaacagagaactgacaaaagctaaaactacncaaagtgagatttgctcatgcnttatgtaaacaggaaaaaataaaatcctgggaatttgtatgggtaactgcactggctattgagagatcaaatgatatgcaccttcaggaactcttccagcaagagctactcagtgaggagacattcatcattagcacattcagaaattatagctctgatatgttttctgggtggccggatgcaaaggatcatccatagttatgaaaactcaagaacagggaagtcaattagtatatttataaatctgtattcctctcctgtcaaggaatctccctgtatatgaatgatagctgtgtccttgatttgagtaactctttttcctaatcaaaagaaactcaaatgaacaggcccatatgtcttatcagaacaaactatcctgtaataaaatggaaagaggtttt

SEQ ID NO: 419650 - DNA, 1944 bp, Homo sapiens
  misc_feature (55)..(55): n is a, c, g, or t
  misc_feature (1944)..(1944): n is a, c, g, or t
cagcatcatgtaagatgtgcctgctcccccttccgccatgattgtaagtttcccnaggcctcctcagccatgtggaactatgagaaaactgaagataagaaaaattctgcagcttgcctagaatatggctgctagcaaatgttgtaaaggaactcagatctgcccattcccagagcctgaggtcttaatctattctgctgacttaaattctgtatcatgagtttcacaacctgaagcttgggaactcctgtggagccctggagtgatgtttaaggaatacttcagtgagctgtacacactacaactcccatattgcattttagtttttaaaaatagtttctttaaaataaatgcaagaggggtctctgaacaatatgctcaggtctccaaactggctgaatttaccacggactatttttctagcatttggattttaacagaagcagagcaaagttgggatgaccacacccttcctgggcttcaaggactttaaaaatgtcctggctgccccagaagttggagagctctacatttcagcgttggtggtattctccactggttgaatgcaaatggaagccagaggaaaagggaacccttgacacagttttcatatagattggcctccagggcagacagcagattccaagaaccaggaggttgtttgctgtactctcccttgtacagttagctgtctctagtgcctgaatgcactaattgtcctttgggtatggatgaggtaatgaaggaaagggatgctgggaagagaggccacatgagaagtggttctctaacttgatgtatacaaattttctgagaagattatttaaaaagtagtttccacccaatccaaggattccgattcagcagggctgaggtactccgaagcagggtatggattctgctttcatcttccaatgcaagcctgtttccacagggttgagatctggcatggacaatttcagcctgaaacgattacttttggaaatttgcagtgagtggaaacagtcatgtagagctgtggatcttgctacctggatcaataacttcttctagttaagcttcttgccaaggaaaagcaaggaatatcaaatttcatagacctaatgaaccactggaaactgcttgcacccatgtgtgcaaggatcgctttttatgatttatacaaaccaaagcactcattggaataagaataatagctaacgtttatttatcatttattatcctggccactgtgccaagtatttatatacagtgagttatttaatccctgcaacaacccatgggtaggtactattatttttccttctttatagataagaacattgaggcacaaaaatgctaaattacagagtgggatcaatgtgttgctcgcttagaaaatgagtcaagttccatatgtgtgagtaaatgtgaacattcccacttccttgtcacttggttttctttctcaagtttggtgtgtttgctctgtgttcacaggatattgttaacttcttagtcctttgaagaaaaatcaaattttttcttaagaagagacttttgaaactcacaatatgaattcaagaagcaaaaaagaaaatcgaatttcacaaatgggataccaatagcttggaaaaatccattgcttttgcagggtttgttattgagggaaccctgcctttcccagcatccttaacatttcttcctcaaataaaaggtaataaaatgcaaccaactgactcattttctaagtgaatgacatatttactctactctttaagtttaaactctaagcaattccccaatccttagttcccatgaaatgtaatgttctcttcctaaaatgtttggccaagttggggaaggtgggcatggcagtgtgagcctgtagccaggttccaaggttcgcttgaggttaggaggttgagactagcctgggcaatatggcaagactctgtatccacn

SEQ ID NO: 419651 - DNA, 2136 bp, Homo sapiens
  misc_feature (1673)..(1674): n is a, c, g, or t
  misc_feature (1713)..(1713): n is a, c, g, or t
  misc_feature (1735)..(1735): n is a, c, g, or t
cttccaaaccaacatgtgtgaaacatagtattctccactggttgaatgcaaatggaagccagaggaaaagggaacccttgacacagttttcatatagattggcctccagggcagacagcagattccaagaaccaggaggttgtttgctgtactctcccttgtacagttagctgtctctagtgcctgaatgcactaattgtcctttgggtatggatgaggtaatgaaggaaagggatgctgggaagagaggccacatgagaaggctgcagcaaactaagtgttgcttgctaaagaaaaatgaaagctggaatttcagcagggaagaaagtatatgccccaccgtgatgagtacaaacacacagcatcagggaagccacacagaatgaagctctgagaagactgttagcattttccctccacgccccaggggaaaaggttggttctctaacttgatgtatacaaattttctgagaagattatttaaaaagtagtttccacccaatccaaggattccgattcagcagggctgaggtactccgaagcagggtatggattctgctttcatcttccaatgcaagcctgtttccacagggttgagatctggcatggacaatttcagcctgaaacgattacttttggaaatttgcagatattgttaacttcttagtcctttgaagaaaaatcaaattttttcttaagaagagacttttgaaactcacaatatgaattcaagaagcaaaaaagaaaatcgaatttcacaaatgggataccaatagcttggaaaaatccattgcttttgcagggtttgttattgagggaaccctgcctttcccagcatccttaacatttcttcctcaaataaaagaggcacattgatttgaatagttaaagatttgtctcatttccttgccaaggaggattatgtttccagctttttgttaattctgggcatttcaaccactgcttctgataacatcctgctttactgtgctaggcattccttggacccaggactggggagtggggtttaatctggactgaattggaggaaaggaactggcaccagagtggaggctggaaggatggtggaactgacactgggacagaacacagaaaacagaatctaatgctattgctctggctatatcaaataaaagtgtcaagagtgagcatccttgccttgtgctgaatcacaaaggaatacctttcagtttttctccattgattatgatagcagtgggcttttcacagtgggctttactgtgttgaggtaccctaatgacaagttcaccccagtgttttctgaggagtctacctggaaatgagaaccatctgtccttcctatagtagttcttctcagaatgccgactctatgctaatggtgtagttattattcaatttataatttggcatcctaccatatatataatttaacatctactcttttaaccagcttaggacttgtcaacccactgcttgttctgtgttccacactggtattcaaagatgtgaaagcaagaagaaggctaggatgagcaacacaacagaataactcaagcaacagagcaattctgaaacacaaggaaaaaggacttactcatacttccctcatggattatctgagaattgaatgaaaacaatcagtaatgtattcaattcataacaaatgtcannagtgaaaagaacagagaactgacaaaagctaaaactacncaaagtgagatttgctcatgcnttatgtaaacaggaaaaaataaaatcctgggaatttgtatgggtaactgcactggctattgagagatcaaatgatatgcaccttcaggaactcttccagcaagagctactcagtgaggagacattcatcattagcacattcagaaattatagctctgatatgttttctgggtggccggatgcaaaggatcatccatagttatgaaaactcaagaacagggaagtcaattagtatatttataaatctgtattcctctcctgtcaaggaatctccctgtatatgaatgatagctgtgtccttgatttgagtaactctttttcctaatcaaaagaaactcaaatgaacaggcccatatgtcttatcagaacaaactatcctgtaataaaatggaaagaggtttt

SEQ ID NO: 419652 - DNA, 2569 bp, Homo sapiens
  misc_feature (55)..(55): n is a, c, g, or t
cagcatcatgtaagatgtgcctgctcccccttccgccatgattgtaagtttcccnaggcctcctcagccatgtggaactatgagaaaactgaagataagaaaaattctgcagcttgcctagaatatggctgctagcaaatgttgtaaaggaactcagatctgcccattcccagagcctgaggtcttaatctattctgctgacttaaattctgtatcatgagtttcacaacctgaagcttgggaactcctgtggagccctggagtgatgtttaaggaatacttcagtgagctgtacacactacaactcccatattgcattttagtttttaaaaatagtttctttaaaataaatgcaagaggggtctctgaacaatatgctcaggtctccaaactggctgaatttaccacggactatttttctagcatttggattttaacagaagcagagcaaagttgggatgaccacacccttcctgggcttcaaggactttaaaaatgtcctggctgccccagaagttggagagctctacatttcagcgttggtggtattctccactggttgaatgcaaatggaagccagaggaaaagggaacccttgacacagttttcatatagattggcctccagggcagacagcagattccaagaaccaggaggttgtttgctgtactctcccttgtacagttagctgtctctagtgcctgaatgcactaattgtcctttgggtatggatgaggtaatgaaggaaagggatgctgggaagagaggccacatgagaagtggttctctaacttgatgtatacaaattttctgagaagattatttaaaaagtagtttccacccaatccaaggattccgattcagcagggctgaggtactccgaagcagggtatggattctgctttcatcttccaatgcaagcctgtttccacagggttgagatctggcatggacaatttcagcctgaaacgattacttttggaaatttgcagtgagtggaaacagtcatgtagagctgtggatcttgctacctggatcaataacttcttctagttaagcttcttgccaaggaaaagcaaggaatatcaaatttcatagacctaatgaaccactggaaactgcttgcacccatgtgtgcaaggatcgctttttatgatttatacaaaccaaagcactcattggaataagaataatagctaacgtttatttatcatttattatcctggccactgtgccaagtatttatatacagtgagttatttaatccctgcaacaacccatgggtaggtactattatttttccttctttatagataagaacattgaggcacaaaaatgctaaattacagagtgggatcaatgtgttgctcgcttagaaaatgagtcaagttccatatgtgtgagtaaatgtgaacattcccacttccttgtcacttggttttctttctcaagtttggtgtgtttgctctgtgttcacaggatattgttaacttcttagtcctttgaagaaaaatcaaattttttcttaagaagagacttttgaaactcacaatatgaattcaagaagcaaaaaagaaaatcgaatttcacaaatgggataccaatagcttggaaaaatccattgcttttgcagggtttgttattgagggaaccctgcctttcccagcatccttaacatttcttcctcaaataaaagaggcacattgatttgaatagttaaagatttgtctcatttccttgccaaggaggattatgtttccagctttttgttaattctgggcatttcaaccactgcttctgataacatcctgctttactgtgctaggcattccttggacccaggactggggagtggggtttaatctggactgaattggaggaaaggaactggcaccagagtggaggctggaaggatggtggaactgacactgggacagaacacagaaaacagaatctaatgctattgctctggctatatcaaataaaagtgtcaagagtgagcatccttgccttgtgctgaatcacaaaggaatacctttcagtttttctccattgattatgatagcagtgggcttttcacagtgggctttactgtgttgaggtaccctaatgacaagttcaccccagtgttttctgaggagtctacctggaaatgagaaccatctgtccttcctatagtagttcttctcagaatgccgactctatgctaatgaacttatgatctggtggaaggacatgataactaatcaaataatcacaaatatgtatttcagagaaatgaggggcaaatgcactagctgccctatgtaagctctaagtctcatcatttcggggatcctctcctgtgatgcagctttgctagaaagaactaatatttgtatttttttgcaccatctgttctgctgtatcgtggtagaagtcatgtaggttcatatgagatctttcttccaagcaccttaatgttttgaagagataaaagcaagaagcaagctttcttacaattcatgaaaaagcccaatcaatatgcctcaagaaacaaagctgatgtataataaaaattattatccca

SEQ ID NO: 419653 - DNA, 2488 bp, Homo sapiens
  misc_feature (55)..(55): n is a, c, g, or t
  misc_feature (2149)..(2149): n is a, c, g, or t
cagcatcatgtaagatgtgcctgctcccccttccgccatgattgtaagtttcccnaggcctcctcagccatgtggaactatgagaaaactgaagataagaaaaattctgcagcttgcctagaatatggctgctagcaaatgttgtaaaggaactcagatctgcccattcccagagcctgaggtcttaatctattctgctgacttaaattctgtatcatgagtttcacaacctgaagcttgggaactcctgtggagccctggagtgatgtttaaggaatacttcagtgagctgtacacactacaactcccatattgcattttagtttttaaaaatagtttctttaaaataaatgcaagaggggtctctgaacaatatgctcaggtctccaaactggctgaatttaccacggactatttttctagcatttggattttaacagaagcagagcaaagttgggatgaccacacccttcctgggcttcaaggactttaaaaatgtcctggctgccccagaagttggagagctctacatttcagcgttggtggtattctccactggttgaatgcaaatggaagccagaggaaaagggaacccttgacacagttttcatatagattggcctccagggcagacagcagattccaagaaccaggaggttgtttgctgtactctcccttgtacagttagctgtctctagtgcctgaatgcactaattgtcctttgggtatggatgaggtaatgaaggaaagggatgctgggaagagaggccacatgagaagtggttctctaacttgatgtatacaaattttctgagaagattatttaaaaagtagtttccacccaatccaaggattccgattcagcagggctgaggtactccgaagcagggtatggattctgctttcatcttccaatgcaagcctgtttccacagggttgagatctggcatggacaatttcagcctgaaacgattacttttggaaatttgcagtgagtggaaacagtcatgtagagctgtggatcttgctacctggatcaataacttcttctagttaagcttcttgccaaggaaaagcaaggaatatcaaatttcatagacctaatgaaccactggaaactgcttgcacccatgtgtgcaaggatcgctttttatgatttatacaaaccaaagcactcattggaataagaataatagctaacgtttatttatcatttattatcctggccactgtgccaagtatttatatacagtgagttatttaatccctgcaacaacccatgggtaggtactattatttttccttctttatagataagaacattgaggcacaaaaatgctaaattacagagtgggatcaatgtgttgctcgcttagaaaatgagtcaagttccatatgtgtgagtaaatgtgaacattcccacttccttgtcacttggttttctttctcaagtttggtgtgtttgctctgtgttcacaggatattgttaacttcttagtcctttgaagaaaaatcaaattttttcttaagaagagacttttgaaactcacaatatgaattcaagaagcaaaaaagaaaatcgaatttcacaaatgggataccaatagcttggaaaaatccattgcttttgcagggtttgttattgagggaaccctgcctttcccagcatccttaacatttcttcctcaaataaaagaggcacattgatttgaatagttaaagatttgtctcatttccttgccaaggaggattatgtttccagctttttgttaattctgggcatttcaaccactgcttctgataacatcctgctttactgtgctaggcattccttggacccaggactggggagtggggtttaatctggactgaattggaggaaaggaactggcaccagagtggaggctggaaggatggtggaactgacactgggacagaacacagaaaacagaatctaatgctattgctctggctatatcaaataaaagtgtcaagagtgagcatccttgccttgtgctgaatcacaaaggaatacctttcagtttttctccattgattatgatagcagtgggcttttcacagtgggctttactgtgttgaggctggagtgcaatggcgtgatctcggctcactgcaacctctgccttcnggtttcaagcaattctcctgcctcagcctcctgagtagctgggattacaggcacccaccaccacgcctggctaatttttgtatttttagtagagacagggtttcaccgtgttgttcaggctggtctcgagctcctgacctcgtgatccgaccacctcagcctcctaaaatgctgggattacaggcgtgagccaccgcgccggccaaggcaatgatttttaatggtttttgggaagcagattttataatatattaaaggaggtgtgtgtgtgtgtgtgtgtgggtacgtaatacatacaaatatatccattcatcttttaataaactaggttcagcatcc

SEQ ID NO: 419654 - DNA, 1586 bp, Homo sapiens
gcacatgcgcagaatcatcgtggtgcagggctctccctttgcttcttcggttgcagtcctcttgcttcttgcgcgtgcgtgtagcgcttttgcaaagccgcggaggtgaagtgaacttagaggttgtggggccgaggggtcgtcttatagctaccagcccacaggcatttagtctacgttggaggtaaacaaatacgggtcctgcttaggagaaaagaaaaacgtcttacagccagtgtctaaactccaaacaacggaatgtatcaatgagaccttgtatatggatacacgtgcatttaaaaccgccctgccggcttgtagagcttttgccgttctccagcgctttacaggggttatcgcacttaagcctcggaacaactttaccagatgaggacacctgaggttcagattaagaaatctgccccaaagtcttagaactggtgctgcgttgccatctttaaagtcatcacactggaccacatcagtattgcaagctgcttgggtatcattaatgaagacaaagtgggattattattttctatgatttgggcttttgagtggggtttaatctggactgaattggaggaaaggaactggcaccagagtggaggctggaaggatggtggaactgacactgggacagaacacagaaaacagaatctaatgctattgctctggctatatcaaataaaagtgtcaagagtgagcatccttgccttgtgctgaatcacaaaggaatacctttcagtttttctccattgattatgatagcagtgggcttttcacagtgggctttactgtgttgaggtaccctaatgacaagttcaccccagtgttttctgaggagtctacctggaaatgagaaccatctgtccttcctatagtagttcttctcagaatgccgactctatgctaatggaaccttcagaaagggcagaaaggaagtttacttctgcctctacaatggatttgcctactttagacatgttttcaagatttatccacgtcatggcatataccagaacttcatttcttttatgattgaataatattacatggttttaatatactatattttgtttatctgttcatcaattaataaatctttgggttgttttcacttttaggctataataattaacgctgttaggaatatttacttgtaagtttttgttatatgtttttaattctcctgggtagatacttagggataaaattgctgaattagattgtaactttatgtttagaaactgcccaactgttttccaaagtaactatcattttaatatttcaccagcattgtatgacagttctggtctttccttatttaaactaatacttaattattgccttttattgtagctatcctagtagatatgaagtgttatctcattatggttttgatttgcattctctaatgactaataatatcaagcatcttttcatgtgtatacaagatatttgtatatcttctttagagaaatgtctactcaaatcctgtgcctatgttttaattggataatttatgtttttattgttgagttgtaatagtttttaaatatattctggatcctagacctttaaca

SEQ ID NO: 419655 - DNA, 2496 bp, Homo sapiens
  misc_feature (55)..(55): n is a, c, g, or t
cagcatcatgtaagatgtgcctgctcccccttccgccatgattgtaagtttcccnaggcctcctcagccatgtggaactatgagaaaactgaagataagaaaaattctgcagcttgcctagaatatggctgctagcaaatgttgtaaaggaactcagatctgcccattcccagagcctgaggtcttaatctattctgctgacttaaattctgtatcatgagtttcacaacctgaagcttgggaactcctgtggagccctggagtgatgtttaaggaatacttcagtgagctgtacacactacaactcccatattgcattttagtttttaaaaatagtttctttaaaataaatgcaagaggggtctctgaacaatatgctcaggtctccaaactggctgaatttaccacggactatttttctagcatttggattttaacagaagcagagcaaagttgggatgaccacacccttcctgggcttcaaggactttaaaaatgtcctggctgccccagaagttggagagctctacatttcagcgttggtggtattctccactggttgaatgcaaatggaagccagaggaaaagggaacccttgacacagttttcatatagattggcctccagggcagacagcagattccaagaaccaggaggttgtttgctgtactctcccttgtacagttagctgtctctagtgcctgaatgcactaattgtcctttgggtatggatgaggtaatgaaggaaagggatgctgggaagagaggccacatgagaagtggttctctaacttgatgtatacaaattttctgagaagattatttaaaaagtagtttccacccaatccaaggattccgattcagcagggctgaggtactccgaagcagggtatggattctgctttcatcttccaatgcaagcctgtttccacagggttgagatctggcatggacaatttcagcctgaaacgattacttttggaaatttgcagtgagtggaaacagtcatgtagagctgtggatcttgctacctggatcaataacttcttctagttaagcttcttgccaaggaaaagcaaggaatatcaaatttcatagacctaatgaaccactggaaactgcttgcacccatgtgtgcaaggatcgctttttatgatttatacaaaccaaagcactcattggaataagaataatagctaacgtttatttatcatttattatcctggccactgtgccaagtatttatatacagtgagttatttaatccctgcaacaacccatgggtaggtactattatttttccttctttatagataagaacattgaggcacaaaaatgctaaattacagagtgggatcaatgtgttgctcgcttagaaaatgagtcaagttccatatgtgtgagtaaatgtgaacattcccacttccttgtcacttggttttctttctcaagtttggtgtgtttgctctgtgttcacaggatattgttaacttcttagtcctttgaagaaaaatcaaattttttcttaagaagagacttttgaaactcacaatatgaattcaagaagcaaaaaagaaaatcgaatttcacaaatgggataccaatagcttggaaaaatccattgcttttgcagggtttgttattgagggaaccctgcctttcccagcatccttaacatttcttcctcaaataaaagaggcacattgatttgaatagttaaagatttgtctcatttccttgccaaggaggattatgtttccagctttttgttaattctgggcatttcaaccactgcttctgataacatcctgctttactgtgctaggcattccttggacccaggactggggagtggggtttaatctggactgaattggaggaaaggaactggcaccagagtggaggctggaaggatggtggaactgacactgggacagaacacagaaaacagaatctaatgctattgctctggctatatcaaataaaagtgtcaagagtgagcatccttgccttgtgctgaatcacaaaggaatacctttcagtttttctccattgattatgatagcagtgggcttttcacagtgggctttactgtgttgaggtaccctaatgacaagttcaccccagtgttttctgaggagtctacctggaaatgagaaccatctgtccttcctatagtagttcttctcagaatgccgactctatgctaatggaaagaagtgagatgatgatggctctgtctcagcagctctcggggggacctgcaggctggggaggcagcttctctctgcaatttggccgctcctggacttgttgcagccaggcttcaaagagaaaccaccgcttcctccccgagccccacgccagcctcagaggcagctgggcctattgaaacattcaagtttcacttcaggctactttaaacatttgctttattccaaaacagctaaacttggagttattttcaaatataggccatttttatgccccagtata

SEQ ID NO: 419656 - DNA, 2805 bp, Homo sapiens
  misc_feature (55)..(55): n is a, c, g, or t
  misc_feature (2316)..(2316): n is a, c, g, or t
  misc_feature (2318)..(2318): n is a, c, g, or t
cagcatcatgtaagatgtgcctgctcccccttccgccatgattgtaagtttcccnaggcctcctcagccatgtggaactatgagaaaactgaagataagaaaaattctgcagcttgcctagaatatggctgctagcaaatgttgtaaaggaactcagatctgcccattcccagagcctgaggtcttaatctattctgctgacttaaattctgtatcatgagtttcacaacctgaagcttgggaactcctgtggagccctggagtgatgtttaaggaatacttcagtgagctgtacacactacaactcccatattgcattttagtttttaaaaatagtttctttaaaataaatgcaagaggggtctctgaacaatatgctcaggtctccaaactggctgaatttaccacggactatttttctagcatttggattttaacagaagcagagcaaagttgggatgaccacacccttcctgggcttcaaggactttaaaaatgtcctggctgccccagaagttggagagctctacatttcagcgttggtggtattctccactggttgaatgcaaatggaagccagaggaaaagggaacccttgacacagttttcatatagattggcctccagggcagacagcagattccaagaaccaggaggttgtttgctgtactctcccttgtacagttagctgtctctagtgcctgaatgcactaattgtcctttgggtatggatgaggtaatgaaggaaagggatgctgggaagagaggccacatgagaagtggttctctaacttgatgtatacaaattttctgagaagattatttaaaaagtagtttccacccaatccaaggattccgattcagcagggctgaggtactccgaagcagggtatggattctgctttcatcttccaatgcaagcctgtttccacagggttgagatctggcatggacaatttcagcctgaaacgattacttttggaaatttgcagtgagtggaaacagtcatgtagagctgtggatcttgctacctggatcaataacttcttctagttaagcttcttgccaaggaaaagcaaggaatatcaaatttcatagacctaatgaaccactggaaactgcttgcacccatgtgtgcaaggatcgctttttatgatttatacaaaccaaagcactcattggaataagaataatagctaacgtttatttatcatttattatcctggccactgtgccaagtatttatatacagtgagttatttaatccctgcaacaacccatgggtaggtactattatttttccttctttatagataagaacattgaggcacaaaaatgctaaattacagagtgggatcaatgtgttgctcgcttagaaaatgagtcaagttccatatgtgtgagtaaatgtgaacattcccacttccttgtcacttggttttctttctcaagtttggtgtgtttgctctgtgttcacaggatattgttaacttcttagtcctttgaagaaaaatcaaattttttcttaagaagagacttttgaaactcacaatatgaattcaagaagcaaaaaagaaaatcgaatttcacaaatgggataccaatagcttggaaaaatccattgcttttgcagggtttgttattgagggaaccctgcctttcccagcatccttaacatttcttcctcaaataaaagaggcacattgatttgaatagttaaagatttgtctcatttccttgccaaggaggattatgtttccagctttttgttaattctgggcatttcaaccactgcttctgataacatcctgctttactgtgctaggcattccttggacccaggactggggagtggggtttaatctggactgaattggaggaaaggaactggcaccagagtggaggctggaaggatggtggaactgacactgggacagaacacagaaaacagaatctaatgctattgctctggctatatcaaataaaagtgtcaagagtgagcatccttgccttgtgctgaatcacaaaggaatacctttcagtttttctccattgattatgatagcagtgggcttttcacagtgggctttactgtgttgaggtttaggtgcagtcatcttggatttgagtcgtgcttgtgaattttcatgtgttacaacaaccagattaaatttcttcaagtggaaatattaagtcaaagaaattacctatttctaataattcttactgaagaagtgaaacctagcaggaagaattgtatttggttctggaggttggaagtctgagaccagggtgtgactgtggttgggttctggngngagcgtctttggtttgttgacagtcaccttcttgctgtgtcctcatgtgaggggaagtagagggagaaaaagctctctggtgtctttttttataagggcactaatcacatcatgaaagccccaccctcaaaacctcgtctaagcctatttatctcccaaaggccccatctccaaattccatcacattggagcttagggcttccacctatgaatctttctggggtgcagtatggttcagtctatagcagaaaaaaataataaaaaaaatatatatatgtacacacacacatatatatatataatttatattcatgtatacttgtatagttgaaagtctccaagataatgaacaaaatgctgaatggttatttctgggtcatagaaggagagcaaattctagaacttttttctttttgtttctctgtgttttccaagttttattcactgagcatgtactaccattgtgtttataaaatattaaattttt

SEQ ID NO: 419657 - DNA, 1506 bp, Homo sapiens
gcacatgcgcagaatcatcgtggtgcagggctctccctttgcttcttcggttgcagtcctcttgcttcttgcgcgtgcgtgtagcgcttttgcaaagccgcggaggtgaagtgaacttagaggttgtggggccgaggggtcgtcttatagctaccagcccacaggcatttagtctacgttggaggtaaacaaatacgggtcctgcttaggagaaaagaaaaacgtcttacagccagtgtctaaactccaaacaacggaatgtatcaatgagaccttgtatatggatacacgtgcatttaaaaccgccctgccggcttgtagagcttttgccgttctccagcgctttacaggggttatcgcacttaagcctcggaacaactttaccaggagtggggtttaatctggactgaattggaggaaaggaactggcaccagagtggaggctggaaggatggtggaactgacactgggacagaacacagaaaacagaatctaatgctattgctctggctatatcaaataaaagtgtcaagagtgagcatccttgccttgtgctgaatcacaaaggaatacctttcagtttttctccattgattatgatagcagtgggcttttcacagtgggctttactgtgttgaggaggaggtctgatggccgggaggacaggaagaaggaacccacaatgaagcaaaagttgcgtttaactctgtcctcaccattcctctcctggacctgtcctaaactggaagctgggggaggatggagtgctggaatgctgcagaagtctcatgggagggcgcctggtgttcaccacatgtgtacactgttgcacgaccaggaaccttcagaaagggcagaaaggaagtttacttctgcctctacaatggatttgcctactttagacatgttttcaagatttatccacgtcatggcatataccagaacttcatttcttttatgattgaataatattacatggttttaatatactatattttgtttatctgttcatcaattaataaatctttgggttgttttcacttttaggctataataattaacgctgttaggaatatttacttgtaagtttttgttatatgtttttaattctcctgggtagatacttagggataaaattgctgaattagattgtaactttatgtttagaaactgcccaactgttttccaaagtaactatcattttaatatttcaccagcattgtatgacagttctggtctttccttatttaaactaatacttaattattgccttttattgtagctatcctagtagatatgaagtgttatctcattatggttttgatttgcattctctaatgactaataatatcaagcatcttttcatgtgtatacaagatatttgtatatcttctttagagaaatgtctactcaaatcctgtgcctatgttttaattggataatttatgtttttattgttgagttgtaatagtttttaaatatattctggatcctagacctttaaca

SEQ ID NO: 419658 - DNA, 1404 bp, Homo sapiens
atggcgggcgcccctcccccagcctcgctgccgccttgcagtttgatctcggactgctgtgctagcaatcagcgagactccgtgggcgtagcaccctccgagccaggtgcgggatataatctggtggtgcaccgttttttaagctggtccgaaaagcgcagtattcgggtgggagtgacccgattttccaggtattctccactggttgaatgcaaatggaagccagaggaaaagggaacccttgacacagttttcatatagattggcctccagggcagacagcaggagtggggtttaatctggactgaattggaggaaaggaactggcaccagagtggaggctggaaggatggtggaactgacactgggacagaacacagaaaacagaatctaatgctattgctctggctatatcaaataaaagtgtcaagagtgagcatccttgccttgtgctgaatcacaaaggaatacctttcagtttttctccattgattatgatagcagtgggcttttcacagtgggctttactgtgttgaggaggaggtctgatggccgggaggacaggaagaaggaacccacaatgaagcaaaagttgcgtttaactctgtcctcaccattcctctcctggacctgtcctaaactggaagctgggggaggatggagtgctggaatgctgcagaagtctcatgggagggcgcctggtgttcaccacatgtgtacactgttgcacgaccaggaaccttcagaaagggcagaaaggaagtttacttctgcctctacaatggatttgcctactttagacatgttttcaagatttatccacgtcatggcatataccagaacttcatttcttttatgattgaataatattacatggttttaatatactatattttgtttatctgttcatcaattaataaatctttgggttgttttcacttttaggctataataattaacgctgttaggaatatttacttgtaagtttttgttatatgtttttaattctcctgggtagatacttagggataaaattgctgaattagattgtaactttatgtttagaaactgcccaactgttttccaaagtaactatcattttaatatttcaccagcattgtatgacagttctggtctttccttatttaaactaatacttaattattgccttttattgtagctatcctagtagatatgaagtgttatctcattatggttttgatttgcattctctaatgactaataatatcaagcatcttttcatgtgtatacaagatatttgtatatcttctttagagaaatgtctactcaaatcctgtgcctatgttttaattggataatttatgtttttattgttgagttgtaatagtttttaaatatattctggatcctagacctttaaca

SEQ ID NO: 419659 - DNA, 1626 bp, Homo sapiens
gcacatgcgcagaatcatcgtggtgcagggctctccctttgcttcttcggttgcagtcctcttgcttcttgcgcgtgcgtgtagcgcttttgcaaagccgcggaggtgaagtgaacttagaggttgtggggccgaggggtcgtcttatagctaccagcccacaggcatttagtctacgttggaggtaaacaaatacgggtcctgcttaggagaaaagaaaaacgtcttacagccagtgtctaaactccaaacaacggaatgtatcaatgagaccttgtatatggatacacgtgcatttaaaaccgccctgccggcttgtagagcttttgccgttctccagcgctttacaggggttatcgcacttaagcctcggaacaactttaccagatgaggacacctgaggttcagattaagaaatctgccccaaagtcttagaactggtattctccactggttgaatgcaaatggaagccagaggaaaagggaacccttgacacagttttcatatagattggcctccagggcagacagcaggagtggggtttaatctggactgaattggaggaaaggaactggcaccagagtggaggctggaaggatggtggaactgacactgggacagaacacagaaaacagaatctaatgctagtaccctaatgacaagttcaccccagtgttttctgaggagtctacctggaaatgagaaccatctgtccttcctatagtagttcttctcagaatgccgactctatgctaatggaggaggtctgatggccgggaggacaggaagaaggaacccacaatgaagcaaaagttgcgtttaactctgtcctcaccattcctctcctggacctgtcctaaactggaagctgggggaggatggagtgctggaatgctgcagaagtctcatgggagggcgcctggtgttcaccacatgtgtacactgttgcacgaccaggaaccttcagaaagggcagaaaggaagtttacttctgcctctacaatggatttgcctactttagacatgttttcaagatttatccacgtcatggcatataccagaacttcatttcttttatgattgaataatattacatggttttaatatactatattttgtttatctgttcatcaattaataaatctttgggttgttttcacttttaggctataataattaacgctgttaggaatatttacttgtaagtttttgttatatgtttttaattctcctgggtagatacttagggataaaattgctgaattagattgtaactttatgtttagaaactgcccaactgttttccaaagtaactatcattttaatatttcaccagcattgtatgacagttctggtctttccttatttaaactaatacttaattattgccttttattgtagctatcctagtagatatgaagtgttatctcattatggttttgatttgcattctctaatgactaataatatcaagcatcttttcatgtgtatacaagatatttgtatatcttctttagagaaatgtctactcaaatcctgtgcctatgttttaattggataatttatgtttttattgttgagttgtaatagtttttaaatatattctggatcctagacctttaaca

SEQ ID NO: 419660 - DNA, 1490 bp, Homo sapiens
  misc_feature (1001)..(1001): n is a, c, g, or t
  misc_feature (1003)..(1003): n is a, c, g, or t
gcacatgcgcagaatcatcgtggtgcagggctctccctttgcttcttcggttgcagtcctcttgcttcttgcgcgtgcgtgtagcgcttttgcaaagccgcggaggtgaagtgaacttagaggttgtggggccgaggggtcgtcttatagctaccagcccacaggcatttagtctacgttggaggtaaacaaatacgggtcctgcttaggagaaaagaaaaacgtcttacagccagtgtctaaactccaaacaacggaatgtatcaatgagaccttgtatatggatacacgtgcatttaaaaccgccctgccggcttgtagagcttttgccgttctccagcgctttacaggggttatcgcacttaagcctcggaacaactttaccagatgaggacacctgaggttcagattaagaaatctgccccaaagtcttagaactggtattctccactggttgaatgcaaatggaagccagaggaaaagggaacccttgacacagttttcatatagattggcctccagggcagacagcaggagtggggtttaatctggactgaattggaggaaaggaactggcaccagagtggaggctggaaggatggtggaactgacactgggacagaacacagaaaacagaatctaatgctattgctctggctatatcaaataaaagtgtcaagagtgagcatccttgccttgtgctgaatcacaaaggaatacctttcagtttttctccattgattatgatagcagtgggcttttcacagtgggctttactgtgttgaggtttaggtgcagtcatcttggatttgagtcgtgcttgtgaattttcatgtgttacaacaaccagattaaatttcttcaagtggaaatattaagtcaaagaaattacctatttctaataattcttactgaagaagtgaaacctagcaggaagaattgtatttggttctggaggttggaagtctgagaccagggtgtgactgtggttgggttctggngngagcgtctttggtttgttgacagtcaccttcttgctgtgtcctcatgtgaggggaagtagagggagaaaaagctctctggtgtctttttttataagggcactaatcacatcatgaaagccccaccctcaaaacctcgtctaagcctatttatctcccaaaggccccatctccaaattccatcacattggagcttagggcttccacctatgaatctttctggggtgcagtatggttcagtctatagcagaaaaaaataataaaaaaaatatatatatgtacacacacacatatatatatataatttatattcatgtatacttgtatagttgaaagtctccaagataatgaacaaaatgctgaatggttatttctgggtcatagaaggagagcaaattctagaacttttttctttttgtttctctgtgttttccaagttttattcactgagcatgtactaccattgtgtttataaaatattaaattttt

SEQ ID NO: 419661 - DNA, 1402 bp, Homo sapiens
actcactatagggctcgagcggcctccagggcaggtgtggaagggtggggaaatagaggaaatggaagagaagaaagagagtgattttcttcatcctgtcctggatctggatcccttttaataggatctctcctggacagttctgagcacttcgaagtgcatccaattcaggtcacagtaggtgggcaaaggacttcagaccctggagacacaaaggtattctccactggttgaatgcaaatggaagccagaggaaaagggaacccttgacacagttttcatatagattggcctccagggcagacagcaggagtggggtttaatctggactgaattggaggaaaggaactggcaccagagtggaggctggaaggatggtggaactgacactgggacagaacacagaaaacagaatctaatgctagtaccctaatgacaagttcaccccagtgttttctgaggagtctacctggaaatgagaaccatctgtccttcctatagtagttcttctcagaatgccgactctatgctaatggaggaggtctgatggccgggaggacaggaagaaggaacccacaatgaagcaaaagttgcgtttaactctgtcctcaccattcctctcctggacctgtcctaaactggaagctgggggaggatggagtgctggaatgctgcagaagtctcatgggagggcgcctggtgttcaccacatgtgtacactgttgcacgaccaggaaccttcagaaagggcagaaaggaagtttacttctgcctctacaatggatttgcctactttagacatgttttcaagatttatccacgtcatggcatataccagaacttcatttcttttatgattgaataatattacatggttttaatatactatattttgtttatctgttcatcaattaataaatctttgggttgttttcacttttaggctataataattaacgctgttaggaatatttacttgtaagtttttgttatatgtttttaattctcctgggtagatacttagggataaaattgctgaattagattgtaactttatgtttagaaactgcccaactgttttccaaagtaactatcattttaatatttcaccagcattgtatgacagttctggtctttccttatttaaactaatacttaattattgccttttattgtagctatcctagtagatatgaagtgttatctcattatggttttgatttgcattctctaatgactaataatatcaagcatcttttcatgtgtatacaagatatttgtatatcttctttagagaaatgtctactcaaatcctgtgcctatgttttaattggataatttatgtttttattgttgagttgtaatagtttttaaatatattctggatcctagacctttaaca

SEQ ID NO: 419662 - DNA, 1560 bp, Homo sapiens
  misc_feature (1526)..(1526): n is a, c, g, or t
  misc_feature (1535)..(1535): n is a, c, g, or t
  misc_feature (1544)..(1544): n is a, c, g, or t
gcacatgcgcagaatcatcgtggtgcagggctctccctttgcttcttcggttgcagtcctcttgcttcttgcgcgtgcgtgtagcgcttttgcaaagccgcggaggtgaagtgaacttagaggttgtggggccgaggggtcgtcttatagctaccagcccacaggcatttagtctacgttggaggtaaacaaatacgggtcctgcttaggagaaaagaaaaacgtcttacagccagtgtctaaactccaaacaacggaatgtatcaatgagaccttgtatatggatacacgtgcatttaaaaccgccctgccggcttgtagagcttttgccgttctccagcgctttacaggggttatcgcacttaagcctcggaacaactttaccagatgaggacacctgaggttcagattaagaaatctgccccaaagtcttagaactggtattctccactggttgaatgcaaatggaagccagaggaaaagggaacccttgacacagttttcatatagattggcctccagggcagacagcagttgctctggctatatcaaataaaagtgtcaagagtgagcatccttgccttgtgctgaatcacaaaggaatacctttcagtttttctccattgattatgatagcagtgggcttttcacagtgggctttactgtgttgaggtaccctaatgacaagttcaccccagtgttttctgaggagtctacctggaaatgagaaccatctgtccttcctatagtagttcttctcagaatgccgactctatgctaatggaggaggtctgatggccgggaggacaggaagaaggaacccacaatgaagcaaaagttgcgtttaactctgtcctcaccattcctctcctggacctgtcctaaactggaagctgggggaggatggagtgctggaatgctgcagaagtctcatgggagggcgcctggtgttcaccacatgtgtacactgttgcacgaccaggttggcactttgcatgtgggaaacgatcagagaatggtgggggatgcttaagaggcatcactggaatcctacggtaccacagaccagagccttcccttcccttcctctcccacagatggaaatttgaatgctggggctcagtggaacacctgaaggaagctggtgaggcagatgtcccgctatgccttccaagtgtcatgcaaccagttcatgcctgtcagcatctctgccggtggactctgtgagtcagcaaatctacagagcagagagccacaagtggggacagatgtggtcaaatgccatttaaatcagtgattctcaacccaggagttgtcatggcactggccttgagtgagctggaccaagggaagtggtagaattccccatgaaggaccaagtgagcagatagaagtttctccattttaactttttctgagtcaatttaaaaaacacctagtgcctttttctgtacatagtgcctgtgggtttaatttaagcctacccaaatgtgcttttatcccacctattttgaaccttgcatgtntccgggatnagaattaanataagctataaatatt

SEQ ID NO: 419663 - DNA, 1571 bp, Homo sapiens
  misc_feature (78)..(78): n is a, c, g, or t
cactgtggaagctttgttctttcgctctttgcaataaatcttgctactgctcactctttgggtccacactgcttttangagctgtaacttaccgtgaaggtctgcagcttcactcctgaagccagcgagaccacaagcccaccgggaggaaagaacaactctagatgcgcggccttaagagctgtaatactcacctggaaggtctgcagcttcactcctgagccagcgagaccacgaaccccaccagaaggaagaaactccgaacacatccgaacatcagaaggaacaaactccagacgcgccatcttaagagctgtaacactcacggcgagggtccacggcttcattcttgaagtcagtgagaccaagaacccaccaattccggacacaatgtgactagttcttgccaatgcaatgtgagcaaagcagtgtgtcatttctaggccaaggcagagtggggtttaatctggactgaattggaggaaaggaactggcaccagagtggaggctggaaggatggtggaactgacactgggacagaacacagaaaacagaatctaatgctattgctctggctatatcaaataaaagtgtcaagagtgagcatccttgccttgtgctgaatcacaaaggaatacctttcagtttttctccattgattatgatagcagtgggcttttcacagtgggctttactgtgttgaggaggaggtctgatggccgggaggacaggaagaaggaacccacaatgaagcaaaagttgcgtttaactctgtcctcaccattcctctcctggacctgtcctaaactggaagctgggggaggatggagtgctggaatgctgcagaagtctcatgggagggcgcctggtgttcaccacatgtgtacactgttgcacgaccaggaaccttcagaaagggcagaaaggaagtttacttctgcctctacaatggatttgcctactttagacatgttttcaagatttatccacgtcatggcatataccagaacttcatttcttttatgattgaataatattacatggttttaatatactatattttgtttatctgttcatcaattaataaatctttgggttgttttcacttttaggctataataattaacgctgttaggaatatttacttgtaagtttttgttatatgtttttaattctcctgggtagatacttagggataaaattgctgaattagattgtaactttatgtttagaaactgcccaactgttttccaaagtaactatcattttaatatttcaccagcattgtatgacagttctggtctttccttatttaaactaatacttaattattgccttttattgtagctatcctagtagatatgaagtgttatctcattatggttttgatttgcattctctaatgactaataatatcaagcatcttttcatgtgtatacaagatatttgtatatcttctttagagaaatgtctactcaaatcctgtgcctatgttttaattggataatttatgtttttattgttgagttgtaatagtttttaaatatattctggatcctagacctttaaca

SEQ ID NO: 419664 - DNA, 1298 bp, Homo sapiens
gtcgcttagactcctaaatgcagttcttctctctcgagaccaccttggattggagaacacccaaatgagcaggattgcttttgctttcaaaagagtgatacctggagcacaggtattctccactggttgaatgcaaatggaagccagaggaaaagggaacccttgacacagttttcatatagattggcctccagggcagacagcaggagtggggtttaatctggactgaattggaggaaaggaactggcaccagagtggaggctggaaggatggtggaactgacactgggacagaacacagaaaacagaatctaatgctagtaccctaatgacaagttcaccccagtgttttctgaggagtctacctggaaatgagaaccatctgtccttcctatagtagttcttctcagaatgccgactctatgctaatggaggaggtctgatggccgggaggacaggaagaaggaacccacaatgaagcaaaagttgcgtttaactctgtcctcaccattcctctcctggacctgtcctaaactggaagctgggggaggatggagtgctggaatgctgcagaagtctcatgggagggcgcctggtgttcaccacatgtgtacactgttgcacgaccaggaaccttcagaaagggcagaaaggaagtttacttctgcctctacaatggatttgcctactttagacatgttttcaagatttatccacgtcatggcatataccagaacttcatttcttttatgattgaataatattacatggttttaatatactatattttgtttatctgttcatcaattaataaatctttgggttgttttcacttttaggctataataattaacgctgttaggaatatttacttgtaagtttttgttatatgtttttaattctcctgggtagatacttagggataaaattgctgaattagattgtaactttatgtttagaaactgcccaactgttttccaaagtaactatcattttaatatttcaccagcattgtatgacagttctggtctttccttatttaaactaatacttaattattgccttttattgtagctatcctagtagatatgaagtgttatctcattatggttttgatttgcattctctaatgactaataatatcaagcatcttttcatgtgtatacaagatatttgtatatcttctttagagaaatgtctactcaaatcctgtgcctatgttttaattggataatttatgtttttattgttgagttgtaatagtttttaaatatattctggatcctagacctttaaca

SEQ ID NO: 419665 - DNA, 1053 bp, Homo sapiens
gcacatgcgcagaatcatcgtggtgcagggctctccctttgcttcttcggttgcagtcctcttgcttcttgcgcgtgcgtgtagcgcttttgcaaagccgcggaggtgaagtgaacttagaggttgtggggccgaggggtcgtcttatagctaccagcccacaggcatttagtctacgttggaggtaaacaaatacgggtcctgcttaggagaaaagaaaaacgtcttacagccagtgtctaaactccaaacaacggaatgtatcaatgagaccttgtatatggatacacgtgcatttaaaaccgccctgccggcttgtagagcttttgccgttctccagcgctttacaggggttatcgcacttaagcctcggaacaactttaccagatgaggacacctgaggttcagattaagaaatctgccccaaagtcttagaactggtattctccactggttgaatgcaaatggaagccagaggaaaagggaacccttgacacagttttcatatagattggcctccagggcagacagcaggagtggggtttaatctggactgaattggaggaaaggaactggcaccagagtggaggctggaaggatggtggaactgacactgggacagaacacagaaaacagaatctaatgctattgctctggctatatcaaataaaagtgtcaagagtgagcatccttgccttgtgctgaatcacaaaggaatacctttcagtttttctccattgattatgatagcagtgggcttttcacagtgggctttactgtgttgaggtaccctaatgacaagttcaccccagtgttttctgaggagtctacctggaaatgagaaccatctgtccttcctatagtagttcttctcagaatgccgactctatgctaatggctacccacagatccagggccataaataactgccaaagaagagaagccttctctcttctctgctgttgcttcattttatagtctcaggaaatctcatcatagaagtgcctttcaccttctgccatgattgtgaggcttcgctagctacgtggaact

SEQ ID NO: 419666 - DNA, 1625 bp, Homo sapiens
  misc_feature (1591)..(1591): n is a, c, g, or t
  misc_feature (1600)..(1600): n is a, c, g, or t
  misc_feature (1609)..(1609): n is a, c, g, or t
gcacatgcgcagaatcatcgtggtgcagggctctccctttgcttcttcggttgcagtcctcttgcttcttgcgcgtgcgtgtagcgcttttgcaaagccgcggaggtgaagtgaacttagaggttgtggggccgaggggtcgtcttatagctaccagcccacaggcatttagtctacgttggaggtaaacaaatacgggtcctgcttaggagaaaagaaaaacgtcttacagccagtgtctaaactccaaacaacggaatgtatcaatgagaccttgtatatggatacacgtgcatttaaaaccgccctgccggcttgtagagcttttgccgttctccagcgctttacaggggttatcgcacttaagcctcggaacaactttaccagatgaggacacctgaggttcagattaagaaatctgccccaaagtcttagaactggtgctgctgtgacgaccagctttgtgtggcctccagtggacttcatatggacatagccgaccatgccttgccttgtcagtcccacatccctcaccttcggacctgggcttccctgttgatacagaggcactggatatcttgagacttgctcaccatgacttgctctggctatatcaaataaaagtgtcaagagtgagcatccttgccttgtgctgaatcacaaaggaatacctttcagtttttctccattgattatgatagcagtgggcttttcacagtgggctttactgtgttgaggtatgctattaatgtgccctgtgactgggtccatgccccagtcctattttcctggctttatggaagatgccacaacatcagctgagctgatataagaatttcctaactcatgaggaggtctgatggccgggaggacaggaagaaggaacccacaatgaagcaaaagttgcgtttaactctgtcctcaccattcctctcctggacctgtcctaaactggaagctgggggaggatggagtgctggaatgctgcagaagtctcatgggagggcgcctggtgttcaccacatgtgtacactgttgcacgaccaggttggcactttgcatgtgggaaacgatcagagaatggtgggggatgcttaagaggcatcactggaatcctacggtaccacagaccagagccttcccttcccttcctctcccacagatggaaatttgaatgctggggctcagtggaacacctgaaggaagctggtgaggcagatgtcccgctatgccttccaagtgtcatgcaaccagttcatgcctgtcagcatctctgccggtggactctgtgagtcagcaaatctacagagcagagagccacaagtggggacagatgtggtcaaatgccatttaaatcagtgattctcaacccaggagttgtcatggcactggccttgagtgagctggaccaagggaagtggtagaattccccatgaaggaccaagtgagcagatagaagtttctccattttaactttttctgagtcaatttaaaaaacacctagtgcctttttctgtacatagtgcctgtgggtttaatttaagcctacccaaatgtgcttttatcccacctattttgaaccttgcatgtntccgggatnagaattaanataagctataaatatt

SEQ ID NO: 419667 - DNA, 1449 bp, Homo sapiens
  misc_feature (1415)..(1415): n is a, c, g, or t
  misc_feature (1424)..(1424): n is a, c, g, or t
  misc_feature (1433)..(1433): n is a, c, g, or t
gcacatgcgcagaatcatcgtggtgcagggctctccctttgcttcttcggttgcagtcctcttgcttcttgcgcgtgcgtgtagcgcttttgcaaagccgcggaggtgaagtgaacttagaggttgtggggccgaggggtcgtcttatagctaccagcccacaggcatttagtctacgttggaggtaaacaaatacgggtcctgcttaggagaaaagaaaaacgtcttacagccagtgtctaaactccaaacaacggaatgtatcaatgagaccttgtatatggatacacgtgcatttaaaaccgccctgccggcttgtagagcttttgccgttctccagcgctttacaggggttatcgcacttaagcctcggaacaactttaccagatgaggacacctgaggttcagattaagaaatctgccccaaagtcttagaactggtattctccactggttgaatgcaaatggaagccagaggaaaagggaacccttgacacagttttcatatagattggcctccagggcagacagcagttgctctggctatatcaaataaaagtgtcaagagtgagcatccttgccttgtgctgaatcacaaaggaatacctttcagtttttctccattgattatgatagcagtgggcttttcacagtgggctttactgtgttgaggaggaggtctgatggccgggaggacaggaagaaggaacccacaatgaagcaaaagttgcgtttaactctgtcctcaccattcctctcctggacctgtcctaaactggaagctgggggaggatggagtgctggaatgctgcagaagtctcatgggagggcgcctggtgttcaccacatgtgtacactgttgcacgaccaggttggcactttgcatgtgggaaacgatcagagaatggtgggggatgcttaagaggcatcactggaatcctacggtaccacagaccagagccttcccttcccttcctctcccacagatggaaatttgaatgctggggctcagtggaacacctgaaggaagctggtgaggcagatgtcccgctatgccttccaagtgtcatgcaaccagttcatgcctgtcagcatctctgccggtggactctgtgagtcagcaaatctacagagcagagagccacaagtggggacagatgtggtcaaatgccatttaaatcagtgattctcaacccaggagttgtcatggcactggccttgagtgagctggaccaagggaagtggtagaattccccatgaaggaccaagtgagcagatagaagtttctccattttaactttttctgagtcaatttaaaaaacacctagtgcctttttctgtacatagtgcctgtgggtttaatttaagcctacccaaatgtgcttttatcccacctattttgaaccttgcatgtntccgggatnagaattaanataagctataaatatt

SEQ ID NO: 419668 - DNA, 594 bp, Homo sapiens
gtttctcccatttagaatatctagcatgtaaggcctttcaatattaatataagcccaatatcagctctttctctttgtatttcatctctttctactctcctatttgtattttgtgttcctatcaaagtgtcgtatctgggagatgacctgccttatcctgttctataacagttttgtttgctgctgtgtctttagaacagtgcctggcacacagtaagcactcaataaatctttgatgaatgaatgaatggttatcttttctctctggcaatccaaattcaccactccttaaaaattctacataagatttgctggctgggcgcagtgactcacgcctgtaatcccagcactttgggagactgagacaggtggatcacctgaggtcaggagtttgagaccagtctcaacatagcgaaaccccatctctactaaaagtacaaaaattagccgggcgtggtggcaggcgcctgtaatcccagctacttgggagactgaggcaggagaatcacttgagcccaggggggcagaggttgcagtgagctgagatcacgccacttcactccagcctgggcaaaagagcaaaactccgtctcc

SEQ ID NO: 419669 - DNA, 1492 bp, Homo sapiens
atggcgggcgcccctcccccagcctcgctgccgccttgcagtttgatctcggactgctgtgctagcaatcagcgagactccgtgggcgtagcaccctccgagccaggtgcgggatataatctggtggtgcaccgttttttaagctggtccgaaaagcgcagtattcgggtgggagtgacccgattttccaggtgctgcgttgccatctttaaagtcatcacactggaccacatcagtattgcaagctgcttgggtatcattaatgaagacaaagtgggattattattttctatgatttgggcttttgtattctccactggttgaatgcaaatggaagccagaggaaaagggaacccttgacacagttttcatatagattggcctccagggcagacagcaggagtggggtttaatctggactgaattggaggaaaggaactggcaccagagtggaggctggaaggatggtggaactgacactgggacagaacacagaaaacagaatctaatgctagtaccctaatgacaagttcaccccagtgttttctgaggagtctacctggaaatgagaaccatctgtccttcctatagtagttcttctcagaatgccgactctatgctaatggaggaggtctgatggccgggaggacaggaagaaggaacccacaatgaagcaaaagttgcgtttaactctgtcctcaccattcctctcctggacctgtcctaaactggaagctgggggaggatggagtgctggaatgctgcagaagtctcatgggagggcgcctggtgttcaccacatgtgtacactgttgcacgaccaggaaccttcagaaagggcagaaaggaagtttacttctgcctctacaatggatttgcctactttagacatgttttcaagatttatccacgtcatggcatataccagaacttcatttcttttatgattgaataatattacatggttttaatatactatattttgtttatctgttcatcaattaataaatctttgggttgttttcacttttaggctataataattaacgctgttaggaatatttacttgtaagtttttgttatatgtttttaattctcctgggtagatacttagggataaaattgctgaattagattgtaactttatgtttagaaactgcccaactgttttccaaagtaactatcattttaatatttcaccagcattgtatgacagttctggtctttccttatttaaactaatacttaattattgccttttattgtagctatcctagtagatatgaagtgttatctcattatggttttgatttgcattctctaatgactaataatatcaagcatcttttcatgtgtatacaagatatttgtatatcttctttagagaaatgtctactcaaatcctgtgcctatgttttaattggataatttatgtttttattgttgagttgtaatagtttttaaatatattctggatcctagacctttaaca

SEQ ID NO: 419670 - DNA, 818 bp, Homo sapiens
atggcgggcgcccctcccccagcctcgctgccgccttgcagtttgatctcggactgctgtgctagcaatcagcgagactccgtgggcgtagcaccctccgagccaggtgcgggatataatctggtggtgcaccgttttttaagctggtccgaaaagcgcagtattcgggtgggagtgacccgattttccaggtattctccactggttgaatgcaaatggaagccagaggaaaagggaacccttgacacagttttcatatagattggcctccagggcagacagcagttgctctggctatatcaaataaaagtgtcaagagtgagcatccttgccttgtgctgaatcacaaaggaatacctttcagtttttctccattgattatgatagcagtgggcttttcacagtgggctttactgtgttgaggtaccctaatgacaagttcaccccagtgttttctgaggagtctacctggaaatgagaaccatctgtccttcctatagtagttcttctcagaatgccgactctatgctaatggaaagaagtgagatgatgatggctctgtctcagcagctctcggggggacctgcaggctggggaggcagcttctctctgcaatttggccgctcctggacttgttgcagccaggcttcaaagagaaaccaccgcttcctccccgagccccacgccagcctcagaggcagctgggcctattgaaacattcaagtttcacttcaggctactttaaacatttgctttattccaaaacagctaaacttggagttattttcaaatataggccatttttatgccccagtata

SEQ ID NO: 419671 - DNA, 1304 bp, Homo sapiens
  misc_feature (990)..(990): n is a, c, g, or t
  misc_feature (1003)..(1003): n is a, c, g, or t
  misc_feature (1091)..(1091): n is a, c, g, or t
gcacatgcgcagaatcatcgtggtgcagggctctccctttgcttcttcggttgcagtcctcttgcttcttgcgcgtgcgtgtagcgcttttgcaaagccgcggaggtgaagtgaacttagaggttgtggggccgaggggtcgtcttatagctaccagcccacaggcatttagtctacgttggaggtaaacaaatacgggtcctgcttaggagaaaagaaaaacgtcttacagccagtgtctaaactccaaacaacggaatgtatcaatgagaccttgtatatggatacacgtgcatttaaaaccgccctgccggcttgtagagcttttgccgttctccagcgctttacaggggttatcgcacttaagcctcggaacaactttaccagtgattctaccagaaaggaatgaagaacagaaccttcaggaattgagtcacaatgcagacaaatatcaaatgggagattgttgcaaggaagagattgatgatagtattttctactagccattgggaagataaaaggagacagaagattgaagcctttgccagccattctttccctttttgcttccaaactcctcaactgggaaccttcatatgtgcagtatttatattggatcatactggtgattataaaagttcctaggaggctagaagagccaaccaacagagaagggaaagcagtctgttctgaacatagggacataagttcattcatgccaagtatctttccagcatgtttctcccatttagaatatctagcatgtaaggcctttcaatattaatataagcccaatatcagctctttctctttgtatttcatctctttctactctcctatttgtattttgtgttcctatcaaagtgtcgtatctgggagatgacctgccttatcctgttctataacagttttgtttgctgctgtgtctttagaacagtgcctggcacacagtaagcactcaataaatctttgatgaatgaaaaaccaaanaaaaatgtgcctnggttggcctaagcgttggaacttttgcggccgtttccctttaggaaggggaattcatgaaccccgctactgactccgtgggttgggcnttcggttgcggaagcggatcagcctcctaagggcggaatccggttttccacaatcagggataccccagaaaaactgggaccaaaggccgcaaaggccgaacccgaaaggccggttggtgcgttttcctagctccccccccgaaggctaccaaatcaccttaatcaaaggggcaacccgaaggctttaaaatccggcgtcccctgagcttctcg

SEQ ID NO: 419672 - DNA, 376 bp, Homo sapiens
gccaggcctgcaacttaaagatgctcccggggaggcgaccagagatgtcccttcctgaccccgcttccctactccagccctgacaacaggtcatctcttggccccgaaaatctgtcacctgcaccctggagcctgggtgactttgaacagctggtgaccagtctgacccttcacgatcctaacatctttggtccccagtaaaggcgctgaagcactgcatgatgttgctgagaacttggggactcggttctgtgagggggaaaagaggttgaaaagagggtttcctcttatttcttccctgtgcgtaaacataagacaatccctcttcagaataaacttgctttataatcaaaaaaaaactgtgcctttgaatcta

SEQ ID NO: 419673 - DNA, 1886 bp, Homo sapiens
cccaatatatatcaggtctgttatgctctaaacaccgtgccgggtgctgaggatcaaagatgaatagagaaatgaactgaaatgatatagtgaagttaaaacttaaagaacacaacaaatctgtaaaagacaaacaaaagagggtttaatctgtgcttctgtccaggtgtgtggagctgggggtggggttgcacctgcccgggagcattcccaaggcaaatatttgagaggaattagatttctaatacccaggttggctctcactttcaggaagatgtgagacctgaatcctaacctggacgcattgttcccctaattcccagcagcagatctatgaattagcggtctgggtggcagcccattcttctttcagaggcccagaacaccgtgaaactatgctttcctgactcaagagaccctacctagacgtgggcccctttgacgagcacctgcccctcaggagggtctcaggcgaccttcttggaaggtgtgaccacttgaaaaggacgaggaggccaggcgctgtggctctcgcctgtaattccagcacttagggagccgaggcgggaggatcgcttgagtccaggagtttgaggccagcctgggcaagattgggagacactccccaccccgccccatttctacaagtaattaaaaatttagccgggcgtggtggcgggagcaggagccactcaagaggctgaggcaggagtatcacttgagtcctggaggtggagactgcagtgagcggtgatcgcgccactgcattacagcctgggcgacacagcgagacctgtcaatcaatcaatcaatcaatcaatcaagaggaggctggcgggagcatgctcgtgaccaccgggggcgacatagacccttaaccctaagtccaaccccaaggcagaccccaccgtcccgccaggcgcactcctaagagcgcggcttccggagcaaagccgctgacccccgcccccagggtcttggcgccgattggccaacgagagcgcagggcggagccaaatcttaaaggatccgggagctaagccagacccgggtggcggtggcagctgcgaaacccagggagccgatgccacgtgacccaatgtggacttcttttaaacctttctaatgcccataacccagcctcagacccatggagcccacgagagactgcccgctgttcgggggcgccttttccgccatcctccccatgggggccattgacgtaagcgacctccgaccggtcccggacaatcaagaagttttctgccatcccgtgacggaccagagcctgatagtggaacttctcgagctgcaggcccacgtacggggcgaagcggctgcgcggtaccactttgaggatgttggtggcgtgcagggggctagggctgtccatgtggagtctgttcagcctctcagtttggagaacctggccctgaggggccgctgtcaagaagcctgggtcctctctggcaagcagcagatagctaaggaaaaccagcaggtagcaaaggacgtgacacttcatcaggccttgctgaggctgccccagtaccagactgatctcttgcttaccttcaatcagcccccccctgacaacaggtcatctcttggccccgaaaatctgtcacctgcaccctggagcctgggtgactttgaacagctggtgaccagtctgacccttcacgatcctaacatctttggtccccagtaaaggcgctgaagcactgcatgatgttgctgagaacttggggactcggttctgtgagggggaaaagaggttgaaaagagggtttcctcttatttcttccctgtgcgtaaacataagacaatccctcttcagaataaacttgctttataatcaaaaaaaaactgtgcctttgaatcta

SEQ ID NO: 419674 - DNA, 2118 bp, Homo sapiens
cccaatatatatcaggtctgttatgctctaaacaccgtgccgggtgctgaggatcaaagatgaatagagaaatgaactgaaatgatatagtgaagttaaaacttaaagaacacaacaaatctgtaaaagacaaacaaaagagggtttaatctgtgcttctgtccaggtgtgtggagctgggggtggggttgcacctgcccgggagcattcccaaggcaaatatttgagaggaattagatttctaatacccaggttggctctcactttcaggaagatgtgagacctgaatcctaacctggacgcattgttcccctaattcccagcagcagatctatgaattagcggtctgggtggcagcccattcttctttcagaggcccagaacaccgtgaaactatgctttcctgactcaagagaccctacctagacgtgggcccctttgacgagcacctgcccctcaggagggtctcaggcgaccttcttggaaggtgtgaccacttgaaaaggacgaggaggccaggcgctgtggctctcgcctgtaattccagcacttagggagccgaggcgggaggatcgcttgagtccaggagtttgaggccagcctgggcaagattgggagacactccccaccccgccccatttctacaagtaattaaaaatttagccgggcgtggtggcgggagcaggagccactcaagaggctgaggcaggagtatcacttgagtcctggaggtggagactgcagtgagcggtgatcgcgccactgcattacagcctgggcgacacagcgagacctgtcaatcaatcaatcaatcaatcaatcaagaggaggctggcgggagcatgctcgtgaccaccgggggcgacatagacccttaaccctaagtccaaccccaaggcagaccccaccgtcccgccaggcgcactcctaagagcgcggcttccggagcaaagccgctgacccccgcccccagggtcttggcgccgattggccaacgagagcgcagggcggagccaaatcttaaaggatccgggagctaagccagacccgggtggcggtggcagctgcgaaacccagggagccgatgccacgtgacccaatgtggacttcttttaaacctttctaatgcccataacccagcctcagacccatggagcccacgagagactgcccgctgttcgggggcgccttttccgccatcctccccatgggggccattgacgtaagcgacctccgaccggtcccggacaatcaagaagttttctgccatcccgtgacggaccagagcctgatagtggaacttctcgagctgcaggcccacgtacggggcgaagcggctgcgcggtaccactttgaggatgttggtggcgtgcagggggctagggctgtccatgtggagtctgttcagcctctcagtttggagaacctggccctgaggggccgctgtcaagaagcctgggtcctctctggcaagcagcagatagctaaggaaaaccagcaggtagcaaaggacgtgacacttcatcaggccttgctgaggctgccccagtaccagactgatctcttgcttaccttcaatcagccccccagcccccgtaaggaggaaggaacgggcgggtatctcatgactgggttcccaggagaatcgggctgggagggacagaacagggagactcactggtgggatcctccaaggaagcaggagtgggccagaggtttggggtaactgatacccaggtcctctggggaacaggaattggcaatttccaaacctcaggcctggatgatgttctgtctccatctgttcccccaccccaagccctgacaacaggtcatctcttggccccgaaaatctgtcacctgcaccctggagcctgggtgactttgaacagctggtgaccagtctgacccttcacgatcctaacatctttggtccccagtaaaggcgctgaagcactgcatgatgttgctgagaacttggggactcggttctgtgagggggaaaagaggttgaaaagagggtttcctcttatttcttccctgtgcgtaaacataagacaatccctcttcagaataaacttgctttataatcaaaaaaaaactgtgcctttgaatcta

SEQ ID NO: 419675 - DNA, 1452 bp, Homo sapiens
cccaatatatatcaggtctgttatgctctaaacaccgtgccgggtgctgaggatcaaagatgaatagagaaatgaactgaaatgatatagtgaagttaaaacttaaagaacacaacaaatctgtaaaagacaaacaaaagagggtttaatctgtgcttctgtccaggtgtgtggagctgggggtggggttgcacctgcccgggagcattcccaaggcaaatatttgagaggaattagatttctaatacccaggttggctctcactttcaggaagatgtgagacctgaatcctaacctggacgcattgttcccctaattcccagcagcagatctatgaattagcggtctgggtggcagcccattcttctttcagaggcccagaacaccgtgaaactatgctttcctgactcaagagaccctacctagacgtgggcccctttgacgagcacctgcccctcaggagggtctcaggcgaccttcttggaaggtgtgaccacttgaaaaggacgaggaggccaggcgctgtggctctcgcctgtaattccagcacttagggagccgaggcgggaggatcgcttgagtccaggagtttgaggccagcctgggcaagattgggagacactccccaccccgccccatttctacaagtaattaaaaatttagccgggcgtggtggcgggagcaggagccactcaagaggctgaggcaggagtatcacttgagtcctggaggtggagactgcagtgagcggtgatcgcgccactgcattacagcctgggcgacacagcgagaccgacctccgaccggtcccggacaatcaagaagttttctgccatcccgtgacggaccagagcctgatagtggaacttctcgagctgcaggcccacgtacggggcgaagcggctgcgcggtaccactttgaggatgttggtggcgtgcagggggctagggctgtccatgtggagtctgttcagcctctcagtttggagaacctggccctgaggggccgctgtcaagaagcctgggtcctctctggcaagcagcagatagctaaggaaaaccagcaggtagcaaaggacgtgacacttcatcaggccttgctgaggctgccccagtaccagactgatctcttgcttaccttcaatcagcccccccctgacaacaggtcatctcttggccccgaaaatctgtcacctgcaccctggagcctgggtgactttgaacagctggtgaccagtctgacccttcacgatcctaacatctttggtccccagtaaaggcgctgaagcactgcatgatgttgctgagaacttggggactcggttctgtgagggggaaaagaggttgaaaagagggtttcctcttatttcttccctgtgcgtaaacataagacaatccctcttcagaataaacttgctttataatcaaaaaaaaactgtgcctttgaatcta

SEQ ID NO: 419676 - DNA, 1860 bp, Homo sapiens
cccaatatatatcaggtctgttatgctctaaacaccgtgccgggtgctgaggatcaaagatgaatagagaaatgaactgaaatgatatagtgaagttaaaacttaaagaacacaacaaatctgtaaaagacaaacaaaagagggtttaatctgtgcttctgtccaggtgtgtggagctgggggtggggttgcacctgcccgggagcattcccaaggcaaatatttgagaggaattagatttctaatacccaggttggctctcactttcaggaagatgtgagacctgaatcctaacctggacgcattgttcccctaattcccagcagcagatctatgaattagcggtctgggtggcagcccattcttctttcagaggcccagaacaccgtgaaactatgctttcctgactcaagagaccctacctagacgtgggcccctttgacgagcacctgcccctcaggagggtctcaggcgaccttcttggaaggtgtgaccacttgaaaaggacgaggaggccaggcgctgtggctctcgcctgtaattccagcacttagggagccgaggcgggaggatcgcttgagtccaggagtttgaggccagcctgggcaagattgggagacactccccaccccgccccatttctacaagtaattaaaaatttagccgggcgtggtggcgggagcaggagccactcaagaggctgaggcaggagtatcacttgagtcctggaggtggagactgcagtgagcggtgatcgcgccactgcattacagcctgggcgacacagcgagacctgtcaatcaatcaatcaatcaatcaatcaagaggaggctggcgggagcatgctcgtgaccaccgggggcgacatagacccttaaccctaagtccaaccccaaggcagaccccaccgtcccgccaggcgcactcctaagagcgcggcttccggagcaaagccgctgacccccgcccccagggtcttggcgccgattggccaacgagagcgcagggcggagccaaatcttaaaggatccgggagctaagccagacccgggtggcggtggcagctgcgaaacccagggagccgatgccacgtgacccaatgtggacttcttttaaacctttctaatgcccataacccagcctcagacccatggagcccacgagagactgcccgctgttcgggggcgccttttccgccatcctccccatgggggccattgacgtaagcgacctccgaccggtcccggacaatcaagaagttttctgccatcccgtgacggaccagagcctgatagtggaacttctcgagctgcaggcccacgtacggggcgaagcggctgcgcggtaccactttgaggatgttggtggcgtgcagggggctagggctgtccatgtggagtctgttcagcctctcagtttggagaacctggccctgaggggccgctgtcaagaagcctgggtcctctctggcaagcagcagatagctaaggaaaaccagcaggtgagggcccgagagtgtgtaatgtcctggaagggcggtagcggggacgcagagatccagccctgacaacaggtcatctcttggccccgaaaatctgtcacctgcaccctggagcctgggtgactttgaacagctggtgaccagtctgacccttcacgatcctaacatctttggtccccagtaaaggcgctgaagcactgcatgatgttgctgagaacttggggactcggttctgtgagggggaaaagaggttgaaaagagggtttcctcttatttcttccctgtgcgtaaacataagacaatccctcttcagaataaacttgctttataatcaaaaaaaaactgtgcctttgaatcta

SEQ ID NO: 419677 - DNA, 1114 bp, Homo sapiens
cccaatatatatcaggtctgttatgctctaaacaccgtgccgggtgctgaggatcaaagatgaatagagaaatgaactgaaatgatatagtgaagttaaaacttaaagaacacaacaaatctgtaaaagacaaacaaaagagggtttaatctgtgcttctgtccaggtgtgtggagctgggggtggggttgcacctgcccgggagcattcccaaggcaaatatttgagaggaattagatttctaatacccaggttggctctcactttcaggaagatgtgagacctgaatcctaacctggacgcattgttcccctaattcccagcagcagatctatgaattagcggtctgggtggcagcccattcttctttcagaggcccagaacaccgtgaaactatgctttcctgactcaagagaccctacctagacgtgggcccctttgacgagcacctgcccctcaggagggtctcaggcgaccttcttggaaggtgtgaccacttgaaaaggacgaggaggccaggcgctgtggctctcgcctgtaattccagcacttagggagccgaggcgggaggatcgcttgagtccaggagtttgaggccagcctgggcaagattgggagacactccccaccccgccccatttctacaagtaattaaaaatttagccgggcgtggtggcgggagcaggagccactcaagaggctgaggcaggagtatcacttgagtcctggaggtggagactgcagtgagcggtgatcgcgccactgcattacagcctgggcgacacagcgagaccagcccccgtaaggaggaaggaacgggcgggtatctcatgactgggttcccaggagaatcgggctgcaccctggagcctgggtgactttgaacagctggtgaccagtctgacccttcacgatcctaacatctttggtccccagtaaaggcgctgaagcactgcatgatgttgctgagaacttggggactcggttctgtgagggggaaaagaggttgaaaagagggtttcctcttatttcttccctgtgcgtaaacataagacaatccctcttcagaataaacttgctttataatcaaaaaaaaactgtgcctttgaatcta

SEQ ID NO: 419678 - DNA, 2206 bp, Homo sapiens
cccaatatatatcaggtctgttatgctctaaacaccgtgccgggtgctgaggatcaaagatgaatagagaaatgaactgaaatgatatagtgaagttaaaacttaaagaacacaacaaatctgtaaaagacaaacaaaagagggtttaatctgtgcttctgtccaggtgtgtggagctgggggtggggttgcacctgcccgggagcattcccaaggcaaatatttgagaggaattagatttctaatacccaggttggctctcactttcaggaagatgtgagacctgaatcctaacctggacgcattgttcccctaattcccagcagcagatctatgaattagcggtctgggtggcagcccattcttctttcagaggcccagaacaccgtgaaactatgctttcctgactcaagagaccctacctagacgtgggcccctttgacgagcacctgcccctcaggagggtctcaggcgaccttcttggaaggtgtgaccacttgaaaaggacgaggaggccaggcgctgtggctctcgcctgtaattccagcacttagggagccgaggcgggaggatcgcttgagtccaggagtttgaggccagcctgggcaagattgggagacactccccaccccgccccatttctacaagtaattaaaaatttagccgggcgtggtggcgggagcaggagccactcaagaggctgaggcaggagtatcacttgagtcctggaggtggagactgcagtgagcggtgatcgcgccactgcattacagcctgggcgacacagcgagacctgtcaatcaatcaatcaatcaatcaatcaagaggaggctggcgggagcatgctcgtgaccaccgggggcgacatagacccttaaccctaagtccaaccccaaggcagaccccaccgtcccgccaggcgcactcctaagagcgcggcttccggagcaaagccgctgacccccgcccccagggtcttggcgccgattggccaacgagagcgcagggcggagccaaatcttaaaggatccgggagctaagccagacccgggtggcggtggcagctgcgaaacccagggagccgatgccacgtgacccaatgtggacttcttttaaacctttctaatgcccataacccagcctcagacccatggagcccacgagagactgcccgctgttcgggggcgccttttccgccatcctccccatgggggccattgacgtaagcgacctccgaccggtcccggacaatcaagaagttttctgccatcccgtgacggaccagagcctgatagtggaacttctcgagctgcaggcccacgtacggggcgaagcggctgcgcggtaccactttgaggatgttggtggcgtgcagggggctagggctgtccatgtggagtctgttcagcctctcagtttggagaacctggccctgaggggccgctgtcaagaagcctgggtcctctctggcaagcagcagatagctaaggaaaaccagcaggtgagggcccgagagtgtgtaatgtcctggaagggcggtagcggggacgcagagatccaggtaagcatcctgactctgatccccttaggtagcaaaggacgtgacacttcatcaggccttgctgaggctgccccagtaccagactgatctcttgcttaccttcaatcagccccccagcccccgtaaggaggaaggaacgggcgggtatctcatgactgggttcccaggagaatcgggctgggagggacagaacagggagactcactggtgggatcctccaaggaagcaggagtgggccagaggtttggggtaactgatacccaggtcctctggggaacaggaattggcaatttccaaacctcaggcctggatgatgttctgtctccatctgttcccccaccccaagccctgacaacaggtcatctcttggccccgaaaatctgtcacctgcaccctggagcctgggtgactttgaacagctggtgaccagtctgacccttcacgatcctaacatctttggtccccagtaaaggcgctgaagcactgcatgatgttgctgagaacttggggactcggttctgtgagggggaaaagaggttgaaaagagggtttcctcttatttcttccctgtgcgtaaacataagacaatccctcttcagaataaacttgctttataatcaaaaaaaaactgtgcctttgaatcta

SEQ ID NO: 419679 - DNA, 1800 bp, Homo sapiens
cccaatatatatcaggtctgttatgctctaaacaccgtgccgggtgctgaggatcaaagatgaatagagaaatgaactgaaatgatatagtgaagttaaaacttaaagaacacaacaaatctgtaaaagacaaacaaaagagggtttaatctgtgcttctgtccaggtgtgtggagctgggggtggggttgcacctgcccgggagcattcccaaggcaaatatttgagaggaattagatttctaatacccaggttggctctcactttcaggaagatgtgagacctgaatcctaacctggacgcattgttcccctaattcccagcagcagatctatgaattagcggtctgggtggcagcccattcttctttcagaggcccagaacaccgtgaaactatgctttcctgactcaagagaccctacctagacgtgggcccctttgacgagcacctgcccctcaggagggtctcaggcgaccttcttggaaggtgtgaccacttgaaaaggacgaggaggccaggcgctgtggctctcgcctgtaattccagcacttagggagccgaggcgggaggatcgcttgagtccaggagtttgaggccagcctgggcaagattgggagacactccccaccccgccccatttctacaagtaattaaaaatttagccgggcgtggtggcgggagcaggagccactcaagaggctgaggcaggagtatcacttgagtcctggaggtggagactgcagtgagcggtgatcgcgccactgcattacagcctgggcgacacagcgagacctgtcaatcaatcaatcaatcaatcaatcaagaggaggctggcgggagcatgctcgtgaccaccgggggcgacatagacccttaaccctaagtccaaccccaaggcagaccccaccgtcccgccaggcgcactcctaagagcgcggcttccggagcaaagccgctgacccccgcccccagggtcttggcgccgattggccaacgagagcgcagggcggagccaaatcttaaaggatccgggagctaagccagacccgggtggcggtggcagctgcgaaacccagggagccgatgccacgtgacccaatgtggacttcttttaaacctttctaatgcccataacccagcctcagacccatggagcccacgagagactgcccgctgttcgggggcgccttttccgccatcctccccatgggggccattgacgtaagcgacctccgaccggtcccggacaatcaagaagttttctgccatcccgtgacggaccagagcctgatagtggaacttctcgagctgcaggcccacgtacggggcgaagcggctgcgcggtaccactttgaggatgttggtggcgtgcagggggctagggctgtccatgtggagtctgttcagcctctcagtttggagaacctggccctgaggggccgctgtcaagaagcctgggtcctctctggcaagcagcagatagctaaggaaaaccagcagccctgacaacaggtcatctcttggccccgaaaatctgtcacctgcaccctggagcctgggtgactttgaacagctggtgaccagtctgacccttcacgatcctaacatctttggtccccagtaaaggcgctgaagcactgcatgatgttgctgagaacttggggactcggttctgtgagggggaaaagaggttgaaaagagggtttcctcttatttcttccctgtgcgtaaacataagacaatccctcttcagaataaacttgctttataatcaaaaaaaaactgtgcctttgaatcta

SEQ ID NO: 419680 - DNA, 1438 bp, Homo sapiens
cctcggccagcactcgtagcgcgctgggcgagccggaccggaagttgaagaagtgaagcgccgcgcgcgccgcctgctgcaggagcctgcgcgggaccccagcatcctgaggctgcccagggtcgtcggggtccccggaccccgcgggcgccgccaccggggcgagcaacagcagcagcgcgagcagcggggcggtggggcgcgggcccctgggcccggaccagggagcaggcagccgttgccggcggggctgcatggacgcaggaaagttggctcggcacccgacagacacgggctcggagcgggcagtgccggcgctcgcggaaataaggccgtgataattgtgaaacacctgtgccaggccctgggggaatgagggtgaacaatcttaaacatctctgccttcctggagcacaccttctagattcttcttccttgccacatactgtgtgggggagtgacattgctaactgtccaccacgttctccaaaagacctgtcatcatatcccacccctggcccagggctgctggaagactgtgccacataggaggtgaggaaagtatcagccagcaggttctgccccagcctctgcacagaagcagatgtgtccccacaagggtgtcctgatatgtcatgttccctagttccttagtcattgctcaggttatcatgagcattttagagaacttactttgtgtttaagaaacctaatggtatataaagctataatgacttttaatcatatgaaaagatagtacagacggtgagaggggaaactgacatgacctgtttgggtggacaatttgcaatatctattgaaattagaaatgcacatggctctgacccagcaattccaccttgagagtttataataacaatacattcacacatgtacataaagaagtatgtgcaaggatgttcatttccacatatggattgtaaactcctccacggcagtgacactgaatgtctcattttctactctctattccctagaacagtgactggcacacaatagacacgaatacagatttttttttttaaacaatgaagagttaagggctgggaaaacacctgtgtttcatggttgactaattatagtacctccatagaatggaatattgcacagtcatgaagaagaggtagattgaggtgtgtgtgatactgaaccatctctaaggtataatgttgttaacagcacggtgtagagtagggcaagtagtatgctgctatttgtttaaaaagaaaaaaataacatacataaatgtggaaatatgcaaaaactgtctctgcaaaggtttataagaattgccattataggatgagagagaaactcttcaccattggctctcttttgtggtggttgcttttttcatgtgtgtataatgtatatggtctattctaaataagtaaataaatgaggtgctgtttccgaa

SEQ ID NO: 419681 - DNA, 523 bp, Homo sapiens
cctcggccagcactcgtagcgcgctgggcgagccggaccggaagttgaagaagtgaagcgccgcgcgcgccgcctgctgcaggagcctgcgcgggaccccagcatcctgaggctgcccagggtcgtcggggtccccggaccccgcgggcgccgccaccggggcgagcaacagcagcagcgcgagcagcggggcggtggggcgcgggcccctgggcccggaccagggagcaggcagccgttgccggcggggctgcatggacgcaggaaagttggctcggcacccgacagacacgggctcggagcgggcagtgccggcgctcgcggaaataaggccgtggtgggcccctcccctccgcccccagggcgaagataattgtgaaacacctgtgccaggccctgggggaatgagggtgaacaatcttaaacatctctgccttcctggagcacaccttctaggaatcagcggatcctggagtttatttcttattatttcacttccctgaagctggagttgctgtttctt

SEQ ID NO: 419682 - DNA, 1500 bp, Homo sapiens
cctcggccagcactcgtagcgcgctgggcgagccggaccggaagttgaagaagtgaagcgccgcgcgcgccgcctgctgcaggagcctgcgcgggaccccagcatcctgaggctgcccagggtcgtcggggtccccggaccccgcgggcgccgccaccggggcgagcaacagcagcagcgcgagcagcggggcggtggggcgcgggcccctgggcccggaccagggagcaggcagccgttgccggcggggctgcatggacgcaggaaagttggctcggcacccgacagacacgggctcggagcgggcagtgccggcgctcgcggaaataaggccgtggtgggcccctcccctccgcccccagggcgaagataattgtgaaacacctgtgccaggccctgggggaatgagggtgaacaatcttaaacatctctgccttcctggagcacaccttctaggttgcacagtggctcagagagtagacttggagccaggctgcccggttttatagccctgcttgacctgtgtgatccgagaataatcttgtttaatctccacaagtttgaggactaaactgggtgccacagagaattaagtaactggtcgaggttgtatcagtaagaagggagcacggaacagattcaagctcagatggagtctcacactgtcacccgggctggaatgcagtggtgtgatcttggctcacctcccaggttcaagcgattctgctgcctctgcctcccgagcagctgggattccagggagcctggttggacttcaggcccctgtgaggctgactctgtagtcctggagaaactcaacagccaggaacttaggaccatttgtgtgtggcatttgggctaaccagactggtggcttctaaagaagatggaaagcatcacgtttcctgtatttaaattatttggtgatctcaatactggttgttagccaaagtacacaatggagacagcctatttgctctactacttttgatgtagaaatattactaagcttgagctgattaatagaactgttacacatttctgtgctccccttactggtggcatgaaataattcttttaaaacctgccatgtgttcacatttaaaactaaaagtaatttagattacatggatttgagaagcccatgttgacacgtaattgccaacagatgggctttcaaatgtaatgaagtgaaaatggtcagtaccccatgtgttggattttgcaattttccaaagtaagctgtcatttttggcatgtcatgctagttaagaacacaatgtatttatagctcaattatacattttctgatgaatttggcatggcattttgtttttccatcagtcacttaagacaggacatttgccattccaagaatgaattaacactcttctaagtgatctataaactgagatgtaaaataaattacaaattgggactgttttagtttttcaagcaaagggtgtttaaataaagcttgaaatcataaaccttaaaaac

SEQ ID NO: 419683 - DNA, 1390 bp, Homo sapiens
cctcggccagcactcgtagcgcgctgggcgagccggaccggaagttgaagaagtgaagcgccgcgcgcgccgcctgctgcaggagcctgcgcgggaccccagcatcctgaggctgcccagggtcgtcggggtccccggaccccgcgggcgccgccaccggggcgagcaacagcagcagcgcgagcagcggggcggtggggcgcgggcccctgggcccggaccagggagcaggcagccgttgccggcggggctgcatggacgcaggaaagttggctcggcacccgacagacacgggctcggagcgggcagtgccggcgctcgcggaaataaggccgtggtgggcccctcccctccgcccccagggcgaagataattgtgaaacacctgtgccaggccctgggggaatgagggtgaacaatcttaaacatctctgccttcctggagcacaccttctaggttgcacagtggctcagagagtagacttggagccaggctgcccggttttatagccctgcttgacctgtgtgatccgagaataatcttgtttaatctccacaagtttgaggactaaactgggtgccacagagaattaagtaactggtcgaggttgtatcagtaagaagggagcacggaacagattcaagctcagggagcctggttggacttcaggcccctgtgaggctgactctgtagtcctggagaaactcaacagccaggaacttaggaccatttgtgtgtggcatttgggctaaccagactggtggcttctaaagaagatggaaagcatcacgtttcctgtatttaaattatttggtgatctcaatactggttgttagccaaagtacacaatggagacagcctatttgctctactacttttgatgtagaaatattactaagcttgagctgattaatagaactgttacacatttctgtgctccccttactggtggcatgaaataattcttttaaaacctgccatgtgttcacatttaaaactaaaagtaatttagattacatggatttgagaagcccatgttgacacgtaattgccaacagatgggctttcaaatgtaatgaagtgaaaatggtcagtaccccatgtgttggattttgcaattttccaaagtaagctgtcatttttggcatgtcatgctagttaagaacacaatgtatttatagctcaattatacattttctgatgaatttggcatggcattttgtttttccatcagtcacttaagacaggacatttgccattccaagaatgaattaacactcttctaagtgatctataaactgagatgtaaaataaattacaaattgggactgttttagtttttcaagcaaagggtgtttaaataaagcttgaaatcataaaccttaaaaac

SEQ ID NO: 419684 - DNA, 882 bp, Homo sapiens
cctcggccagcactcgtagcgcgctgggcgagccggaccggaagttgaagaagtgaagcgccgcgcgcgccgcctgctgcaggagcctgcgcgggaccccagcatcctgaggctgcccagggtcgtcggggtccccggaccccgcgggcgccgccaccggggcgagcaacagcagcagcgcgagcagcggggcggtggggcgcgggcccctgggcccggaccagggagcaggcagccgttgccggcggggctgcatggacgcaggaaagttggctcggcacccgacagacacgggctcggagcgggcagtgccggcgctcgcggaaataaggccgtggtgggcccctcccctccgcccccagggcgaagataattgtgaaacacctgtgccaggccctgggggaatgagggtgaacaatcttaaacatctctgccttcctggagcacaccttctaggttgcacagtggctcagagagtagacttggagccaggctgcccggttttatagccctgcttgacctgtgtgatccgagaataatcttgtttaatctccacaagtttgaggactaaactgggtgccacagagaattaagtaactggtcgaggttgtatcagtaagaagggagcacggaacagattcaagctcaggctggagtgcaatggtgtgatctcacctcactgtaatctccattcccccgggttcaaaagattttcctgcctctacttgccaagaagctgggattccaggcatgcaccacgatgcctagctaatttttgtacttttagtagaaatgggttcttgccatgttgaccaggctggtcttgaactcctgacctccagtgatctgcttgccttggcctcccaaagtgctgggattaca

SEQ ID NO: 419685 - DNA, 946 bp, Homo sapiens
cctcggccagcactcgtagcgcgctgggcgagccggaccggaagttgaagaagtgaagcgccgcgcgcgccgcctgctgcaggagcctgcgcgggaccccagcatcctgaggctgcccagggtcgtcggggtccccggaccccgcgggcgccgccaccggggcgagcaacagcagcagcgcgagcagcggggcggtggggcgcgggcccctgggcccggaccagggagcaggcagccgttgccggcggggctgcatggacgcaggaaagttggctcggcacccgacagacacgggctcggagcgggcagtgccggcgctcgcggaaataaggccgtggtgggcccctcccctccgcccccagggcgaagataattgtgaaacacctgtgccaggccctgggggaatgagggtgaacaatcttaaacatctctgccttcctggagcacaccttctaggttgcacagtggctcagagagtagacttggagccaggctgcccggttttatagccctgcttgacctgtgtgatccgagaataatcttgtttaatctccacaagtttgaggactaaactgggtgccacagagaattaagtaactggtcgaggttgtatcagtaagaagggagcacggaacagattcaagctcagcttacacttggcaatcttctagggaggactttggctgaacccagtgaaccaggaggaaaagaatcacaaacatctggagtttgttgactagaaaaattccttgtggtctgacagattaccatttcctacccagccattctcatcagagaaaccagtcccattttcaactggcgcggctagttgaaagttccacatgtttccccagaaaatggcatagccagaaggccctcaccagattccagcaccagcctccagaacatgagccaaataaatcatcgtttataaattaaaaagtct

SEQ ID NO: 419686 - DNA, 758 bp, Homo sapiens
taagctgtattcattcagacgcaagcttatgtgacatgtagcagtctgacacttactgagccctaactctgtgctttaacagcagccttgtttaggtcatcactgttattagcatccccattttacagaggaagccaccaacacatgaatgtaaaaagatcttctgggctcccatggctcacgctctgtaatcatagtcatttgggtacacactgcggtcagtcaatgacctttatatccagaagcagtttccaatcctgcttgacttcaaaactaaagtaagagagtattactttgctgaggcccagatagctgacttctcagaccctgccttcatatcaaaaaccaacaaccacatcatgaagctcaccaagggcctcataaaagatgctctggagaatatagacccccatccttgcacacctgactctgtcactcaagcctttctccaccaggcccctcatctgaataccaagcacagaaatgagtggtgtgactaattccttacctctcccaaggagggtacacaactagcaccattcttgatgtccagggaagaagccacctcaagacatatgaggggtgccctgggctaatgttagggcttaattttctcaaagcctgacctttcaaatccatgatgaatgccatcagtccctcctgctgttgcctccctgtgacctggaggacagtgtgtgccatgtctcccatactagagataaataaatgtagccacatttactgtgaaaaaaatataa

SEQ ID NO: 419687 - DNA, 2174 bp, Homo sapiens
cttggctgctttcatctctgaagcgccacttctcagaaacacagagctttagctccgccaaaatgaaacactcattaaacgcacttctcattttcctcatcataacatctgcgtggggtgggagcaaaggcccgctggatcagctagagaaaggaggggaaactgctcagtctgcagatccccagtgggagcagttaaataacaaaaacctgagcatgcctcttctccctgccgacttccacaaggtggacctggagaagatattcagtgaagacgacgactacatcgacatcgtcgacagtctgtcagtttccccgacagactctgatgtgagtgctgggaacatcctccagctttttcatggcaagagccggatccagcgtcttaacatcctcaacgccaagttcgctttcaacctctaccgagtgctgaaagaccaggtcaacactttcgataacatcttcatagcacccgttggcatttctactgcgatgggtatgatttccttaggtctgaagggagagacccatgaacaagtgcactcgattttgcattttaaagactttgttaatgccagcagcaagtatgaaatcacgaccattcataatctcttccgtaagctgactcatcgcctcttcaggaggaattttgggtacacactgcggtcagtcaatgacctttatatccagaagcagtttccaatcctgcttgacttcaaaactaaagtaagagagtattactttgctgaggcccagatagctgacttctcagaccctgccttcatatcaaaaaccaacaaccacatcatgaagctcaccaagggcctcataaaagatgctctggagaatatagaccctgctacccagatgatgattctcaactgcatctacttcaaaggatcctgggtgaataaattcccagtggaaatgacacacaaccacaacttccggctgaatgagagagaggtagttaaggtttccatgatgcagaccaaggggaacttcctcgcagcaaatgaccaggagctggactgcgacatcctccagctggaatacgtggggggcatcagcatgctaattgtggtcccacacaagatgtctgggatgaagaccctcgaagcgcaactgacaccccgggtggtggagagatggcaaaaaagcatgacaaacagaactcgagaagtgcttctgccgaaattcaagctggagaagaactacaatctagtggagtccctgaagttgatggggatcaggatgctgtttgacaaaaatggcaacatggcaggcatctcagaccaaaggatcgccatcgacctgttcaagcaccaaggcacgatcacagtgaacgaggaaggcacccaagccaccactgtgaccacggtggggttcatgccgctgtccacccaagtccgcttcactgtcgaccgcccctttcttttcctcatctacgagcaccgcaccagctgcctgctcttcatgggaagagtggccaaccccagcaggtcctagaggtggaggtctaggtgtctgaagtgccttgggggcaccctcattttgtttccattccaacaacgagaacagagatgttctggcatcatttacgtagtttacgctaccaatctgaattcgaggcccatatgagaggagcttagaaacgaccaagaagagaggcttgttggaatcaattctgcacaatagcccatgctgtaagctcatagaagtcactgtaactgtagtgtgtctgctgttacctagagggtctcacctccccactcttcacagcaaacctgagcagcgcgtcctaagcacctcccgctccggtgaccccatccttgcacacctgactctgtcactcaagcctttctccaccaggcccctcatctgaataccaagcacagaaatgagtggtgtgactaattccttacctctcccaaggagggtacacaactagcaccattcttgatgtccagggaagaagccacctcaagacatatgaggggtgccctgggctaatgttagggcttaattttctcaaagcctgacctttcaaatccatgatgaatgccatcagtccctcctgctgttgcctccctgtgacctggaggacagtgtgtgccatgtctcccatactagagataaataaatgtagccacatttactgtgaaaaaaatataa

SEQ ID NO: 419688 - DNA, 2180 bp, Homo sapiens
cttggctgctttcatctctgaagcgccacttctcagaaacacagagctttagctccgccaaaatgaaacactcattaaacgcacttctcattttcctcatcataacatctgcgtggggtgggagcaaaggcccgctggatcagctagagaaaggaggggaaactgctcagtctgcagatccccagtgggagcagttaaataacaaaaacctgagcatgcctcttctccctgccgacttccacaaggaaaacaccgtcaccaacgactggattccagagggggaggaggacgacgactatctggacctggagaagatattcagtgaagacgacgactacatcgacatcgtcgacagtctgtcagtttccccgacagactctgatgtgagtgctgggaacatcctccagctttttcatggcaagagccggatccagcgtcttaacatcctcaacgccaagttcgctttcaacctctaccgagtgctgaaagaccaggtcaacactttcgataacatcttcatagcacccgttggcatttctactgcgatgggtatgatttccttaggtctgaagggagagacccatgaacaagtgcactcgattttgcattttaaagactttgttaatgccagcagcaagtatgaaatcacgaccattcataatctcttccgtaagctgactcatcgcctcttcaggaggaattttgggtacacactgcggtcagtcaatgacctttatatccagaagcagtttccaatcctgcttgacttcaaaactaaagtaagagagtattactttgctgaggcccagatagctgacttctcagaccctgccttcatatcaaaaaccaacaaccacatcatgaagctcaccaagggcctcataaaagatgctctggagaatatagaccctgctacccagatgatgattctcaactgcatctacttcaaaggatcctgggtgaataaattcccagtggaaatgacacacaaccacaacttccggctgaatgagagagaggtagttaaggtttccatgatgcagaccaaggggaacttcctcgcagcaaatgaccaggagctggactgcgacatcctccagctggaatacgtggggggcatcagcatgctaattgtggtcccacacaagatgtctgggatgaagaccctcgaagcgcaactgacaccccgggtggtggagagatggcaaaaaagcatgacaaacagaactcgagaagtgcttctgccgaaattcaagctggagaagaactacaatctagtggagtccctgaagttgatggggatcaggatgctgtttgacaaattcaagcaccaaggcacgatcacagtgaacgaggaaggcacccaagccaccactgtgaccacggtggggttcatgccgctgtccacccaagtccgcttcactgtcgaccgcccctttcttttcctcatctacgagcaccgcaccagctgcctgctcttcatgggaagagtggccaaccccagcaggtcctagaggtggaggtctaggtgtctgaagtgccttgggggcaccctcattttgtttccattccaacaacgagaacagagatgttctggcatcatttacgtagtttacgctaccaatctgaattcgaggcccatatgagaggagcttagaaacgaccaagaagagaggcttgttggaatcaattctgcacaatagcccatgctgtaagctcatagaagtcactgtaactgtagtgtgtctgctgttacctagagggtctcacctccccactcttcacagcaaacctgagcagcgcgtcctaagcacctcccgctccggtgaccccatccttgcacacctgactctgtcactcaagcctttctccaccaggcccctcatctgaataccaagcacagaaatgagtggtgtgactaattccttacctctcccaaggagggtacacaactagcaccattcttgatgtccagggaagaagccacctcaagacatatgaggggtgccctgggctaatgttagggcttaattttctcaaagcctgacctttcaaatccatgatgaatgccatcagtccctcctgctgttgcctccctgtgacctggaggacagtgtgtgccatgtctcccatactagagataaataaatgtagccacatttactgtgaaaaaaatataa

SEQ ID NO: 419689 - DNA, 1259 bp, Homo sapiens
cttggctgctttcatctctgaagcgccacttctcagaaacacagagctttagctccgccaaaatgaaacactcattaaacgcacttctcattttcctcatcataacatctgcgtggggtgggagcaaaggcccgctggatcagctagagaaaggaggggaaactgctcagtctgcagatccccagtgggagcagttaaataacaaaaacctgagcatgcctcttctccctgccgacttccacaaggaaaacaccgtcaccaacgactggattccagagggggaggaggacgacgactatctggacctggagaagatattcagtgaagacgacgactacatcgacatcgtcgacagtctgtcagtttccccgacagactctgatgtgagtgctgggaacatcctccagctttttcatggcaagagccggatccagcgtcttaacatcctcaacgccaagttcgctttcaacctctaccgagtgctgaaagaccaggtcaacactttcgataacatcttcatagcacccgttggcatttctactgcgatgggtatgatttccttaggtctgaagggagagacccatgaacaagtgcactcgattttgcattttaaagactttgttaatgccagcagcaagtatgaaatcacgaccattcataatctcttccgtaagctgactcatcgcctcttcaggaggaattttgggtacacactgcggtcagtcaatgacctttatatccagaagcagtttccaatcctgcttgacttcaaaactaaagtaagagagtattactttgctgaggcccagatagctgacttctcagaccctgccttcatatcaaaaaccaacaaccacatcatgaagctcaccaagggcctcataaaagatgctctggagaatatagacccccatccttgcacacctgactctgtcactcaagcctttctccaccaggcccctcatctgaataccaagcacagaaatgagtggtgtgactaattccttacctctcccaaggagggtacacaactagcaccattcttgatgtccagggaagaagccacctcaagacatatgaggggtgccctgggctaatgttagggcttaattttctcaaagcctgacctttcaaatccatgatgaatgccatcagtccctcctgctgttgcctccctgtgacctggaggacagtgtgtgccatgtctcccatactagagataaataaatgtagccacatttactgtgaaaaaaatataa

SEQ ID NO: 419690 - DNA, 381 bp, Homo sapiens
tgacagatgtgacagatgaagaaatagaagcgagttaggtgccttaccatggtcaaacaactagttcgtatcagaccctactccagaaactattccagtccgggtaacctctcgttaacctctcttgttagaaatgcaaatttctgcccaaatcaggcctcaggaatcaagagactgtggggtcggctctgcaggctatctgaatgaggcctccagggaaatcagattcactctcaagggtgagacgatttccctaaaggaaccttctcataacagcctcttcctgtggcctttacaggatcctgggtgaataaattcccagtggaaatgacacacaaccacaacttccggctgaatgagagagaggtagttaaggtttcc

SEQ ID NO: 419691 - DNA, 2228 bp, Homo sapiens
cttggctgctttcatctctgaagcgccacttctcagaaacacagagctttagctccgccaaaatgaaacactcattaaacgcacttctcattttcctcatcataacatctgcgtggggtgggagcaaaggcccgctggatcagctagagaaaggaggggaaactgctcagtctgcagatccccagtgggagcagttaaataacaaaaacctgagcatgcctcttctccctgccgacttccacaaggaaaacaccgtcaccaacgactggattccagagggggaggaggacgacgactatctggacctggagaagatattcagtgaagacgacgactacatcgacatcgtcgacagtctgtcagtttccccgacagactctgatgtgagtgctgggaacatcctccagctttttcatggcaagagccggatccagcgtcttaacatcctcaacgccaagttcgctttcaacctctaccgagtgctgaaagaccaggtcaacactttcgataacatcttcatagcacccgttggcatttctactgcgatgggtatgatttccttaggtctgaagggagagacccatgaacaagtgcactcgattttgcattttaaagactttgttaatgccagcagcaagtatgaaatcacgaccattcataatctcttccgtaagctgactcatcgcctcttcaggaggaattttgggtacacactgcggtcagtcaatgacctttatatccagaagcagtttccaatcctgcttgacttcaaaactaaagtaagagagtattactttgctgaggcccagatagctgacttctcagaccctgccttcatatcaaaaaccaacaaccacatcatgaagctcaccaagggcctcataaaagatgctctggagaatatagaccctgctacccagatgatgattctcaactgcatctacttcaaaggatcctgggtgaataaattcccagtggaaatgacacacaaccacaacttccggctgaatgagagagaggtagttaaggtttccatgatgcagaccaaggggaacttcctcgcagcaaatgaccaggagctggactgcgacatcctccagctggaatacgtggggggcatcagcatgctaattgtggtcccacacaagatgtctgggatgaagaccctcgaagcgcaactgacaccccgggtggtggagagatggcaaaaaagcatgacaaacagaactcgagaagtgcttctgccgaaattcaagctggagaagaactacaatctagtggagtccctgaagttgatggggatcaggatgctgtttgacaaaaatggcaacatggcaggcatctcagaccaaaggatcgccatcgacctgttcaagcaccaaggcacgatcacagtgaacgaggaaggcacccaagccaccactgtgaccacggtggggttcatgccgctgtccacccaagtccgcttcactgtcgaccgcccctttcttttcctcatctacgagcaccgcaccagctgcctgctcttcatgggaagagtggccaaccccagcaggtcctagaggtggaggtctaggtgtctgaagtgccttgggggcaccctcattttgtttccattccaacaacgagaacagagatgttctggcatcatttacgtagtttacgctaccaatctgaattcgaggcccatatgagaggagcttagaaacgaccaagaagagaggcttgttggaatcaattctgcacaatagcccatgctgtaagctcatagaagtcactgtaactgtagtgtgtctgctgttacctagagggtctcacctccccactcttcacagcaaacctgagcagcgcgtcctaagcacctcccgctccggtgaccccatccttgcacacctgactctgtcactcaagcctttctccaccaggcccctcatctgaataccaagcacagaaatgagtggtgtgactaattccttacctctcccaaggagggtacacaactagcaccattcttgatgtccagggaagaagccacctcaagacatatgaggggtgccctgggctaatgttagggcttaattttctcaaagcctgacctttcaaatccatgatgaatgccatcagtccctcctgctgttgcctccctgtgacctggaggacagtgtgtgccatgtctcccatactagagataaataaatgtagccacatttactgtgaaaaaaatataa

SEQ ID NO: 419692 - DNA, 1776 bp, Homo sapiens
cttggctgctttcatctctgaagcgccacttctcagaaacacagagctttagctccgccaaaatgaaacactcattaaacgcacttctcattttcctcatcataacatctgcgtggggtgggagcaaaggcccgctggatcagctagagaaaggaggggaaactgctcagtctgcagatccccagtgggagcagttaaataacaaaaacctgagcatgcctcttctccctgccgacttccacaaggaaaacaccgtcaccaacgactggattccagagggggaggaggacgacgactatctggacctggagaagatattcagtgaagacgacgactacatcgacatcgtcgacagtctgtcagtttccccgacagactctgatgtgagtgctgggaacatcctccagctttttcatggcaagagccggatccagcgtcttaacatcctcaacgccaagttcgctttcaacctctaccgagtgctgaaagaccaggtcaacactttcgataacatcttcatagcacccgttggcatttctactgcgatgggtatgatttccttaggtctgaagggagagacccatgaacaagtgcactcgattttgcattttaaagactttgttaatgccagcagcaagtatgaaatcacgaccattcataatctcttccgtaagctgactcatcgcctcttcaggaggaattttgggtacacactgcggtcagtcaatgacctttatatccagaagcagtttccaatcctgcttgacttcaaaactaaagtaagagagtattactttgctgaggcccagatagctgacttctcagaccctgccttcatatcaaaaaccaacaaccacatcatgaagctcaccaagggcctcataaaagatgctctggagaatatagaccctgctacccagatgatgattctcaactgcatctacttcaaaggatcctgggtgaataaattcccagtggaaatgacacacaaccacaacttccggctgaatgagagagaggtagttaaggtttccatgatgcagaccaaggggaacttcctcgcactgcctgctcttcatgggaagagtggccaaccccagcaggtcctagaggtggaggtctaggtgtctgaagtgccttgggggcaccctcattttgtttccattccaacaacgagaacagagatgttctggcatcatttacgtagtttacgctaccaatctgaattcgaggcccatatgagaggagcttagaaacgaccaagaagagaggcttgttggaatcaattctgcacaatagcccatgctgtaagctcatagaagtcactgtaactgtagtgtgtctgctgttacctagagggtctcacctccccactcttcacagcaaacctgagcagcgcgtcctaagcacctcccgctccggtgaccccatccttgcacacctgactctgtcactcaagcctttctccaccaggcccctcatctgaataccaagcacagaaatgagtggtgtgactaattccttacctctcccaaggagggtacacaactagcaccattcttgatgtccagggaagaagccacctcaagacatatgaggggtgccctgggctaatgttagggcttaattttctcaaagcctgacctttcaaatccatgatgaatgccatcagtccctcctgctgttgcctccctgtgacctggaggacagtgtgtgccatgtctcccatactagagataaataaatgtagccacatttactgtgaaaaaaatataa

SEQ ID NO: 419693 - DNA, 1718 bp, Homo sapiens
cttggctgctttcatctctgaagcgccacttctcagaaacacagagctttagctccgccaaaatgaaacactcattaaacgcacttctcattttcctcatcataacatctgcgtggggtgggagcaaaggcccgctggatcagctagagaaaggaggggaaactgctcagtctgcagatccccagtgggagcagttaaataacaaaaacctgagcatgcctcttctccctgccgacttccacaaggaaaacaccgtcaccaacgactggattccagagggggaggaggacgacgactatctggacctggagaagatattcagtgaagacgacgactacatcgacatcgtcgacagtctgtcagtttccccgacagactctgatgtgagtgctgggaacatcctccagctttttcatggcaagagccggatccagcgtcttaacatcctcaacgccaagttcgctttcaacctctaccgagtgctgaaagaccaggtcaacactttcgataacatcttcatagcacccgttggcatttctactgcgatgggtatgatttccttaggtctgaagggagagacccatgaacaagtgcactcgattttgcattttaaagactttgttaatgccagcagcaagtatgaaatcacgaccattcataatctcttccgtaagctgactcatcgcctcttcaggaggaattttgggtacacactgcggtcagtcaatgacctttatatccagaagcagtttccaatcctgcttgacttcaaaactaaagtaagagagtattactttgctgaggcccagatagctgacttctcagaccctgccttcatatcaaaaaccaacaaccacatcatgaagctcaccaagggcctcataaaagatgctctggagaatatagaccctgctacccagatgatgattctcaactgcatctacttcaaaggatcctgggtgaataaattcccagtggaaatgacacacaaccacaacttccggctgaatgagagagaggtagttaaggtttccatgatgcagaccaaggggaacttcctcgcagcaaatgaccaggagctggactgcgacatcctccagctggaatacgtggggggcatcagcatgctaattgtggtcccacacaagatgtctgggatgaagaccctcgaagcgcaactgacaccccgggtggtggagagatggcaaaaaagcatgacaaacagaactcgagaagtgcttctgccgaaattcaagctggagaagaactacaatctagtggagtccctgaagttgatggggatcaggatgctgtttgacaaaaatggcaacatggcaggcatctcagaccaaaggatcgccatcgacctgttcaagcaccaaggcacgatcacagtgaacgaggaaggcacccaagccaccactgtgaccacggtggggttcatgccgctgtccacccaagtccgcttcactgtcgaccgcccctttcttttcctcatctacgagcaccgcaccagctgcctgctcttcatgggaagagtggccaaccccagcaggtcctagaggtggaggtctaggtgtctgaagtgccttgggggcaccctcatttggccatctctccaccacccggggtgtcagttgcgcttcgagggtcttcatcccagacatcttgtgtgtgaccacatattagcattacgatgcccgccacgtattcaccgg

SEQ ID NO: 419694 - DNA, 901 bp, Homo sapiens
ggattccgcttcggggcccgcgcgagttgggtgcttcggagggcgcgagaggagcgggcgggtgctgctgagtaatccccgcggcggcggccggacgcccacctcccacgccgcgccgcagccgggccgcggctcctccctccgcggtccttccctcctcttccctcccgtcttctcccctcccctcccctcccctcccggctccgcttggctccgggcaggtagagccgggctccgggcgcgcgcggggccgcagcagctgctcccgatctcgcctcggcccagcgcagggcctcgcacgcccatggccggctcggagcagcatgcggccgcggcggcgggacgacggagactcggacgcggcagcggcggcggcggcgcccctgcaggacgcggagctggccctggccggcatcaacatgctgctcaacaacggcttcagggagtcggaccagcttttcaaacaatacagaaaaagttttttgacttctgagaaaacctcagcgcttcctggagaaactcaaaggcgcttgtaagagatgttgagtcagcaggcctctgagcctcttctctgcctaaaaccatgtcagattcttgggaggactggaaggacttgcaggctgtccatgatttctagacaagtcatctgctcacagacaagaatgtgtctctgccttgctcctggagacgataggagagtccacagatgcagagatgtaagaaaaggagaagaaatgaaaagcagaaatggtttaagggaactggcgggaaagacaggaaactcatctgttgactttttccatcctcttcaactcagtggtgtgttggaaaaaggcatcttttttcccccaactattacactgtctgaaaaggtcctaattaaatattcattaaagattca

SEQ ID NO: 419695 - DNA, 638 bp, Homo sapiens
gtgaaactccatctcaaaaaaaaaaaaaaaaagaagaatattggagtcattatacttgaatgaacagttgactcattgctatgtctacagtgaattgttttaattaacatagcctcctattataccattttctgcctgcgtatatataaacacagattttatgggataatgtgtttttcttatagactgtaggaagaggcagagctctacttcttcaagcaaaggtaaatatcctgaatctacctttctccagtggcccttcttatcccatacactgtatacctgagtctgaattcaagaaagtttgtgcaatgatgttctggttggtaatatttctggaaaggaaaaatgacaaccaattgaatcagtgagctcttgagttttaagggacattacaagatcataaggaacttcgatgaaattgttcatcctgctttagaaacactcttagtctttgggtgggaagataacttttgattttataactatgtccctgaattaagaatttctaatagcaacttatattgagcacaacataagactactttttcaagaataactcgaggaaaattgtccaaagagaaccttattgacattcagttgacgtttttaaaaatgaatacaaagtttgaggtttg

SEQ ID NO: 419696 - DNA, 584 bp, Homo sapiens
gtgaaactccatctcaaaaaaaaaaaaaaaaagaagaatattggagtcattatacttgaatgaacagttgactcattgctatgtctacagtgaattgttttaattaacatagcctcctattataccattttctgcctgcgtatatataaacacagattttatgggataatgtgtttttcttatagactgtaggaagaggcagagctctacttcttcaagcaaaggtaaatatcctgaatctacctttctccagtggcccttcttatcccatacactgtatacctgagtctgaattcaagaaagtttgtgcaatgatgttctggttggtaatatttctggaaaggaatcataaggaacttcgatgaaattgttcatcctgctttagaaacactcttagtctttgggtgggaagataacttttgattttataactatgtccctgaattaagaatttctaatagcaacttatattgagcacaacataagactactttttcaagaataactcgaggaaaattgtccaaagagaaccttattgacattcagttgacgtttttaaaaatgaatacaaagtttgaggtttg

SEQ ID NO: 419697 - DNA, 409 bp, Homo sapiens
cctagcattcaaattacagtcatacatctcttaatgacatgctgagaaatgcgttgttaggcaattccttccttgtgcaaacatcatagagtacttacacagacctaggtggtatcacctactacacaaccaggctgtatctatagcctattgcttctgtgctataattgtgtacagcatgttactgtattgaatactgtaggcaaccgtaacacaatggtaagtatttgtgtatctaaatatagaaaaagtatagtaaaaatacagtttttaaaagttaaaatatggccaggctcagtggctcatgcctgtaatcccagcagtttgggaggctgaggtgggagtatcacttgagcccagaagttcaaaaccaacctgggcaacaaagtgaaacctcatctctgcaaaa

SEQ ID NO: 419698 - DNA, 2444 bp, Homo sapiens
ggattccgcttcggggcccgcgcgagttgggtgcttcggagggcgcgagaggagcgggcgggtgctgctgagtaatccccgcggcggcggccggacgcccacctcccacgccgcgccgcagccgggccgcggctcctccctccgcggtccttccctcctcttccctcccgtcttctcccctcccctcccctcccctcccggctccgcttggctccgggcaggtagagccgggctccgggcgcgcgcggggccgcagcagctgctcccgatctcgcctcggcccagcgcagggcctcgcacgcccatggccggctcggagcagcatgcggccgcggcggcgggacgacggagactcggacgcggcagcggcggcggcggcgcccctgcaggacgcggagctggccctggccggcatcaacatgctgctcaacaacggcttcagggagtcggaccagcttttcaaacaatacagaaatcatagcccactaatgagttttggagccagctttgtcagttttttgaatgccatgatgacatttgaggaagaaaaaatgcagttggcatgtgatgacttaaaaaccacagaaaaactgtgtgaaagtgaagaggctggagtaattgaaacaatcaagaataaaattaagaagaacgttgatgtccgaaaatccgccccctctatggttgatcggcttcagaggcagataatcatagctgactgccaggtttacctggctgtgctttcatttgtaaaacaagaattgtcagcttatatcaaaggtgggtggatccttaggaaagcctggaagatttacaataaatgctatctggacatcaatgcccttcaggagctgtatcagaagaagctaactgaagagtccttgacttctgatgctgcaaatgataatcacattgtggctgaaggggtgtctgaggagtctctgaacagactgaaaggtgctgttagctttggatatggcctttttcacctttgcatatccatggtgcccccaaacctgctcaaaatcatcaacctgctgggttttcctggagaccgcctacaggggctttcttcactgatgtatgcaagcgaaaattagctctgctctggtatcatactgtagtccgcccgttttttgccttggatggcagtgataacaaggcaggcctggatgaagctaaggaaattctccttaaaaaagaagctgcttatccaaattcttccctctttatgtttttcaagggacggatacaacgactagagtgtcaaatcaacagtgccttgacatctttccacactgctttggaacttgcagtagaccagagagaaattcaacatgtctgtctgtatgaaattggttggtgcagcatgatagagctcaatttcaaggatgcatttgattcctttgagaggctaaaaaatgagtccaggtggtcccagtgctattatgcctacttgactgcagtttgtcagggagccactggtgatgtggatggggcacagattgtctttaaagaagttcagaaactcttcaaaaggaaaaacaatcagattgaacagttctcggtgaaaaagcgtctattgaagtgttgtacttgtggaaagctcttccaaactgttccttccccaacctgcagaggatgagtcaagcttgccatgaagtggatgactcatctgttgttggattaaagtatttgcttcttggtgccatacacaaatgtctaggaaactcagaagatgctgttcagtacttccagcgagctgttaaagatgaattgtgtcgtcagaataatttatatgttcagccgtatgcctgttatgaacttggctgtcttctattagacaaaccagagactgtaggaagaggcagagctctacttcttcaagcaaaggaggatttctctggctacgactttgaaaacagattgcatgtccgcatccatgctgctctggcctctctgagggaattggttcctcagtgacagacccggaacacccgctccgtccctccccacccagggtccgcactttaaaataaaagcagaggacaaagctcttgtgaagatgggcttttcttctgaaaaccacctgtgccagggacacattttcccagttaagctgacatattaaagatctcctcttttaaacatgtagctgaaaagtaataatgatgttgaggaggatgatgatggtaataataactaaccacctggggagagggttaagtgaccttgctcaaacgttttagttttgtgatttattatttttaaaataaaatcaaacggaacatccaacccaagatcctgtaggaacacctaccttaagcacatatctgaatgggtaacatgatgaggtacctgtaaaattattaacaatatcatgacatagcatttatatttgtgttttgaaaaaataaaagtgctttctagtgttttactttatcctc

SEQ ID NO: 419699 - DNA, 2493 bp, Homo sapiens
ggattccgcttcggggcccgcgcgagttgggtgcttcggagggcgcgagaggagcgggcgggtgctgctgagtaatccccgcggcggcggccggacgcccacctcccacgccgcgccgcagccgggccgcggctcctccctccgcggtccttccctcctcttccctcccgtcttctcccctcccctcccctcccctcccggctccgcttggctccgggcaggtagagccgggctccgggcgcgcgcggggccgcagcagctgctcccgatctcgcctcggcccagcgcagggcctcgcacgcccatggccggctcggagcagcatgcggccgcggcggcgggacgacggagactcggacgcggcagcggcggcggcggcgcccctgcaggacgcggagctggccctggccggcatcaacatgctgctcaacaacggcttcagggagtcggaccagcttttcaaacaatacagaaatcatagcccactaatgagttttggagccagctttgtcagttttttgaatgccatgatgacatttgaggaagaaaaaatgcagttggcatgtgatgacttaaaaaccacagaaaaactgtgtgaaagtgaagaggctggagtaattgaaacaatcaagaataaaattaagaagaacgttgatgtccgaaaatccgccccctctatggttgatcggcttcagaggcagataatcatagctgactgccaggtttacctggctgtgctttcatttgtaaaacaagaattgtcagcttatatcaaaggtgggtggatccttaggaaagcctggaagatttacaataaatgctatctggacatcaatgcccttcaggagctgtatcagaagaagctaactgaagagtccttgacttctgatgctgcaaatgataatcacattgtggctgaaggggtgtctgaggagtctctgaacagactgaaaggtgctgttagctttggatatggcctttttcacctttgcatatccatggtgcccccaaacctgctcaaaatcatcaacctgctgggttttcctggagaccgcctacaggggctttcttcactgatgtatgcaagcgaaaattagctctgctctggtatcatactgtagtccgcccgttttttgccttggatggcagtgataacaaggcaggcctggatgaagctaaggaaattctccttaaaaaagaagctgcttatccaaattcttccctctttatgtttttcaagggacggatacaacgactagagtgtcaaatcaacagtgccttgacatctttccacactgctttggaacttgcagtagaccagagagaaattcaacatgtctgtctgtatgaaattggttggtgcagcatgatagagctcaatttcaaggatgcatttgattcctttgagaggctaaaaaatgagtccaggtggtcccagtgctattatgcctacttgactgcagtttgtcagggagccactggtgatgtggatggggcacagattgtctttaaagaagttcagaaactcttcaaaaggaaaaacaatcagattgaacagttctcggtgaaaaaggcagagcgatttcggaagcaaaccccaaccaaagcgctctgtgtgttggcgtctattgaagtgttgtacttgtggaaagctcttccaaactgttccttccccaacctgcagaggatgagtcaagcttgccatgaagtggatgactcatctgttgttggattaaagtatttgcttcttggtgccatacacaaatgtctaggaaactcagaagatgctgttcagtacttccagcgagctgttaaagatgaattgtgtcgtcagaataatttatatgttcagccgtatgcctgttatgaacttggctgtcttctattagacaaaccagagactgtaggaagaggcagagctctacttcttcaagcaaaggaggatttctctggctacgactttgaaaacagattgcatgtccgcatccatgctgctctggcctctctgagggaattggttcctcagtgacagacccggaacacccgctccgtccctccccacccagggtccgcactttaaaataaaagcagaggacaaagctcttgtgaagatgggcttttcttctgaaaaccacctgtgccagggacacattttcccagttaagctgacatattaaagatctcctcttttaaacatgtagctgaaaagtaataatgatgttgaggaggatgatgatggtaataataactaaccacctggggagagggttaagtgaccttgctcaaacgttttagttttgtgatttattatttttaaaataaaatcaaacggaacatccaacccaagatcctgtaggaacacctaccttaagcacatatctgaatgggtaacatgatgaggtacctgtaaaattattaacaatatcatgacatagcatttatatttgtgttttgaaaaaataaaagtgctttctagtgttttactttatcctc

SEQ ID NO: 419700 - DNA, 2340 bp, Homo sapiens
ggattccgcttcggggcccgcgcgagttgggtgcttcggagggcgcgagaggagcgggcgggtgctgctgagtaatccccgcggcggcggccggacgcccacctcccacgccgcgccgcagccgggccgcggctcctccctccgcggtccttccctcctcttccctcccgtcttctcccctcccctcccctcccctcccggctccgcttggctccgggcaggtagagccgggctccgggcgcgcgcggggccgcagcagctgctcccgatctcgcctcggcccagcgcagggcctcgcacgcccatggccggctcggagcagcatgcggccgcggcggcgggacgacggagactcggacgcggcagcggcggcggcggcgcccctgcaggacgcggagctggccctggccggcatcaacatgctgctcaacaacggcttcagggagtcggaccagcttttcaaacaatacagaaatcatagcccactaatgagttttggagccagctttgtcagttttttgaatgccatgatgacatttgaggaagaaaaaatgcagttggcatgtgatgacttaaaaaccacagaaaaactgtgtgaaagtgaagaggctggagtaattgaaacaatcaagaataaaattaagaagaacgttgatgtccgaaaatccgccccctctatggttgatcggcttcagaggcagataatcatagctgactgccaggtttacctggctgtgctttcatttgtaaaacaagaattgtcagcttatatcaaaggtgggtggatccttaggaaagcctggaagatttacaataaatgctatctggacatcaatgcccttcaggagctgtatcagaagaagctaactgaagagtccttgacttctgatgctgcaaatgataatcacattgtggctgaaggggtgtctgaggagtctctgaacagactgaaaggtgctgttagctttggatatggcctttttcacctttgcatatccatggtgcccccaaacctgctcaaaatcatcaacctgctgggttttcctggagaccgcctacaggggctttcttcactgatgtatgcaagcgaaaattagctctgctctggtatcatactgtagtccgcccgttttttgccttggatggcagtgataacaaggcaggcctggatgaagctaaggaaattctccttaaaaaagaagctgcttatccaaattcttccctctttatgtttttcaagggacggatacaacgactagagtgtcaaatcaacagtgccttgacatctttccacactgctttggaacttgcagtagaccagagagaaattcaacatgtctgtctgtatgaaattggttggtgcagcatgatagagctcaatttcaaggatgcatttgattcctttgagaggctaaaaaatgagtccaggtggtcccagtgctattatgcctacttgactgcagtttgtcagggagccactggtgatgtggatggggcacagattgtctttaaagaagttcagaaactcttcaaaaggaaaaacaatcagattgaacagttctcggtgaaaaaggcagagcgatttcggaagcaaaccccaaccaaagcgctctgtgtgttggcgtctattgaagtgttgtacttgtggaaagctcttccaaactgttccttccccaacctgcagaggatgagtcaagcttgccatgaagtggatgactcatctgttgttggattaaagtatttgcttcttggtgccatacacaaatgtctaggaaactcagaagatgctgttcagtacttccagcgagctgttaaagatgaattgtgtcgtcagaataatttatatgttcagccgtatgcctgttatgaacttggctgtcttctattagacaaaccagagactgtaggaagaggcagagctctacttcttcaagcaaaggaggatttctctggctacgactttgaaaacagattgcatgtccgcatccatgctgctctggcctctctgagggaattggttcctcagtgacagacccggaacacccgctccgtccctccccacccagggtccgcactttaaaataaaagcagaggacaaagctcttgtgaagatgggcttttcttctgaaaaccacctgtgccagggacacattttcccagttaagctgacatattaaagatctcctcttttaaacatgtagctgaaaagtaataatgatgttgaggaggatgatgatggtaataataactaaccacctggggagagggttaagtgaccttgctcaaacgttttagttttgtgatttattatttttaaaataaaatcaaacggaacatcca

SEQ ID NO: 419701 - DNA, 1268 bp, Homo sapiens
ggggtttcgccatgttggccaggctggtctcgaattcttgacctcaggtgatccactcgcctctgccttccaaagtgctgggattactggcatgaaccaccatgtccagcccattgtggaatagtctttaaacatatttgctcctgcttttttttttttcaagtatcatcacttcaggtatcccttatggcattttccctgacttgtacttaagaaatataattatggtttcttacagtttgtcagggagccactggtgatgtggatggggcacagattgtctttaaagaagttcagaaactcttcaaaaggaaaaacaatcagattgaacagttctcggtgaaaaaggcagagcgatttcggaagcaaaccccaaccaaagcgctctgtgtgttggcgtctattgaagtgttgtacttgtggaaagctcttccaaactgttccttccccaacctgcagaggatgagtcaagcttgccatgaagtggatgactcatctgttgttggattaaagtatttgcttcttggtgccatacacaaatgtctaggaaactcagaagatgctgttcagtacttccagcgagctgttaaagatgaattgtgtcgtcagaataatttatatgttcagccgtatgcctgttatgaacttggctgtcttctattagacaaaccagagactgtaggaagaggcagagctctacttcttcaagcaaaggaggatttctctggctacgactttgaaaacagattgcatgtccgcatccatgctgctctggcctctctgagggaattggttcctcagtgacagacccggaacacccgctccgtccctccccacccagggtccgcactttaaaataaaagcagaggacaaagctcttgtgaagatgggcttttcttctgaaaaccacctgtgccagggacacattttcccagttaagctgacatattaaagatctcctcttttaaacatgtagctgaaaagtaataatgatgttgaggaggatgatgatggtaataataactaaccacctggggagagggttaagtgaccttgctcaaacgttttagttttgtgatttattatttttaaaataaaatcaaacggaacatccaacccaagatcctgtaggaacacctaccttaagcacatatctgaatgggtaacatgatgaggtacctgtaaaattattaacaatatcatgacatagcatttatatttgtgttttgaaaaaataaaagtgctttctagtgttttactttatcctc

SEQ ID NO: 419702 - DNA, 2329 bp, Homo sapiens
ggattccgcttcggggcccgcgcgagttgggtgcttcggagggcgcgagaggagcgggcgggtgctgctgagtaatccccgcggcggcggccggacgcccacctcccacgccgcgccgcagccgggccgcggctcctccctccgcggtccttccctcctcttccctcccgtcttctcccctcccctcccctcccctcccggctccgcttggctccgggcaggtagagccgggctccgggcgcgcgcggggccgcagcagctgctcccgatctcgcctcggcccagcgcagggcctcgcacgcccatggccggctcggagcagcatgcggccgcggcggcgggacgacggagactcggacgcggcagcggcggcggcggcgcccctgcaggacgcggagctggccctggccggcatcaacatgctgctcaacaacggcttcagggagtcggaccagcttttcaaacaatacagaaatcatagcccactaatgagttttggagccagctttgtcagttttttgaatgccatgatgacatttgaggaagaaaaaatgcagttggcatgtgatgacttaaaaaccacagaaaaactgtgtgaaagtgaagaggctggagtaattgaaacaatcaagaataaaattaagaagaaccttatatcaaaggtgggtggatccttaggaaagcctggaagatttacaataaatgctatctggacatcaatgcccttcaggagctgtatcagaagaagctaactgaagagtccttgacttctgatgctgcaaatgataatcacattgtggctgaaggggtgtctgaggagtctctgaacagactgaaaggtgctgttagctttggatatggcctttttcacctttgcatatccatggtgcccccaaacctgctcaaaatcatcaacctgctgggttttcctggagaccgcctacaggggctttcttcactgatgtatgcaagcgaaaattagctctgctctggtatcatactgtagtccgcccgttttttgccttggatggcagtgataacaaggcaggcctggatgaagctaaggaaattctccttaaaaaagaagctgcttatccaaattcttccctctttatgtttttcaagggacggatacaacgactagagtgtcaaatcaacagtgccttgacatctttccacactgctttggaacttgcagtagaccagagagaaattcaacatgtctgtctgtatgaaattggttggtgcagcatgatagagctcaatttcaaggatgcatttgattcctttgagaggctaaaaaatgagtccaggtggtcccagtgctattatgcctacttgactgcagtttgtcagggagccactggtgatgtggatggggcacagattgtctttaaagaagttcagaaactcttcaaaaggaaaaacaatcagattgaacagttctcggtgaaaaagcgtctattgaagtgttgtacttgtggaaagctcttccaaactgttccttccccaacctgcagaggatgagtcaagcttgccatgaagtggatgactcatctgttgttggattaaagtatttgcttcttggtgccatacacaaatgtctaggaaactcagaagatgctgttcagtacttccagcgagctgttaaagatgaattgtgtcgtcagaataatttatatgttcagccgtatgcctgttatgaacttggctgtcttctattagacaaaccagagactgtaggaagaggcagagctctacttcttcaagcaaaggaggatttctctggctacgactttgaaaacagattgcatgtccgcatccatgctgctctggcctctctgagggaattggttcctcagtgacagacccggaacacccgctccgtccctccccacccagggtccgcactttaaaataaaagcagaggacaaagctcttgtgaagatgggcttttcttctgaaaaccacctgtgccagggacacattttcccagttaagctgacatattaaagatctcctcttttaaacatgtagctgaaaagtaataatgatgttgaggaggatgatgatggtaataataactaaccacctggggagagggttaagtgaccttgctcaaacgttttagttttgtgatttattatttttaaaataaaatcaaacggaacatccaacccaagatcctgtaggaacacctaccttaagcacatatctgaatgggtaacatgatgaggtacctgtaaaattattaacaatatcatgacatagcatttatatttgtgttttgaaaaaataaaagtgctttctagtgttttactttatcctc

SEQ ID NO: 419703 - DNA, 1267 bp, Homo sapiens
gagcccttaacacctgagcaaaggagagaacgctggaggagaaggcgggtgcgagctgagcccttaccacctgagcaaggagagtgtcaaatcaacagtgccttgacatctttccacactgctttggaacttgcagtagaccagagagaaattcaacatgtctgtctgtatgaaattggttggtgcagcatgatagagctcaatttcaaggatgcatttgattcctttgagaggctaaaaaatgagtccaggtggtcccagtgctattatgcctacttgactgcagtttgtcagggagccactggtgatgtggatggggcacagattgtctttaaagaagttcagaaactcttcaaaaggaaaaacaatcagattgaacagttctcggtgaaaaagcgtctattgaagtgttgtacttgtggaaagctcttccaaactgttccttccccaacctgcagaggatgagtcaagcttgccatgaagtggatgactcatctgttgttggattaaagtatttgcttcttggtgccatacacaaatgtctaggaaactcagaagatgctgttcagtacttccagcgagctgttaaagatgaattgtgtcgtcagaataatttatatgttcagccgtatgcctgttatgaacttggctgtcttctattagacaaaccagagactgtaggaagaggcagagctctacttcttcaagcaaaggaggatttctctggctacgactttgaaaacagattgcatgtccgcatccatgctgctctggcctctctgagggaattggttcctcagtgacagacccggaacacccgctccgtccctccccacccagggtccgcactttaaaataaaagcagaggacaaagctcttgtgaagatgggcttttcttctgaaaaccacctgtgccagggacacattttcccagttaagctgacatattaaagatctcctcttttaaacatgtagctgaaaagtaataatgatgttgaggaggatgatgatggtaataataactaaccacctggggagagggttaagtgaccttgctcaaacgttttagttttgtgatttattatttttaaaataaaatcaaacggaacatccaacccaagatcctgtaggaacacctaccttaagcacatatctgaatgggtaacatgatgaggtacctgtaaaattattaacaatatcatgacatagcatttatatttgtgttttgaaaaaataaaagtgctttctagtgttttactttatcctc

SEQ ID NO: 419704 - DNA, 1219 bp, Homo sapiens
ggggtttcgccatgttggccaggctggtctcgaattcttgacctcaggtgatccactcgcctctgccttccaaagtgctgggattactggcatgaaccaccatgtccagcccattgtggaatagtctttaaacatatttgctcctgcttttttttttttcaagtatcatcacttcaggtatcccttatggcattttccctgacttgtacttaagaaatataattatggtttcttacagtttgtcagggagccactggtgatgtggatggggcacagattgtctttaaagaagttcagaaactcttcaaaaggaaaaacaatcagattgaacagttctcggtgaaaaagcgtctattgaagtgttgtacttgtggaaagctcttccaaactgttccttccccaacctgcagaggatgagtcaagcttgccatgaagtggatgactcatctgttgttggattaaagtatttgcttcttggtgccatacacaaatgtctaggaaactcagaagatgctgttcagtacttccagcgagctgttaaagatgaattgtgtcgtcagaataatttatatgttcagccgtatgcctgttatgaacttggctgtcttctattagacaaaccagagactgtaggaagaggcagagctctacttcttcaagcaaaggaggatttctctggctacgactttgaaaacagattgcatgtccgcatccatgctgctctggcctctctgagggaattggttcctcagtgacagacccggaacacccgctccgtccctccccacccagggtccgcactttaaaataaaagcagaggacaaagctcttgtgaagatgggcttttcttctgaaaaccacctgtgccagggacacattttcccagttaagctgacatattaaagatctcctcttttaaacatgtagctgaaaagtaataatgatgttgaggaggatgatgatggtaataataactaaccacctggggagagggttaagtgaccttgctcaaacgttttagttttgtgatttattatttttaaaataaaatcaaacggaacatccaacccaagatcctgtaggaacacctaccttaagcacatatctgaatgggtaacatgatgaggtacctgtaaaattattaacaatatcatgacatagcatttatatttgtgttttgaaaaaataaaagtgctttctagtgttttactttatcctc

SEQ ID NO: 419705 - DNA, 935 bp, Homo sapiens
taataggagactcttggcttttaaatcctagatgataatgtccttgtaagtttaatctttcagtatgggcttatgatagttatcacagccctaaatagcttattttagatcaaatgcttatgtgctagcaagatacagtcaagacgcatgtcgagatcatagttaccttgtgtgttttctgttttaaatattaaaatgggatgtttagactcttagatgcagataaaagatgttctcagtgataaaatcaatagaggctaatatgtcccctggaaaaatagtagcacaaattaggcagtccaatatattctgaggaatgcacatcaggcagcatgtaaaggacttctaagatgtagataggaaagaatgaagatgaggaaagaagagaaaatctgatctagaaaacagagtatgagtcccccttcccgccccctcttgaagattataataagccttatgctaagtaggaaaatgaattcatccaataacatttgcattcctttcagtacttccagcgagctgttaaagatgaattgtgtcgtcagaataatttatatgttcagccgtatgcctgttatgaacttggctgtcttctattagacaaaccagaggtaagatcttatatatataatataatatatatttttaatgttgttcaacaaaaatgtggaagtgggcaagcacaaagcacccttcatttaaaacaaactgaacacagtgttcttcattttgttttccttggttttacttagaatgaatccaagaagttagtaatactaccttattatctttaaggaggtaatttcttccctagcattcaaattacagtcatacatctcttaatgacatgctgagaaatgcgttgttaggcaattccttccttgtgcaaacatcatagagtacttacacagacctaggtggtatcacctactaca

SEQ ID NO: 419706 - DNA, 613 bp, Homo sapiens
  misc_feature (337)..(337): n is a, c, g, or t
  misc_feature (441)..(441): n is a, c, g, or t
ctcgtgccgaattcggcacgaggctgttcagtacttccagcgagctgttaaagatgaattgtgtcgtcagaataatttatatgttcagccgtatgcctgttatgaacttggctgtcttctattagacaaaccagagactgtaggaagaggcagagctctacttcttcaagcaaaggaggatttctctggctacgactttgaaaacagattgcatgtccgcatccatgctgctctggcctctctgagggaattggttcctcagtgacagacccggaacacccgctccgtccctccccacccagggtccgcactttaaaataaaagcagagggcccaanaaaaacaaagacccaaagaacaaaaaaaaaaaaagatgaacaagggcggggaagagccccacacaatactgagactggaccaaagcagtgaacaagcagaaaanaccccctcgggggggggcccgggccccaattggccctaaagggagtggaataacaattcactgcccgcggttttacacggtggtagtggggaaacccttgctgtacccaatttaatcgctttggagaaaatcccccttttgcccggttggggtgaatggccgaagggaaatt

SEQ ID NO: 419707 - DNA, 2472 bp, Homo sapiens
ggattccgcttcggggcccgcgcgagttgggtgcttcggagggcgcgagaggagcgggcgggtgctgctgagtaatccccgcggcggcggccggacgcccacctcccacgccgcgccgcagccgggccgcggctcctccctccgcggtccttccctcctcttccctcccgtcttctcccctcccctcccctcccctcccggctccgcttggctccgggcaggtagagccgggctccgggcgcgcgcggggccgcagcagctgctcccgatctcgcctcggcccagcgcagggcctcgcacgcccatggccggctcggagcagcatgcggccgcggcggcgggacgacggagactcggacgcggcagcggcggcggcggcgcccctgcaggacgcggagctggccctggccggcatcaacatgctgctcaacaacggcttcagggagtcggaccagcttttcaaacaatacagaaatcatagcccactaatgagttttggagccagctttgtcagttttttgaatgccatgatgacatttgaggaagaaaaaatgcagttggcatgtgatgacttaaaaaccacagaaaaactgtgtgaaagtgaagaggctggagtaattgaaacaatcaagaataaaattaagaagaacgttgatgtccgaaaatccgccccctctatggttgatcggcttcagaggcagataatcatagctgactgccaggtttacctggctgtgctttcatttgtaaaacaagaattgtcagcttatatcaaaggtgggtggatccttaggaaagcctggaagatttacaataaatgctatctggacatcaatgcccttcaggagctgtatcagaagaagctaactgaagagtccttgacttctgatgctgcaaatgataatcacattgtggctgaaggggtgtctgaggagtctctgaacagactgaaaggtgctgttagctttggatatggcctttttcacctttgcatatccatggtgcccccaaacctgctcaaaatcatcaacctgctgggttttcctggagaccgcctacaggggctttcttcactgatgtatgcaagcgaaagtaaggacatgaaggcccctttagctacattagctctgctctggtatcatactgtagtccgcccgttttttgccttggatggcagtgataacaaggcaggcctggatgaagctaaggaaattctccttaaaaaagaagctgcttatccaaattcttccctctttatgtttttcaagggacggatacaacgactagagtgtcaaatcaacagtgccttgacatctttccacactgctttggaacttgcagtagaccagagagaaattcaacatgtctgtctgtatgaaattggttggtgcagcatgatagagctcaatttcaaggatgcatttgattcctttgagaggctaaaaaatgagtccaggtggtcccagtgctattatgcctacttgactgcagtttgtcagggagccactggtgatgtggatggggcacagattgtctttaaagaagttcagaaactcttcaaaaggaaaaacaatcagattgaacagttctcggtgaaaaagcgtctattgaagtgttgtacttgtggaaagctcttccaaactgttccttccccaacctgcagaggatgagtcaagcttgccatgaagtggatgactcatctgttgttggattaaagtatttgcttcttggtgccatacacaaatgtctaggaaactcagaagatgctgttcagtacttccagcgagctgttaaagatgaattgtgtcgtcagaataatttatatgttcagccgtatgcctgttatgaacttggctgtcttctattagacaaaccagagactgtaggaagaggcagagctctacttcttcaagcaaaggaggatttctctggctacgactttgaaaacagattgcatgtccgcatccatgctgctctggcctctctgagggaattggttcctcagtgacagacccggaacacccgctccgtccctccccacccagggtccgcactttaaaataaaagcagaggacaaagctcttgtgaagatgggcttttcttctgaaaaccacctgtgccagggacacattttcccagttaagctgacatattaaagatctcctcttttaaacatgtagctgaaaagtaataatgatgttgaggaggatgatgatggtaataataactaaccacctggggagagggttaagtgaccttgctcaaacgttttagttttgtgatttattatttttaaaataaaatcaaacggaacatccaacccaagatcctgtaggaacacctaccttaagcacatatctgaatgggtaacatgatgaggtacctgtaaaattattaacaatatcatgacatagcatttatatttgtgttttgaaaaaataaaagtgctttctagtgttttactttatcctc

SEQ ID NO: 419708 - DNA, 2058 bp, Homo sapiens
ggattccgcttcggggcccgcgcgagttgggtgcttcggagggcgcgagaggagcgggcgggtgctgctgagtaatccccgcggcggcggccggacgcccacctcccacgccgcgccgcagccgggccgcggctcctccctccgcggtccttccctcctcttccctcccgtcttctcccctcccctcccctcccctcccggctccgcttggctccgggcaggtagagccgggctccgggcgcgcgcggggccgcagcagctgctcccgatctcgcctcggcccagcgcagggcctcgcacgcccatggccggctcggagcagcatgcggccgcggcggcgggacgacggagactcggacgcggcagcggcggcggcggcgcccctgcaggacgcggagctggccctggccggcatcaacatgctgctcaacaacggcttcagggagtcggaccagcttttcaaacaatacagaaatcatagcccactaatgagttttggagccagctttgtcagttttttgaatgccatgatgacatttgaggaagaaaaaatgcagttggcatgtgatgacttaaaaaccacagaaaaactgtgtgaaagtgaagaggctggagtaattgaaacaatcaagaataaaattaagaagaacgttgatgtccgaaaatccgccccctctatggttgatcggcttcagaggcagataatcatagctgactgccaggtttacctggctgtgctttcatttgtaaaacaagaattgtcagcttatatcaaaggtgggtggatccttaggaaagcctggaagatttacaataaatgctatctggacatcaatgcccttcaggagctgtatcagaagaagctaactgaagagtccttgacttctgatgctgcaaatgataatcacattgtggctgaaggggtgtctgaggagtctctgaacagactgaaaggtgctgttagctttggatatggcctttttcacctttgcatatccatggtgcccccaaacctgctcaaaatcatcaacctgctgggttttcctggagaccgcctacaggggctttcttcactgatgtatgcaagcgaaaattagctctgctctggtatcatactgtagtccgcccgttttttgccttggatggcagtgataacaaggcaggcctggatgaagctaaggaaattctccttaaaaaagaagctgcttatccaaattcttccctctttatgtttttcaagggacggatacaacgactagagtgtcaaatcaacagtgccttgacatctttccacactgctttggaacttgcagtagaccagagagaaattcaacatgtctgtctgtatgaaattggttggtgcagcatgatagagctcaatttcaaggatgcatttgattcctttgagaggctaaaaaatgagtccaggtggtcccagtgctattatgcctacttgactgcagtttgtcagggagccactggtgatgtggatggggcacagattgtctttaaagaagttcagaaactcttcaaaaggaaaaacaatcagattgaacagttctcggtgaaaaagcgtctattgaagtgttgtacttgtggaaagctcttccaaactgttccttccccaacctgcagaggatgagtcaagcttgccatgaagtggatgactcatctgttgttggattaaagtatttgcttcttggtgccatacacaaatgtctaggaaactcagaagatgctgttcagtacttccagcgagctgttaaagatgaattgtgtcgtcagaataatttatatgttcagccgtatgcctgttatgaacttggctgtcttctattagacaaaccagagactgtaggaagaggcagagctctacttctgtagctcaggagagcacccctccaccccatttgctcgcagtatcctagaatctttgtgctctcgctgcagttccctttgggttccatgttttccttgttccctccccacaacgagccacgcaaagagccccccgaggtgccccaccaagagccaccccaggagccccaccgagccgca

SEQ ID NO: 419709 - DNA, 1951 bp, Homo sapiens
gtttcctccaactggacgttaagttactgagaacaggaatcagggatgcgattggtgcgtgtcttctgtggctacctggtcagcattcataaacggtgataatggattgaatgctgcagtttcaaccttcctgacaacagaggagagtgttactttggggcatgaacagttattgatccagctgggccttggttaatgagtcatttggcttacagtgttcccgagtcacaggctgtcctgaagatcacctgctgactcattggtgcccttgtttccccgaggcctcctgcagtgacgtgctgaggagaggagcccaggtctgcgggtgggggacccgtcctctgagaagcctgcagcttctcctccaggacccttccagcccacctggctggctgtggggataatgggcacttgggagcattggagggggaggaagcatagagaaagcagcaggagacgcacctggaagcccaggggagggaagtccacctccctgcaagtgtagggcagtgagaggagccctggcaccagcagagcaagaaagaaatgcatgcaccgttcagaataagctgtcaggtcgtctggctgtttaagatttatttattaatggtatgtgacatttagcatttctcaatgcctaagattaaactaatgctttgaatcctgatcatgcttttgagctgctcctcttgggtacttgtggcatcgtgttggcagaccctgagtgacatcttcagcggcgggaaaacgaaatgtatttcactgggatgtcaaatcaacagtgccttgacatctttccacactgctttggaacttgcagtagaccagagagaaattcaacatgtctgtctgtatgaaattggttggtgcagcatgatagagctcaatttcaaggatgcatttgattcctttgagaggctaaaaaatgagtccaggtggtcccagtgctattatgcctacttgactgcagtttgtcagggagccactggtgatgtggatggggcacagattgtctttaaagaagttcagaaactcttcaaaaggaaaaacaatcagattgaacagttctcggtgaaaaagcgtctattgaagtgttgtacttgtggaaagctcttccaaactgttccttccccaacctgcagaggatgagtcaagcttgccatgaagtggatgactcatctgttgttggattaaagtatttgcttcttggtgccatacacaaatgtctaggaaactcagaagatgctgttcagtacttccagcgagctgttaaagatgaattgtgtcgtcagaataatttatatgttcagccgtatgcctgttatgaacttggctgtcttctattagacaaaccagagactgtaggaagaggcagagctctacttcttcaagcaaaggaggatttctctggctacgactttgaaaacagattgcatgtccgcatccatgctgctctggcctctctgagggaattggttcctcagtgacagacccggaacacccgctccgtccctccccacccagggtccgcactttaaaataaaagcagaggacaaagctcttgtgaagatgggcttttcttctgaaaaccacctgtgccagggacacattttcccagttaagctgacatattaaagatctcctcttttaaacatgtagctgaaaagtaataatgatgttgaggaggatgatgatggtaataataactaaccacctggggagagggttaagtgaccttgctcaaacgttttagttttgtgatttattatttttaaaataaaatcaaacggaacatccaacccaagatcctgtaggaacacctaccttaagcacatatctgaatgggtaacatgatgaggtacctgtaaaattattaacaatatcatgacatagcatttatatttgtgttttgaaaaaataaaagtgctttctagtgttttactttatcctc

SEQ ID NO: 419710 - DNA, 729 bp, Homo sapiens
ctcgtgccgaattcggcacgaggctgttcagtacttccagcgagctgttaaagatgaattgtgtcgtcagaataatttatatgttcagccgtatgcctgttatgaacttggctgtcttctattagacaaaccagagactgtaggaagaggcagagctctacttcttcaagcaaaggaggatttctctggctacgactttgaaaacagattgcatgtccgcatccatgctgctctggcctctctgagggaattggttcctcagtgacagacccggaacacccgctccgtccctccccacccagggtccgcactttaaaataaaagcagaggacaaagctcttgtgaagatgggcttttcttctgaaaaccacctgtgccagggacacattttcccagttaagctgacatattaaagatctcctcttttaaacatgtagctgaaaagtaataatgatgttgaggaggatgatgatggtaataataactaaccacctggggagagggttaagtgaccttgctcaaacgttttagttttgtgatttattatttttaaaataaaatcaaacggaacatccaacccaagatcctgtaggaacacctaccttaagcacatatctgaatgggtaacatgatgaggtacctgtaaaattattaacaatatcatgacatagcatttatatttgtgttttgaaaaaataaaagtgctttctagtgttttactttatcctc

SEQ ID NO: 419711 - DNA, 3032 bp, Homo sapiens
  misc_feature (1190)..(1190): n is a, c, g, or t
ggggctctgtggcggagacagccaggttggcagctgacgggacagccggggtctattttgttgcgggttttcagcaaatccagggctggtctggaggcgcgaaaacttaaggcatacagaacgatggagtatatggcagaatccaccgaccgcagccctggacacatcttgtgctgtgagtgtggtgttccgataagtccaaatcctgccaatatttgtgtggcctgtttgcgaagtaaagtggacatcagccaaggtattccgaaacaagtctcgatttcgttctgcaaacaatgtcaaaggtattttcaaccaccaggaacttggatacagtgtgctttagaatccagggaacttcttgctttgtgcttgaaaaaaatcaaagcccctctgagtaaggtacggcttgtagatgcaggctttgtttggactgagcctcattctaagagacttaaagttaaactgactattcagaaagaggtgatgaatggtgctatccttcaacaagtgtttgtggtggattatgttgttcagtcccaaatgtgtggagattgccatagagtagaagctaaggatttctggaaggctgtgattcaagtgaggcaaaagactttgcataaaaaaactttctactatctggaacagttaattctgaaatatggaatgcatcagaatacacttcgtatcaaagagattcatgatggtctggatttttattattcctcaaaacaacatgctcagaagatggtcgaatttcttcagtgtacagttccctgtagatacaaagcatcacaaagactgatctctcaagatatccatagtaacacatacaattacaaaagcactttttctgtggaaattgttccaatatgcaaggataatgttgtctgtctgtctccaaaactggcacaaagcctgggaaatatgaaccagatttgtgtgtgtattcgagtaaccagtgccattcacctcattgatccaaacaccctacaagtggcagatattgatgggagcactttctggagtcaccctttcaatagtttatgtcatcccaaacagctagaggagtttattgtgatggaatgcagcatagtccaagatataaaacgtgctgcaggtgctggaatgatatcaaaaaagcataccctcggggaagtctgggtacagaagacatctgaaatgaatacagntaaacagtatttttgtcgtactcatttgggacatcttctaaatcccggagacctggtgttagggtttgatttggccaactgtaacttaaatgatgagcatgtcaacaaaatgaactcagatagagttccagatgtggtattaatcaagaagagctatgaccggaccaaacgtcagcgtcgtagaaactggaaattgaaagagcttgcaagagagagagaaaacatggatacagatgatgaaaggcaataccaagattttcttgaagatcttgaagaagatgaggcaattcgaaaaaatgtcaacatttacagagattcagccatccctgtggaaagtgacaccgatgatgaaggagcacctcgaattagtctggctgagatgcttgaagaccttcatatttcccaagatgccactggtgaagaaggtgcatcaatgctgacataatgagatgttgtagactgtttccatacatgggcttaagaagttggacagagttaccttaagtgtctctactatctttgcctccagatttcaagaggagaaatttagttttaaacctgaataaacatgtttgttttcagtgctcactcaaaccactaaaacagatggatagctttgaggttttagataaggaaagattatggagaatgtagttgttattgatttttggcaattttacatttggaattttatcactgtgcttttttatatgaggcactgtagtattttcacatagtatagtactctggatgtaaaagctcaaaaattgtgattccttgaacgttcactaaatcttcaagcaaaaacacatttttacattatttttacgttgattattttagtgaaagaccatatgaagaagcatttttaatattaacttgttacatactttgatccactttacatcatttttatgttgttgaggtagggaaattagggttcagtttatcactggacattcaggaggcaagtcaatcttttttatttccttataaaattaactcttcaaaagctgttaaacagagagttatcttaatttttattgcagtaggaggaaatatatttaaaatatttgtagatttatagcaaatagagactcgttatttaaaggttaaataacaatttgttcttttgttgtttttgccagtttagggcagtagctgcttttgtcataaatatcttcctaccacatcaaaaatgctgcttttaaaatttttgtttataaattgagaaggaattttctctctataagtttctgtcattgaacagatcaccattaaaaagaatattagaatccagcatgaagataatggctaataaaaatgaggtacatactttataaaaccattaatcagatttgaatgaggaatgcttcccacatccttgaaagaaaaactgtggcttacgttttgaagtattctgagaatgaagtattaagatccaatttctataagcaagatcagacttgttaagtatgccgcaagtaagagctaattcattcattccatgtgtgccactaaataaagagattgagcaagtgccactgtgtggaacatttttcttttttttaatattggactttccaattttgaaattatggataaagtcctaaattttctatagtggcttcttttctgtctgcatattttgttaaaattgtggatctaaaagccatatcctgtctttggtggtggcctggtaggaatggcttgtcctagttcttcaaaggtaagattgaccaaagcaagttctcattggtggtctgtgtttacatcttccgtgtcaagatattttaaagcatgaaaataaagccattcttgccctttttcgtgtgtttgaaa

SEQ ID NO: 419712 - DNA, 2253 bp, Homo sapiens
  misc_feature (1190)..(1190): n is a, c, g, or t
ggggctctgtggcggagacagccaggttggcagctgacgggacagccggggtctattttgttgcgggttttcagcaaatccagggctggtctggaggcgcgaaaacttaaggcatacagaacgatggagtatatggcagaatccaccgaccgcagccctggacacatcttgtgctgtgagtgtggtgttccgataagtccaaatcctgccaatatttgtgtggcctgtttgcgaagtaaagtggacatcagccaaggtattccgaaacaagtctcgatttcgttctgcaaacaatgtcaaaggtattttcaaccaccaggaacttggatacagtgtgctttagaatccagggaacttcttgctttgtgcttgaaaaaaatcaaagcccctctgagtaaggtacggcttgtagatgcaggctttgtttggactgagcctcattctaagagacttaaagttaaactgactattcagaaagaggtgatgaatggtgctatccttcaacaagtgtttgtggtggattatgttgttcagtcccaaatgtgtggagattgccatagagtagaagctaaggatttctggaaggctgtgattcaagtgaggcaaaagactttgcataaaaaaactttctactatctggaacagttaattctgaaatatggaatgcatcagaatacacttcgtatcaaagagattcatgatggtctggatttttattattcctcaaaacaacatgctcagaagatggtcgaatttcttcagtgtacagttccctgtagatacaaagcatcacaaagactgatctctcaagatatccatagtaacacatacaattacaaaagcactttttctgtggaaattgttccaatatgcaaggataatgttgtctgtctgtctccaaaactggcacaaagcctgggaaatatgaaccagatttgtgtgtgtattcgagtaaccagtgccattcacctcattgatccaaacaccctacaagtggcagatattgatgggagcactttctggagtcaccctttcaatagtttatgtcatcccaaacagctagaggagtttattgtgatggaatgcagcatagtccaagatataaaacgtgctgcaggtgctggaatgatatcaaaaaagcataccctcggggaagtctgggtacagaagacatctgaaatgaatacagntaaacagtatttttgtcgtactcatttgggacatcttctaaatcccggagacctggtgttagggtttgatttggccaactgtaacttaaatgatgagcatgtcaacaaaatgaactcagatagagttccagatgtggtattaatcaagaagagctatgaccggaccaaacgtcagcgtcgtagaaactggaaattgaaagagcttgcaagagagagagaaaacatggatacagatgatgaaaggcaataccaagattttcttgaagatcttgaagaagatgaggcaattcgaaaaaatgtcaacatttacagagattcagccatccctgtggaaagtgacaccgatgatgaaggagcacctcgaattagtctggctgagatgcttgaagaccttcatatttcccaagatgccactggtgaagaaggtgcatcaatgctgacataatgagatgttgtagactgtttccatacatgggcttaagaagttggacagagttaccttaagtgtctctactatctttgcctccagatttcaagaggagaaatttagttttaaacctgaataaacatgtttgttttcagtgctcactcaaaccactaaaacagatggatagctttgaggttttagataaggaaagattatggagaatgtagttgttattgatttttggcaattttacatttggaattttatcactgtgcttttttatatgaggcactgtagtattttcacatagtatagtactctggatgtaaaagctcaaaaattgtgattccttgaacgttcactaaatcttcaagcaaaaacacatttttacattatttttacgttgattattttagtgaaagaccatatgaagaagcatttttaatattaacttgttacatactttgatccactttacatcatttttatgttgttgaggtagggaaattagggttcagtttatcactggacattcaggagaacgcgtcaggagacgcgtcaaatcgaagccgaattctgcaatatcatcacactgcgccgctcgacatgatctagagcccattccctatatgtcat

SEQ ID NO: 419713 - DNA, 2595 bp, Homo sapiens
  misc_feature (1190)..(1190): n is a, c, g, or t
ggggctctgtggcggagacagccaggttggcagctgacgggacagccggggtctattttgttgcgggttttcagcaaatccagggctggtctggaggcgcgaaaacttaaggcatacagaacgatggagtatatggcagaatccaccgaccgcagccctggacacatcttgtgctgtgagtgtggtgttccgataagtccaaatcctgccaatatttgtgtggcctgtttgcgaagtaaagtggacatcagccaaggtattccgaaacaagtctcgatttcgttctgcaaacaatgtcaaaggtattttcaaccaccaggaacttggatacagtgtgctttagaatccagggaacttcttgctttgtgcttgaaaaaaatcaaagcccctctgagtaaggtacggcttgtagatgcaggctttgtttggactgagcctcattctaagagacttaaagttaaactgactattcagaaagaggtgatgaatggtgctatccttcaacaagtgtttgtggtggattatgttgttcagtcccaaatgtgtggagattgccatagagtagaagctaaggatttctggaaggctgtgattcaagtgaggcaaaagactttgcataaaaaaactttctactatctggaacagttaattctgaaatatggaatgcatcagaatacacttcgtatcaaagagattcatgatggtctggatttttattattcctcaaaacaacatgctcagaagatggtcgaatttcttcagtgtacagttccctgtagatacaaagcatcacaaagactgatctctcaagatatccatagtaacacatacaattacaaaagcactttttctgtggaaattgttccaatatgcaaggataatgttgtctgtctgtctccaaaactggcacaaagcctgggaaatatgaaccagatttgtgtgtgtattcgagtaaccagtgccattcacctcattgatccaaacaccctacaagtggcagatattgatgggagcactttctggagtcaccctttcaatagtttatgtcatcccaaacagctagaggagtttattgtgatggaatgcagcatagtccaagatataaaacgtgctgcaggtgctggaatgatatcaaaaaagcataccctcggggaagtctgggtacagaagacatctgaaatgaatacagntaaacagtatttttgtcgtactcatttgggacatcttctaaatcccggagacctggtgttagggtttgatttggccaactgtaacttaaatgatgagcatgtcaacaaaatgaactcagatagagttccagatgtggtattaatcaagaagagctatgaccggaccaaacgtcagcgtcgtagaaactggaaattgaaagagcttgcaagagagagagaaaacatggatacagatgatgaaaggcaataccaagattttcttgaagatcttgaagaagatgaggcaattcgaaaaaatgtcaacatttacagagattcagccatccctgtggaaagtgacaccgatgatgaaggagcacctcgaattagtctggctgagatgcttgaagaccttcatatttcccaagatgccactggtgaagaaggtgcatcaatgctgacataatgagatgttgtagactgtttccatacatgggcttaagaagttggacagagttaccttaagtgtctctactatctttgcctccagatttcaagaggagaaatttagttttaaacctgaataaacatgtttgttttcagtgctcactcaaaccactaaaacagatggatagctttgaggttttagataaggaaagattatggagaatgtagttgttattgatttttggcaattttacatttggaattttatcactgtgcttttttatatgaggcactgtagtattttcacatagtatagtactctggatgtaaaagctcaaaaattgtgattccttgaacgttcactaaatcttcaagcaaaaacacatttttacattatttttacgttgattattttagtgaaagaccatatgaagaagcatttttaatattaacttgttacatactttgatccactttacatcatttttatgttgttgaggtagggaaattagggttcagtttatcactggacattcaggaggcaagtcaatcttttttatttccttataaaattaactcttcaaaagctgttaaacagagagttatcttaatttttattgcagtaggaggaaatatatttaaaatatttgtagatttatagcaaatagagactcgttatttaaaggttaaataacaatttgttcttttgttgtttttgccagtttagggcagtagctgcttttgtcataaatatcttcctaccacatcaaaaatgctgcttttaaaatttttgtttataaattgagaaggaattttctctctataagtttctgtcattgaacagatcaccattaaaaagaatattagaatccagcatgaagataatggctaataaaaatgaggtacatactttatccagcttaaagctgattcatgagaacgcttccagatatagctgtttcctgctgatcagctttcc

SEQ ID NO: 419714 - DNA, 2916 bp, Homo sapiens
  misc_feature (1190)..(1190): n is a, c, g, or t
ggggctctgtggcggagacagccaggttggcagctgacgggacagccggggtctattttgttgcgggttttcagcaaatccagggctggtctggaggcgcgaaaacttaaggcatacagaacgatggagtatatggcagaatccaccgaccgcagccctggacacatcttgtgctgtgagtgtggtgttccgataagtccaaatcctgccaatatttgtgtggcctgtttgcgaagtaaagtggacatcagccaaggtattccgaaacaagtctcgatttcgttctgcaaacaatgtcaaaggtattttcaaccaccaggaacttggatacagtgtgctttagaatccagggaacttcttgctttgtgcttgaaaaaaatcaaagcccctctgagtaaggtacggcttgtagatgcaggctttgtttggactgagcctcattctaagagacttaaagttaaactgactattcagaaagaggtgatgaatggtgctatccttcaacaagtgtttgtggtggattatgttgttcagtcccaaatgtgtggagattgccatagagtagaagctaaggatttctggaaggctgtgattcaagtgaggcaaaagactttgcataaaaaaactttctactatctggaacagttaattctgaaatatggaatgcatcagaatacacttcgtatcaaagagattcatgatggtctggatttttattattcctcaaaacaacatgctcagaagatggtcgaatttcttcagtgtacagttccctgtagatacaaagcatcacaaagactgatctctcaagatatccatagtaacacatacaattacaaaagcactttttctgtggaaattgttccaatatgcaaggataatgttgtctgtctgtctccaaaactggcacaaagcctgggaaatatgaaccagatttgtgtgtgtattcgagtaaccagtgccattcacctcattgatccaaacaccctacaagtggcagatattgatgggagcactttctggagtcaccctttcaatagtttatgtcatcccaaacagctagaggagtttattgtgatggaatgcagcatagtccaagatataaaacgtgctgcaggtgctggaatgatatcaaaaaagcataccctcggggaagtctgggtacagaagacatctgaaatgaatacagntaaacagtatttttgtcgtactcatttgggacatcttctaaatcccggagacctggtgttagggtttgatttggccaactgtaacttaaatgatgagcatgtcaacaaaatgaactcagatagagttccagatgtggtattaatcaagaagagctatgaccggaccaaacgtcagcgtcgtagaaactggaaattgaaagagcttgcaagagagagagaaaacatggatacagatgatgaaaggcaataccaagattttcttgaagatcttgaagaagatgaggcaattcgaaaaaatgtcaacatttacagagattcagccatccctgtggaaagtgacaccgatgatgaaggagcacctcgaattagtctggctgagatgcttgaagaccttcatatttcccaagatgccactggtgaagaaggtgcatcaatgctgacataatgagatgttgtagactgtttccatacatgggcttaagaagttggacagagttaccttaagtgtctctactatctttgcctccagatttcaagaggagaaatttagttttaaacctgaataaacatgtttgttttcagtgctcactcaaaccactaaaacagatggatagctttgaggttttagataaggaaagattatggagaatgtagttgttattgatttttggcaattttacatttggaattttatcactgtgcttttttatatgaggcactgtagtattttcacatagtatagtactctggatgtaaaagctcaaaaattgtgattccttgaacgttcactaaatcttcaagcaaaaacacatttttacattatttttacgttgattattttagtgaaagaccatatgaagaagcatttttaatattaacttgttacatactttgatccactttacatcatttttatgttgttgaggtagggaaattagggttcagtttattgaacagatcaccattaaaaagaatattagaatccagcatgaagataatggctaataaaaatgaggtacatactttataaaaccattaatcagatttgaatgaggaatgcttcccacatccttgaaagaaaaactgtggcttacgttttgaagtattctgagaatgaagtattaagatccaatttctataagcaagatcagacttgttaagtatgccgcaagtaagagctaattcattcattccatgtgtgccactaaataaagagattgagcaagtgccactgtgtggaacatttttcttttttttaatattggactttccaattttgaaattatggataaagtcctaaattttctatagtggcttcttttctgtctgcatattttgttaaaattgtggatctaaaagccatatcctgtctttggtggtggcctggtaggaatggcttgtcctagttcttcaaaggtaagattgaccaaagcaagttctcattggtggtctgtgtttacatcttccgtgtcaagatattttaaagcatgaaaataaagccattcttgccctttttcgtgtgtttgaaaaaacaacaaaaaacacagaaaaaaaatttttttgggcggccgggacccgaaaaaagttttaaacccaatctcgggtgggggccgggccccacatagggttatggacaacatggggacacaacgtgcccaaggaaacccgggcctacacaagggtgggttctcaccaaaaaaacgcgcggggaccgcggtcttggaac

SEQ ID NO: 419715 - DNA, 1009 bp, Homo sapiens
ttacgtttatgtaaggattgactcaatgtgagcacatttactaaaattaaagaatctagggaaaactctggtactaagtactgaccagggaaggtatctcctggcacacagctcagagcttctgggttctactatggcaaggaattagcctgatgctgttaaacatctcaattacacaagcaactctacccctgaacttttcttgctcatcagactttttttattgggggagtgggggaacagagtctcactctgtcgcccaggctggagtactgtggccagatctcgactcactgcaacctctgcctcctgggttcaagtgattctcctgcttttgtcataaatatcttcctaccacatcaaaaatgctgcttttaaaatttttgtttataaattgagaaggaattttctctctataagtttctgtcattgaacagatcaccattaaaaagaatattagaatccagcatgaagataatggctaataaaaatgaggtacatactttataaaaccattaatcagatttgaatgaggaatgcttcccacatccttgaaagaaaaactgtggcttacgttttgaagtattctgagaatgaagtattaagatccaatttctataagcaagatcagacttgttaagtatgccgcaagtaagagctaattcattcattccatgtgtgccactaaataaagagattgagcaagtgccactgtgtggaacatttttcttttttttaatattggactttccaattttgaaattatggataaagtcctaaattttctatagtggcttcttttctgtctgcatattttgttaaaattgtggatctaaaagccatatcctgtctttggtggtggcctggtaggaatggcttgtcctagttcttcaaaggtaagattgaccaaagcaagttctcattggtggtctgtgtttacatcttccgtgtcaagatattttaaagcatgaaaataaagccattcttgccctttttcgtgtgtttgaaa

SEQ ID NO: 419716 - DNA, 817 bp, Homo sapiens
ggaataacagtctgagctagcaccaccctcagccaggctacaacgacagcactgaagggtcttccctctcagattcacctggaggccctcagacccccagggtgcacgtctccccaggtcctgggagtggctaccgcaggtagtttctggagagcacgttttcttcattgataagtggaggagaaatgcagcacagctttcaagatactattttaaaaacaccatgaatcagatagggaaagaaaaactgtggcttacgttttgaagtattctgagaatgaagtattaagatccaatttctataagcaagatcagacttgttaagtatgccgcaagtaagagctaattcattcattccatgtgtgccactaaataaagagattgagcaagtgccactgtgtggaacatttttcttttttttaatattggactttccaattttgaaattatggataaagtcctaaattttctatagtggcttcttttctgtctgcatattttgttaaaattgtggatctaaaagccatatcctgtctttggtggtggcctggtaggaatggcttgtcctagttcttcaaaggtaagattgaccaaagcaagttctcattggtggtctgtgtttacatcttccgtgtcaagatattttaaagcatgaaaataaagccattcttgccctttttcgtgtgtttgaaatggtcgcattggtgtcatatttacatgagaaagtatcttacgcaattttccaaagtagaattgttaatgttatttaagtacttttataatcttcccactgaaaaatatagtttcccactaacct

SEQ ID NO: 419717 - DNA, 2731 bp, Homo sapiens
  misc_feature (1190)..(1190): n is a, c, g, or t
ggggctctgtggcggagacagccaggttggcagctgacgggacagccggggtctattttgttgcgggttttcagcaaatccagggctggtctggaggcgcgaaaacttaaggcatacagaacgatggagtatatggcagaatccaccgaccgcagccctggacacatcttgtgctgtgagtgtggtgttccgataagtccaaatcctgccaatatttgtgtggcctgtttgcgaagtaaagtggacatcagccaaggtattccgaaacaagtctcgatttcgttctgcaaacaatgtcaaaggtattttcaaccaccaggaacttggatacagtgtgctttagaatccagggaacttcttgctttgtgcttgaaaaaaatcaaagcccctctgagtaaggtacggcttgtagatgcaggctttgtttggactgagcctcattctaagagacttaaagttaaactgactattcagaaagaggtgatgaatggtgctatccttcaacaagtgtttgtggtggattatgttgttcagtcccaaatgtgtggagattgccatagagtagaagctaaggatttctggaaggctgtgattcaagtgaggcaaaagactttgcataaaaaaactttctactatctggaacagttaattctgaaatatggaatgcatcagaatacacttcgtatcaaagagattcatgatggtctggatttttattattcctcaaaacaacatgctcagaagatggtcgaatttcttcagtgtacagttccctgtagatacaaagcatcacaaagactgatctctcaagatatccatagtaacacatacaattacaaaagcactttttctgtggaaattgttccaatatgcaaggataatgttgtctgtctgtctccaaaactggcacaaagcctgggaaatatgaaccagatttgtgtgtgtattcgagtaaccagtgccattcacctcattgatccaaacaccctacaagtggcagatattgatgggagcactttctggagtcaccctttcaatagtttatgtcatcccaaacagctagaggagtttattgtgatggaatgcagcatagtccaagatataaaacgtgctgcaggtgctggaatgatatcaaaaaagcataccctcggggaagtctgggtacagaagacatctgaaatgaatacagntaaacagtatttttgtcgtactcatttgggacatcttctaaatcccggagacctggtgttagggtttgatttggccaactgtaacttaaatgatgagcatgtcaacaaaatgaactcagatagagttccagatgtggtattaatcaagaagagctatgaccggaccaaacgtcagcgtcgtagaaactggaaattgaaagagcttgcaagagagagagaaaacatggatacagatgatgaaaggcaataccaagattttcttgaagatcttgaagaagatgaggcaattcgaaaaaatgtcaacatttacagagattcagccatccctgtggaaagtgacaccgatgatgaaggagcacctcgaattagtctggctgagatgcttgaagaccttcatatttcccaagatgccactggtgaagaaggtgcatcaatgctgacataatgagatgttgtagactgtttccatacatgggcttaagaagttggacagagttaccttaagtgtctctactatctttgcctccagatttcaagaggagaaatttagttttaaacctgaataaacatgtttgttttcagtgctcactcaaaccactaaaacagatggatagctttgaggttttagataaggaaagattatggagaatgtagttgttattgatttttggcaattttacatttggaattttatcactgtgcttttttatatgaggcactgtagtattttcacatagtatagtactctggatgtaaaagctcaaaaattgtgattccttgaacgttcactaaatcttcaagcaaaaacacatttttacattatttttacgttgattattttagtgaaagaccatatgaagaagcatttttaatattaacttgttacatactttgatccactttacatcatttttatgttgttgaggtagggaaattagggttcagtttatcactggacattcaggaggcaagtcaatcttttttatttccttataaaattaactcttcaaaagctgttaaacagagagttatcttaatttttattgcagtaggaggaaatatatttaaaatatttgtagatttatagcaaatagagactcgttatttaaaggttaaataacaatttgttcttttgttgtttttgccagtttagggcagtagctgcttttgtcataaatatcttcctaccacatcaaaaatgctgcttttaaaatttttgtttataaattgagaaggaattttctctctataagtttctgtcattgaacagatcaccattaaaaagaatattagaatccagcatgaagataatggctaataaaaatgaggtacatactttataaaaccattaatcagatttgaatgaggaatgcttcccacatccttgaaagaaaaactgtggcttacgttttgaagtattctgagaatgaagtattaagatccaatttctataagcaagatcagacttgttaagtatgccgcaagtaagagctaattcattcattccatgtgtgccactaaataaagagattgagcaagtg

SEQ ID NO: 419718 - DNA, 3156 bp, Homo sapiens
  misc_feature (1190)..(1190): n is a, c, g, or t
ggggctctgtggcggagacagccaggttggcagctgacgggacagccggggtctattttgttgcgggttttcagcaaatccagggctggtctggaggcgcgaaaacttaaggcatacagaacgatggagtatatggcagaatccaccgaccgcagccctggacacatcttgtgctgtgagtgtggtgttccgataagtccaaatcctgccaatatttgtgtggcctgtttgcgaagtaaagtggacatcagccaaggtattccgaaacaagtctcgatttcgttctgcaaacaatgtcaaaggtattttcaaccaccaggaacttggatacagtgtgctttagaatccagggaacttcttgctttgtgcttgaaaaaaatcaaagcccctctgagtaaggtacggcttgtagatgcaggctttgtttggactgagcctcattctaagagacttaaagttaaactgactattcagaaagaggtgatgaatggtgctatccttcaacaagtgtttgtggtggattatgttgttcagtcccaaatgtgtggagattgccatagagtagaagctaaggatttctggaaggctgtgattcaagtgaggcaaaagactttgcataaaaaaactttctactatctggaacagttaattctgaaatatggaatgcatcagaatacacttcgtatcaaagagattcatgatggtctggatttttattattcctcaaaacaacatgctcagaagatggtcgaatttcttcagtgtacagttccctgtagatacaaagcatcacaaagactgatctctcaagatatccatagtaacacatacaattacaaaagcactttttctgtggaaattgttccaatatgcaaggataatgttgtctgtctgtctccaaaactggcacaaagcctgggaaatatgaaccagatttgtgtgtgtattcgagtaaccagtgccattcacctcattgatccaaacaccctacaagtggcagatattgatgggagcactttctggagtcaccctttcaatagtttatgtcatcccaaacagctagaggagtttattgtgatggaatgcagcatagtccaagatataaaacgtgctgcaggtgctggaatgatatcaaaaaagcataccctcggggaagtctgggtacagaagacatctgaaatgaatacagntaaacagtatttttgtcgtactcatttgggacatcttctaaatcccggagacctggtgttagggtttgatttggccaactgtaacttaaatgatgagcatgtcaacaaaatgaactcagatagagttccagatgtggtattaatcaagaagagctatgaccggaccaaacgtcagcgtcgtagaaactggaaattgaaagagcttgcaagagagagagaaaacatggatacagatgatgaaaggcaataccaagattttcttgaagatcttgaagaagatgaggcaattcgaaaaaatgtcaacatttacagagattcagccatccctgtggaaagtgacaccgatgatgaaggagcacctcgaattagtctggctgagatgcttgaagaccttcatatttcccaagatgccactggtgaagaaggtgcatcaatgctgacataatgagatgttgtagactgtttccatacatgggcttaagaagttggacagagttaccttaagtgtctctactatctttgcctccagatttcaagaggagaaatttagttttaaacctgaataaacatgtttgttttcagtgctcactcaaaccactaaaacagatggatagctttgaggttttagataaggaaagattatggagaatgtagttgttattgatttttggcaattttacatttggaattttatcactgtgcttttttatatgaggcactgtagtattttcacatagtatagtactctggatgtaaaagctcaaaaattgtgattccttgaacgttcactaaatcttcaagcaaaaacacatttttacattatttttacgttgattattttagtgaaagaccatatgaagaagcatttttaatattaacttgttacatactttgatccactttacatcatttttatgttgttgaggtagggaaattagggttcagtttatcactggacattcaggaggcaagtcaatcttttttatttccttataaaattaactcttcaaaagctgttaaacagagagttatcttaatttttattgcagtaggaggaaatatatttaaaatatttgtagatttatagcaaatagagactcgttatttaaaggttaaataacaatttgttcttttgttgtttttgccagtttagggcagtagctgcttttgtcataaatatcttcctaccacatcaaaaatgctgcttttaaaatttttgtttataaattgagaaggaattttctctctataagtttctgtcattgaacagatcaccattaaaaagaatattagaatccagcatgaagataatggctaataaaaatgaggtacatactttataaaaccattaatcagatttgaatgaggaatgcttcccacatccttgaaagaaaaactgtggcttacgttttgaagtattctgagaatgaagtattaagatccaatttctataagcaagatcagacttgttaagtatgccgcaagtaagagctaattcattcattccatgtgtgccactaaataaagagattgagcaagtgccactgtgtggaacatttttcttttttttaatattggactttccaattttgaaattatggataaagtcctaaattttctatagtggcttcttttctgtctgcatattttgttaaaattgtggatctaaaagccatatcctgtctttggtggtggcctggtaggaatggcttgtcctagttcttcaaaggtaagattgaccaaagcaagttctcattggtggtctgtgtttacatcttccgtgtcaagatattttaaagcatgaaaataaagccattcttgccctttttcgtgtgtttgaaatggtcgcattggtgtcatatttacatgagaaagtatcttacgcaattttccaaagtagaattgttaatgttatttaagtacttttataatcttcccactgaaaaatatagtttcccactaacct

SEQ ID NO: 419719 - DNA, 2719 bp, Homo sapiens
  misc_feature (1190)..(1190): n is a, c, g, or t
ggggctctgtggcggagacagccaggttggcagctgacgggacagccggggtctattttgttgcgggttttcagcaaatccagggctggtctggaggcgcgaaaacttaaggcatacagaacgatggagtatatggcagaatccaccgaccgcagccctggacacatcttgtgctgtgagtgtggtgttccgataagtccaaatcctgccaatatttgtgtggcctgtttgcgaagtaaagtggacatcagccaaggtattccgaaacaagtctcgatttcgttctgcaaacaatgtcaaaggtattttcaaccaccaggaacttggatacagtgtgctttagaatccagggaacttcttgctttgtgcttgaaaaaaatcaaagcccctctgagtaaggtacggcttgtagatgcaggctttgtttggactgagcctcattctaagagacttaaagttaaactgactattcagaaagaggtgatgaatggtgctatccttcaacaagtgtttgtggtggattatgttgttcagtcccaaatgtgtggagattgccatagagtagaagctaaggatttctggaaggctgtgattcaagtgaggcaaaagactttgcataaaaaaactttctactatctggaacagttaattctgaaatatggaatgcatcagaatacacttcgtatcaaagagattcatgatggtctggatttttattattcctcaaaacaacatgctcagaagatggtcgaatttcttcagtgtacagttccctgtagatacaaagcatcacaaagactgatctctcaagatatccatagtaacacatacaattacaaaagcactttttctgtggaaattgttccaatatgcaaggataatgttgtctgtctgtctccaaaactggcacaaagcctgggaaatatgaaccagatttgtgtgtgtattcgagtaaccagtgccattcacctcattgatccaaacaccctacaagtggcagatattgatgggagcactttctggagtcaccctttcaatagtttatgtcatcccaaacagctagaggagtttattgtgatggaatgcagcatagtccaagatataaaacgtgctgcaggtgctggaatgatatcaaaaaagcataccctcggggaagtctgggtacagaagacatctgaaatgaatacagntaaacagtatttttgtcgtactcatttgggacatcttctaaatcccggagacctggtgttagggtttgatttggccaactgtaacttaaatgatgagcatgtcaacaaaatgaactcagatagagttccagatgtggtattaatcaagaagagctatgaccggaccaaacgtcagcgtcgtagaaactggaaattgaaagagcttgcaagagagagagaaaacatggatacagatgatgaaaggcaataccaagattttcttgaagatcttgaagaagatgaggcaattcgaaaaaatgtcaacatttacagagattcagccatccctgtggaaagtgacaccgatgatgaaggagcacctcgaattagtctggctgagatgcttgaagaccttcatatttcccaagatgccactggtgaagaaggtgcatcaatgctgacataatgagatgttgtagactgtttccatacatgggcttaagaagttggacagagttaccttaagtgtctctactatctttgcctccagatttcaagaggagaaatttagttttaaacctgaataaacatgtttgttttcagtgctcactcaaaccactaaaacagatggatagctttgaggttttagataaggaaagattatggagaatgtagttgttattgatttttggcaattttacatttggaattttatcactgtgcttttttatatgaggcactgtagtattttcacatagtatagtactctggatgtaaaagctcaaaaattgtgattccttgaacgttcactaaatcttcaagcaaaaacacatttttacattatttttacgttgattattttagtgaaagaccatatgaagaagcatttttaatattaacttgttacatactttgatccactttacatcatttttatgttgttgaggtagggaaattagggttcagtttattgaacagatcaccattaaaaagaatattagaatccagcatgaagataatggctaataaaaatgaggtacatactttataaaaccattaatcagatttgaatgaggaatgcttcccacatccttgaaagaaaaactgtggcttacgttttgaagtattctgagaatgaagtattaagatccaatttctataagcaagatcagacttgttaagtatgccgcaagtaagagctaattcattcattccatgtgtgccactaaataaagagattgagcaagtgccactgtgtggaacatttttcttttttttaatattggactttccaattttgaaattatggataaagtcctaaattttctatagtggcttcttttctgtctgcatattttgttaaaattgtggatctaaaagccatatcctgtctttggtggtggcctggtaggaatggcttgtcctagttcttcaaaggtaagattgaccaaagcaagttctcattggtggtctgtgtttacatcttccgtgtcaagatattttaaagcatgaaaataaagccattcttgccctttttcgtgtgtttgaaa

SEQ ID NO: 419720 - DNA, 882 bp, Homo sapiens
cacatcctggaagagtggcctaggacagctcctctcctgccagagctaggcaggcgccgaagtagccgcatggccccgtcagaagatcccagggactggagagccaacctcaaaggcaccatccgtgagacaggcctggagaccagctccggtgggaagctggctggccatcagaagaccgtccccacggctcacctgacttttgttattgactgcatccacgggaagcagctctccctggcagcaaccgcatcaccaccccaagcccccagtcccaatcgagggcttgtcaccccaccaatgaagacttacatcgtgttctgtggggaaaactggccccatctgactcgggtgacccccatgggtgggggatgccttgcccaggccagggccaccctgccgctctgcagagggtctgtggcctcagcttccttcccagtcagcccgctctgcccccaggaggttcccgaggctaaggggaaacccgtgaaggctgcgcctgtgaggtcttcaacttggggaacagtcaaggactcactgaaagccctctcctcttgtgtctgtgggcaggccgattagctggccctgcttccccagctaagcaggagtcttttgtgcttgagccaaggaaacatcattagatccgctaaggggcatctgaaacatccgtcgagtggcagaggcaggataagtcacctgcacatgaagagactcattcattcatacagcaaatattactggtacatcttccacatgccaggccctgcaaagtgctggggagataccatggttttcctggagctggtatttttggggtggagggaacccaccctgaataaataaagtaacccaataaataaagaagatgattttgaacagcga

SEQ ID NO: 419721 - DNA, 836 bp, Homo sapiens
ctctcttccttccctcgcttcatgcccctcttcccagacacacaaaaaaaaaggtccaggtgggaagctggctggccatcagaagaccgtccccacggctcacctgacttttgttattgactgcatccacgggaagcagctctccctggcagcaaccgcatcaccaccccaagcccccagtcccaatcgagggcttgtcaccccaccaatgaagacttacatcgtgttctgtggggaaaactggccccatctgactcgggtgacccccatgggtgggggatgccttgcccaggccagggccaccctgccgctctgcagagggtctgtggcctcagcttccttcccagtcagcccgctctgcccccaggaggttcccgaggctaaggggaaacccgtgaaggctgcgcctgtgaggtcttcaacttggggaacagtcaaggactcactgaaagccctctcctcttgtgtctgtgggcaggccgattagctggaagggccgggctctgatgcccagaggctgcaattcccagggcctggccctgcttccccagctaagcaggagtcttttgtgcttgagccaaggaaacatcattagatccgctaaggggcatctgaaacatccgtcgagtggcagaggcaggataagtcacctgcacatgaagagactcattcattcatacagcaaatattactggtacatcttccacatgccaggccctgcaaagtgctggggagataccatggttttcctggagctggtatttttggggtggagggaacccaccctgaataaataaagtaacccaataaataaagaagatgattttgaacagcga

SEQ ID NO: 419722 - DNA, 3317 bp, Homo sapiens
ggctaggtagaggctggggttcaatcggccaagccgtgagccgaccagaaggccgtcctctttgatatcttttgcaattgtaccgaaagtgacttactcctctgcccttcctgcttccgtctcttgccggtgccgtggtgtcgtccgtgcctggtgaggttttgtgcagcggtaaagtgctggtgcttctggtgacctttgacctgtgggtgtcacttcttgtgtctgttttcccgtgttcgttttttgggtttagttgtgcttttgcttctgctggcttgctggacctgggctggggtgccaagtggcgcctgctgcgtcagagctcaaggaatctgtgcccaccaccagctcctggtccgtaggaggtgagacatggggttctgtcatgcccccctccactgagccttggctacatctgtgtctagggcttgggctgatctagtggcggggtaggtgaaactggggtcccttggggcgccccacgctgcttccacacccaccacctctggccttgggtggtggcattacagggatgagggagtcactgtgggtggccacagggctatggccaagcgttccctggccgtcttcctctggcctcagctttgttcctataggctgcccgcgccgtgggctgcaggtctcgccgcccgcttgatccctgaggtgtttccatgctgcgggtggtgcttccaggcagagtgggtgggggcccaccgggcaccgccctttcttccttgtccctgcctcactctgagagccttgggggtctccaccagtgcagacaagggctacagtctccagggccgggtcttgtccctcttctccgctggtccacgctggcagctcttggcttcgggcctgccttctgcctccctttgggatctgtgtcttccagggatcagctgcttggcttctgctggaggtgcctccctgtgggggcgcagcctgcctcctgctctcagttcctcgccagaggctgctgcccttcctggctgggctcaggaggctccttgtaggcatatgatggggagggggtgcccctacccacctccaagaggctacagccctgtgtctggccatgtgagccctggcctttcaccgggttgctggtttcttttctgtggggcccagacttctgtaaagcacacagatgtgggtaagatgaaaaactgtggcccaacagggcttaaccctatggatggtgggatttttatccaatagtttggcctggtgtgcccacaggatgggaacagggaggcaccatcaacacttgtcatgttaatgagcttttctttgctcgaggtgttcagagacaagtcctgtgtctacctgcgtcagcctgaaaatggaaatattggctgttgactcttgtcatttagtgacttcatccccctcccctcagtctgatcttgtctaagtagaatccaggcgttagttggaatcatatcataagtatccatgaagaaaacgtcatgatctgcctcggagtggggagaaacaggccctccttgtccttgtgcagcccccacttttgtcctggctgtgggtggccatccattttgagcacctctgccaggctgcagacctggaggcgaagggagtgtggaagaggagggtgtaagggtcgacgcgtgctgaatgggaggtgcaggtcctcggtgcgttggcagaagaggcttctggagtttcgaggccatacctcctttcaagagctttggatttggggcgacttccctgggtctaggggagtgttcctgtcccctgtcaggtcagccctgcggagccactccacccctcttccccttcccctggatttcctgacatagatggtgtgttcatgtgcaggtgtgagtgtgctgtccttctgatctctgttgatcccgctttcctactgagagggtggtggagagggtggtggtctcttctcacctcagtttttctgacacagcgaatcgagggctttggccaaggccaggtctctcaaacttgtccgccaagtaaaccatgatatatgtcttcccttccaccttaactttgccccaactcctcttttatcctaacatggacgctcagatttcagaggaatacccagcagggacaggtcagctctcaccaggagagtgaggcccctggctgctgctcggggtggcactggtgttgctggctcagctcttggtgcatgtttcagatatgtgtgtacacttctgactggtgatcagggcccggcccacggccctgagcggctgcagcctgctttgggacgatggtcaggtcccatgttgtccctgctgcctccctctggagtggccacttggccaaagcgcccatccacatctggaaagtcggagccgcagcctgctgcaccgtttccgctctgggatcttgtgagttacttttttaggctgtggtttggtgaaaggaaccaacacattaacgatttttcccccagaagccactgaataattctttttggtgtatttttgccttcctgttggctgtctggccttggagcaggtcgggagagtagagtacataatcagtgccacacagaggcagggcgtgtctgagagactaatgcctgtcctgcctctggcctgtgtcctgggtgtgtaccatacctgctgggccagtcccacacatttccaccctgcccctggagcagcagctttgataccatgggtgtcccttgagtctgagctagagtgtgtccccgataaactgtgagacctccctgttcttggtgaccccagttgggctttggcccctccagcaaccttgtgtcccagccctgcccttcttcccaccccctcaatctgctagtccctgaagcctttaaccaaacgggagtgggcacagaaagccttctcctggcaacaggacaagggctgcccgcgtgtccagccctgttgctctcctggcgctgagaggtgggtccaagcagagttgatcagtccctgcctgccctgcctaggtctagccaggggaggttgtgtgtgtgggagaagaccccgggatctgctggggtgggatggaggttattaaagatctaagtgaggaggggctggggtttggatgcggggtgaggcccgagcgctcacacttcgtgtagggcgggcaggggcctgacctcttgcagggcagtggccttggtgccctacccctgccctgcgcagtatttattgctaaattattgtccaggaggggcagcactgggcctggccccccgggtatttattgctgtacatagtgtatgtttgtgatatataaggttttctttattttgtatatgatcaataaaccttttaaagaga

SEQ ID NO: 419723 - DNA, 2576 bp, Homo sapiens
agcggatcctgggatgaggaacgtcactgggtctccaccagtgcagacaagggctacagtctccagggccgggtcttgtccctcttctccgctggtccacgctggcagctcttggcttcgggcctgccttctgcctccctttgggatctgtgtcttccagggatcagctgcttggcttctgctggaggtgcctccctgtgggggcgcagcctgcctcctgctctcagttcctcgccagaggctgctgcccttcctggctgggctcaggaggctccttgtaggcatatgatggggagggggtgcccctacccacctccaagaggctacagccctgtgtctggccatgtgagccctggcctttcaccgggttgctggtttcttttctgtggggcccagacttctgtaaagcacacagatgtgggtaagatgaaaaactgtggcccaacagggcttaaccctatggatggtgggatttttatccaatagtttggcctggtgtgcccacaggatgggaacagggaggcaccatcaacacttgtcatgttaatgagcttttctttgctcgaggtgttcagagacaagtcctgtgtctacctgcgtcagcctgaaaatggaaatattggctgttgactcttgtcatttagtgacttcatccccctcccctcagtctgatcttgtctaagtagaatccaggcgttagttggaatcatatcataagtatccatgaagaaaacgtcatgatctgcctcggagtggggagaaacaggccctccttgtccttgtgcagcccccacttttgtcctggctgtgggtggccatccattttgagcacctctgccaggctgcagacctggaggcgaagggagtgtggaagaggagggtgtaagggtcgacgcgtgctgaatgggaggtgcaggtcctcggtgcgttggcagaagaggcttctggagtttcgaggccatacctcctttcaagagctttggatttggggcgacttccctgggtctaggggagtgttcctgtcccctgtcaggtcagccctgcggagccactccacccctcttccccttcccctggatttcctgacatagatggtgtgttcatgtgcaggtgtgagtgtgctgtccttctgatctctgttgatcccgctttcctactgagagggtggtggagagggtggtggtctcttctcacctcagtttttctgacacagcgaatcgagggctttggccaaggccaggtctctcaaacttgtccgccaagtaaaccatgatatatgtcttcccttccaccttaactttgccccaactcctcttttatcctaacatggacgctcagatttcagaggaatacccagcagggacaggtcagctctcaccaggagagtgaggcccctggctgctgctcggggtggcactggtgttgctggctcagctcttggtgcatgtttcagatatgtgtgtacacttctgactggtgatcagggcccggcccacggccctgagcggctgcagcctgctttgggacgatggtcaggtcccatgttgtccctgctgcctccctctggagtggccacttggccaaagcgcccatccacatctggaaagtcggagccgcagcctgctgcaccgtttccgctctgggatcttgtgagttacttttttaggctgtggtttggtgaaaggaaccaacacattaacgatttttcccccagaagccactgaataattctttttggtgtatttttgccttcctgttggctgtctggccttggagcaggtcgggagagtagagtacataatcagtgccacacagaggcagggcgtgtctgagagactaatgcctgtcctgcctctggcctgtgtcctgggtgtgtaccatacctgctgggccagtcccacacatttccaccctgcccctggagcagcagctttgataccatgggtgtcccttgagtctgagctagagtgtgtccccgataaactgtgagacctccctgttcttggtgaccccagttgggctttggcccctccagcaaccttgtgtcccagccctgcccttcttcccaccccctcaatctgctagtccctgaagcctttaaccaaacgggagtgggcacagaaagccttctcctggcaacaggacaagggctgcccgcgtgtccagccctgttgctctcctggcgctgagaggtgggtccaagcagagttgatcagtccctgcctgccctgcctaggtctagccaggggaggttgtgtgtgtgggagaagaccccgggatctgctggggtgggatggaggttattaaagatctaagtgaggaggggctggggtttggatgcggggtgaggcccgagcgctcacacttcgtgtagggcgggcaggggcctgacctcttgcagggcagtggccttggtgccctacccctgccctgcgcagtatttattgctaaattattgtccaggaggggcagcactgggcctggccccccgggtatttattgctgtacatagtgtatgtttgtgatatataaggttttctttattttgtatatgatcaataaaccttttaaagaga

SEQ ID NO: 419724 - DNA, 3307 bp, Homo sapiens
aaaaaaaaagaaaaaaaatccctttcttgtaaacttacggacacctctttgtggctgttggagtttagtttttatatacacagagttatcagacattattgttataaacttagtttaaaaaaaagacaaaaaaaaaaaagccaagccgtgagccgaccagaaggccgtcctctttgatatcttttgcaattgtaccgaaagtgacttactcctctgcccttcctgcttccgtctcttgccggtgccgtggtgtcgtccgtgcctggtgaggttttgtgcagcggtaaagtgctggtgcttctggtgacctttgacctgtgggtgtcacttcttgtgtctgttttcccgtgttcgttttttgggtttagttgtgcttttgcttctgctggcttgctggacctgggctggggtgccaagtggcgcctgctgcgtcagagctcaaggaatctgtgcccaccaccagctcctggtccgtaggaggtgagacatggggttctgtcatgcccccctccactgagccttggctacatctgtgtctagggcttgggctgatctagtggcggggtaggtgaaactggggtcccttggggcgccccacgctgcttccacacccaccacctctggccttgggtggtggcattacagggatgagggagtcactgtgggtggccacagggctatggccaagcgttccctggccgtcttcctctggcctcagctttgttcctataggctgcccgcgccgtgggctgcaggtctcgccgcccgcttgatccctgaggtgtttccatgctgcgggtggtgcttccaggcagagtgggtgggggcccaccgggcaccgccctttcttccttgtccctgcctcactctgagagccttgggggtctccaccagtgcagacaagggctacagtctccagggccgggtcttgtccctcttctccgctggtccacgctggcagctcttggcttcgggcctgccttctgcctccctttgggatctgtgtcttccagggatcagctgcttggcttctgctggaggtgcctccctgtgggggcgcagcctgcctcctgctctcagttcctcgccagaggctgctgcccttcctggctgggctcaggaggctccttgtaggcatatgatggggagggggtgcccctacccacctccaagaggctacagccctgtgtctggccatgtgagccctggcctttcaccgggttgctggtttcttttctgtggggcccagacttctgtaaagcacacagatgtgggtaagatgaaaaactgtggcccaacagggcttaaccctatggatggtgggatttttatccaatagtttggcctggtgtgcccacaggatgggaacagggaggcaccatcaacacttgtcatgttaatgagcttttctttgctcgaggtgttcagagacaagtcctgtgtctacctgcgtcagcctgaaaatggaaatattggctgttgactcttgtcatttagtgacttcatccccctcccctcagtctgatcttgtctaagtagaatccaggcgttagttggaatcatatcataagtatccatgaagaaaacgtcatgatctgcctcggagtggggagaaacaggccctccttgtccttgtgcagcccccacttttgtcctggctgtgggtggccatccattttgagcacctctgccaggctgcagacctggaggcgaagggagtgtggaagaggagggtgtaagggtcgacgcgtgctgaatgggaggtgcaggtcctcggtgcgttggcagaagaggcttctggagtttcgaggccatacctcctttcaagagctttggatttggggcgacttccctgggtctaggggagtgttcctgtcccctgtcaggtcagccctgcggagccactccacccctcttccccttcccctggatttcctgacatagatggtgtgttcatgtgcaggtgtgagtgtgctgtccttctgatctctgttgatcccgctttcctactgagagggtggtggagagggtggtggtctcttctcacctcagtttttctgacacagcgaatcgagggctttggccaaggccaggtctctcaaacttgtccgccaagtaaaccatgatatatgtcttcccttccaccttaactttgccccaactcctcttttatcctaacatggacgctcagatttcagaggaatacccagcagggacaggtcagctctcaccaggagagtgaggcccctggctgctgctcggggtggcactggtgttgctggctcagctcttggtgcatgtttcagatatgtgtgtacacttctgactggtgatcagggcccggcccacggccctgagcggctgcagcctgctttgggacgatggtcaggtcccatgttgtccctgctgcctccctctggagtggccacttggccaaagcgcccatccacatctggaaagtcggagccgcagcctgctgcaccgtttccgctctgggatcttgtgagttacttttttaggctgtggtttggtgaaaggaaccaacacattaacgatttttcccccagaagccactgaataattctttttggtgtatttttgccttcctgttggctgtctggccttggagcaggtcgggagagtagagtacataatcagtgccacacagaggcagggcgtgtctgagagactaatgcctgtcctgcctctggcctgtgtcctgggtgtgtaccatacctgctgggccagtcccacacatttccaccctgcccctggagcagcagctttgataccatgggtgtcccttgagtctgagctagagtgtgtccccgataaactgggagtgggcacagaaagccttctcctggcaacaggacaagggctgcccgcgtgtccagccctgttgctctcctggcgctgagaggtgggtccaagcagagttgatcagtccctgcctgccctgcctaggtctagccaggggaggttgtgtgtgtgggagaagaccccgggatctgctggggtgggatggaggttattaaagatctaagtgaggaggggctggggtttggatgcggggtgaggcccgagcgctcacacttcgtgtagggcgggcaggggcctgacctcttgcagggcagtggccttggtgccctacccctgccctgcgcagtatttattgctaaattattgtccaggaggggcagcactgggcctggccccccgggtatttattgctgtacatagtgtatgtttgtgatatataaggttttctttattttgtatatgatcaataaaccttttaaagaga

SEQ ID NO: 419725 - DNA, 3226 bp, Homo sapiens
aaaaaaaaagaaaaaaaatccctttcttgtaaacttacggacacctctttgtggctgttggagtttagtttttatatacacagagttatcagacattattgttataaacttagtttaaaaaaaagacaaaaaaaaaaaagccaagccgtgagccgaccagaaggccgtcctctttgatatcttttgcaattgtaccgaaagtgacttactcctctgcccttcctgcttccgtctcttgccggtgccgtggtgtcgtccgtgcctggtgaggttttgtgcagcggtaaagtgctggtgcttctggtgacctttgacctgtgggtgtcacttcttgtgtctgttttcccgtgttcgttttttgggtttagttgtgcttttgcttctgctggcttgctggacctgggctggggtgccaagtggcgcctgctgcgtcagagctcaaggaatctgtgcccaccaccagctcctggtccgtaggaggtgagacatggggttctgtcatgcccccctccactgagccttggctacatctgtgtctagggcttgggctgatctagtggcggggtaggtgaaactggggtcccttggggcgccccacgctgcttccacacccaccacctctggccttgggtggtggcattacagggatgagggagtcactgtgggtggccacagggctatggccaagcgttccctggccgtcttcctctggcctcagctttgttcctataggctgcccgcgccgtgggctgcaggtctcgccgcccgcttgatccctgaggtgtttccatgctgcgggtggtgcttccaggcagagtgggtgggggcccaccgggcaccgccctttcttccttgtccctgcctcactctgagagccttgggggtctccaccagtgcagacaagggctacagtctccagggccgggtcttgtccctcttctccgctggtccacgctggcagctcttggcttcgggcctgccttctgcctccctttgggatctgtgtcttccagggatcagctgcttggcttctgctggaggtgcctccctgtgggggcgcagcctgcctcctgctctcagttcctcgccagaggctgctgcccttcctggctgggctcaggaggctccttgtaggcatatgatggggagggggtgcccctacccacctccaagaggctacagccctgtgtctggccatgtgagccctggcctttcaccgggttgctggtttcttttctgtggggcccagacttctgtaaagcacacagatgtgggtaagatgaaaaactgtggcccaacagggcttaaccctatggatggtgggatttttatccaatagtttggcctggtgtgcccacaggatgggaacagggaggcaccatcaacacttgtcatgttaatgagcttttctttgctcgaggtgttcagagacaagtcctgtgtctacctgcgtcagcctgaaaatggaaatattggctgttgactcttgtcatttagtgacttcatccccctcccctcagtctgatcttgtctaagtagaatccaggcgttagttggaatcatatcataagtatccatgaagaaaacgtcatgatctgcctcggagtggggagaaacaggccctccttgtccttgtgcagcccccacttttgtcctggctgtgggtggccatccattttgagcacctctgccaggctgcagacctggaggcgaagggagtgtggaagaggagggtgtaagggtcgacgcgtgctgaatgggaggtgcaggtcctcggtgcgttggcagaagaggcttctggagtttcgaggccatacctcctttcaagagctttggatttggggcgacttccctgggtctaggggagtgttcctgtcccctgtcaggtcagccctgcggagccactccacccctcttccccttcccctggatttcctgacatagatggtgtgttcatgtgcaggtgtgagtgtgctgtccttctgatctctgttgatcccgctttcctactgagagggtggtggagagggtggtggtctcttctcacctcagtttttctgacacagcgaatcgagggctttggccaaggccaggtctctcaaacttgtccgccaagtaaaccatgatatatgtcttcccttccaccttaactttgccccaactcctcttttatcctaacatggacgctcagatttcagaggaatacccagcagggacaggtcagctctcaccaggagagtgaggcccctggctgctgctcggggtggcactggtgttgctggctcagctcttggtgcatgtttcagatatgtgtgtacacttctgactggtgatcagggcccggcccacggccctgagcggctgcagcctgctttgggacgatggtcaggtcccatgttgtccctgctgcctccctctggagtggccacttggccaaagcgcccatccacatctggaaagtcggagccgcagcctgctgcaccgtttccgctctgggatcttgtgagttacttttttaggctgtggtttggtgaaaggaaccaacacattaacgatttttcccccagaagccactgaataattctttttggtgtatttttgccttcctgttggctgtctggccttggagcaggtcgggagagtagagtacataatcagtgccacacagaggcagggcgtgtctgagagactaatgcctgtcctgcctctggcctgtgtcctgggtgtgtaccatacctgctgggccagtcccacacatttccaccctgcccctggagcagcagctttgataccatgggtgtcccttgagtctgagctagagtgtgtccccgataaactgtgagacctccctgttcttggtgaccccagttgggctttggcccctccagcaaccttgtgtcccagccctgcccttcttcccaccccctcaatctgtggggtgggatggaggttattaaagatctaagtgaggaggggctggggtttggatgcggggtgaggcccgagcgctcacacttcgtgtagggcgggcaggggcctgacctcttgcagggcagtggccttggtgccctacccctgccctgcgcagtatttattgctaaattattgtccaggaggggcagcactgggcctggccccccgggtatttattgctgtacatagtgtatgtttgtgatatataaggttttctttattttgtatatgatcaataaaccttttaaagaga

SEQ ID NO: 419726 - DNA, 3429 bp, Homo sapiens
aaaaaaaaagaaaaaaaatccctttcttgtaaacttacggacacctctttgtggctgttggagtttagtttttatatacacagagttatcagacattattgttataaacttagtttaaaaaaaagacaaaaaaaaaaaagccaagccgtgagccgaccagaaggccgtcctctttgatatcttttgcaattgtaccgaaagtgacttactcctctgcccttcctgcttccgtctcttgccggtgccgtggtgtcgtccgtgcctggtgaggttttgtgcagcggtaaagtgctggtgcttctggtgacctttgacctgtgggtgtcacttcttgtgtctgttttcccgtgttcgttttttgggtttagttgtgcttttgcttctgctggcttgctggacctgggctggggtgccaagtggcgcctgctgcgtcagagctcaaggaatctgtgcccaccaccagctcctggtccgtaggaggtgagacatggggttctgtcatgcccccctccactgagccttggctacatctgtgtctagggcttgggctgatctagtggcggggtaggtgaaactggggtcccttggggcgccccacgctgcttccacacccaccacctctggccttgggtggtggcattacagggatgagggagtcactgtgggtggccacagggctatggccaagcgttccctggccgtcttcctctggcctcagctttgttcctataggctgcccgcgccgtgggctgcaggtctcgccgcccgcttgatccctgaggtgtttccatgctgcgggtggtgcttccaggcagagtgggtgggggcccaccgggcaccgccctttcttccttgtccctgcctcactctgagagccttgggggtctccaccagtgcagacaagggctacagtctccagggccgggtcttgtccctcttctccgctggtccacgctggcagctcttggcttcgggcctgccttctgcctccctttgggatctgtgtcttccagggatcagctgcttggcttctgctggaggtgcctccctgtgggggcgcagcctgcctcctgctctcagttcctcgccagaggctgctgcccttcctggctgggctcaggaggctccttgtaggcatatgatggggagggggtgcccctacccacctccaagaggctacagccctgtgtctggccatgtgagccctggcctttcaccgggttgctggtttcttttctgtggggcccagacttctgtaaagcacacagatgtgggtaagatgaaaaactgtggcccaacagggcttaaccctatggatggtgggatttttatccaatagtttggcctggtgtgcccacaggatgggaacagggaggcaccatcaacacttgtcatgttaatgagcttttctttgctcgaggtgttcagagacaagtcctgtgtctacctgcgtcagcctgaaaatggaaatattggctgttgactcttgtcatttagtgacttcatccccctcccctcagtctgatcttgtctaagtagaatccaggcgttagttggaatcatatcataagtatccatgaagaaaacgtcatgatctgcctcggagtggggagaaacaggccctccttgtccttgtgcagcccccacttttgtcctggctgtgggtggccatccattttgagcacctctgccaggctgcagacctggaggcgaagggagtgtggaagaggagggtgtaagggtcgacgcgtgctgaatgggaggtgcaggtcctcggtgcgttggcagaagaggcttctggagtttcgaggccatacctcctttcaagagctttggatttggggcgacttccctgggtctaggggagtgttcctgtcccctgtcaggtcagccctgcggagccactccacccctcttccccttcccctggatttcctgacatagatggtgtgttcatgtgcaggtgtgagtgtgctgtccttctgatctctgttgatcccgctttcctactgagagggtggtggagagggtggtggtctcttctcacctcagtttttctgacacagcgaatcgagggctttggccaaggccaggtctctcaaacttgtccgccaagtaaaccatgatatatgtcttcccttccaccttaactttgccccaactcctcttttatcctaacatggacgctcagatttcagaggaatacccagcagggacaggtcagctctcaccaggagagtgaggcccctggctgctgctcggggtggcactggtgttgctggctcagctcttggtgcatgtttcagatatgtgtgtacacttctgactggtgatcagggcccggcccacggccctgagcggctgcagcctgctttgggacgatggtcaggtcccatgttgtccctgctgcctccctctggagtggccacttggccaaagcgcccatccacatctggaaagtcggagccgcagcctgctgcaccgtttccgctctgggatcttgtgagttacttttttaggctgtggtttggtgaaaggaaccaacacattaacgatttttcccccagaagccactgaataattctttttggtgtatttttgccttcctgttggctgtctggccttggagcaggtcgggagagtagagtacataatcagtgccacacagaggcagggcgtgtctgagagactaatgcctgtcctgcctctggcctgtgtcctgggtgtgtaccatacctgctgggccagtcccacacatttccaccctgcccctggagcagcagctttgataccatgggtgtcccttgagtctgagctagagtgtgtccccgataaactgtgagacctccctgttcttggtgaccccagttgggctttggcccctccagcaaccttgtgtcccagccctgcccttcttcccaccccctcaatctgctagtccctgaagcctttaaccaaacgggagtgggcacagaaagccttctcctggcaacaggacaagggctgcccgcgtgtccagccctgttgctctcctggcgctgagaggtgggtccaagcagagttgatcagtccctgcctgccctgcctaggtctagccaggggaggttgtgtgtgtgggagaagaccccgggatctgctggggtgggatggaggttattaaagatctaagtgaggaggggctggggtttggatgcggggtgaggcccgagcgctcacacttcgtgtagggcgggcaggggcctgacctcttgcagggcagtggccttggtgccctacccctgccctgcgcagtatttattgctaaattattgtccaggaggggcagcactgggcctggccccccgggtatttattgctgtacatagtgtatgtttgtgatatataaggttttctttattttgtatatgatcaataaaccttttaaagaga

SEQ ID NO: 419727 - DNA, 2996 bp, Homo sapiens
aaaaaaaaagaaaaaaaatccctttcttgtaaacttacggacacctctttgtggctgttggagtttagtttttatatacacagagttatcagacattattgttataaacttagtttaaaaaaaagacaaaaaaaaaaaagccaagccgtgagccgaccagaaggccgtcctctttgatatcttttgcaattgtaccgaaagtgacttactcctctgcccttcctgcttccgtctcttgccggtgccgtggtgtcgtccgtgcctggtgaggttttgtgcagcggtaaagtgctggtgcttctggtgacctttgacctgtgggtgtcacttcttgtgtctgttttcccgtgttcgttttttgggtttagttgtgcttttgcttctgctggcttgctggacctgggctggggtgccaagtggcgcctgctgcgtcagagctcaaggaatctgtgcccaccaccagctcctggtccgtaggaggtgagacatggggttctgtcatgcccccctccactgagccttggctacatctgtgtctagggcttgggctgatctagtggcggggtaggtgaaactggggtcccttggggcgccccacgctgcttccacacccaccacctctggccttgggtggtggcattacagggatgagggagtcactgtgggtggccacagggctatggccaagcgttccctggccgtcttcctctggcctcagctttgttcctataggctgcccgcgccgtgggctgcaggtctcgccgcccgcttgatccctgaggtgtttccatgctgcgggtggtgcttccaggcagagtgggtgggggcccaccgggcaccgccctttcttccttgtccctgcctcactctgagagccttgggggtctccaccagtgcagacaagggctacagtctccagggccgggtcttgtccctcttctccgctggtccacgctggcagctcttggcttcgggcctgccttctgcctccctttgggatctgtgtcttccagggatcagctgcttggcttctgctggaggtgcctccctgtgggggcgcagcctgcctcctgctctcagttcctcgccagaggctgctgcccttcctggctgggctcaggaggctccttgtaggcatatgatggggagggggtgcccctacccacctccaagaggctacagccctgtgtctggccatgtgagccctggcctttcaccgggttgctggtttcttttctgtggggcccagacttctgtaaagcacacagatgtgggtaagatgaaaaactgtggcccaacagggcttaaccctatggatggtgggatttttatccaatagtttggcctggtgtgcccacaggatgggaacagggaggcaccatcaacacttgtcatgttaatgagcttttctttgctcgaggtgttcagagacaagtcctgtgtctacctgcgtcagcctgaaaatggaaatattggctgttgactcttgtcatttagtgacttcatccccctcccctcagtctgatcttgtctaagtagaatccaggcgttagttggaatcatatcataagtatccatgaagaaaacgtcatgatctgcctcggagtggggagaaacaggccctccttgtccttgtgcagcccccacttttgtcctggctgtgggtggccatccattttgagcacctctgccaggctgcagacctggaggcgaagggagtgtggaagaggagggtgtaagggtcgacgcgtgctgaatgggaggtgcaggtcctcggtgcgttggcagaagaggcttctggagtttcgaggccatacctcctttcaagagctttggatttggggcgacttccctgggtctaggggagtgttcctgtcccctgtcaggtcagccctgcggagccactccacccctcttccccttcccctggatttcctgacatagatggtgtgttcatgtgcaggtgtgagtgtgtgcctccctctggagtggccacttggccaaagcgcccatccacatctggaaagtcggagccgcagcctgctgcaccgtttccgctctgggatcttgtgagttacttttttaggctgtggtttggtgaaaggaaccaacacattaacgatttttcccccagaagccactgaataattctttttggtgtatttttgccttcctgttggctgtctggccttggagcaggtcgggagagtagagtacataatcagtgccacacagaggcagggcgtgtctgagagactaatgcctgtcctgcctctggcctgtgtcctgggtgtgtaccatacctgctgggccagtcccacacatttccaccctgcccctggagcagcagctttgataccatgggtgtcccttgagtctgagctagagtgtgtccccgataaactgtgagacctccctgttcttggtgaccccagttgggctttggcccctccagcaaccttgtgtcccagccctgcccttcttcccaccccctcaatctgctagtccctgaagcctttaaccaaacgggagtgggcacagaaagccttctcctggcaacaggacaagggctgcccgcgtgtccagccctgttgctctcctggcgctgagaggtgggtccaagcagagttgatcagtccctgcctgccctgcctaggtctagccaggggaggttgtgtgtgtgggagaagaccccgggatctgctggggtgggatggaggttattaaagatctaagtgaggaggggctggggtttggatgcggggtgaggcccgagcgctcacacttcgtgtagggcgggcaggggcctgacctcttgcagggcagtggccttggtgccctacccctgccctgcgcagtatttattgctaaattattgtccaggaggggcagcactgggcctggccccccgggtatttattgctgtacatagtgtatgtttgtgatatataaggttttctttattttgtatatgatcaataaaccttttaaagaga

SEQ ID NO: 419728 - DNA, 3294 bp, Homo sapiens
aaaaaaaaagaaaaaaaatccctttcttgtaaacttacggacacctctttgtggctgttggagtttagtttttatatacacagagttatcagacattattgttataaacttagtttaaaaaaaagacaaaaaaaaaaaagccaagccgtgagccgaccagaaggccgtcctctttgatatcttttgcaattgtaccgaaagtgacttactcctctgcccttcctgcttccgtctcttgccggtgccgtggtgtcgtccgtgcctggtgaggttttgtgcagcggtaaagtgctggtgcttctggtgacctttgacctgtgggtgtcacttcttgtgtctgttttcccgtgttcgttttttgggtttagttgtgcttttgcttctgctggcttgctggacctgggctggggtgccaagtggcgcctgctgcgtcagagctcaaggaatctgtgcccaccaccagctcctggtccgtaggaggtgagacatggggttctgtcatgcccccctccactgagccttggctacatctgtgtctagggcttgggctgatctagtggcggggtaggtgaaactggggtcccttggggcgccccacgctgcttccacacccaccacctctggccttgggtggtggcattacagggatgagggagtcactgtgggtggccacagggctatggccaagcgttccctggccgtcttcctctggcctcagctttgttcctataggctgcccgcgccgtgggctgcaggtctcgccgcccgcttgatccctgaggtgtttccatgctgcgggtggtgcttccaggcagagtgggtgggggcccaccgggcaccgccctttcttccttgtccctgcctcactctgagagccttgggggtctccaccagtgcagacaagggctacagtctccagggccgggtcttgtccctcttctccgctggtccacgctggcagctcttggcttcgggcctgccttctgcctccctttgggatctgtgtcttccagggatcagctgcttggcttctgctggaggtgcctccctgtgggggcgcagcctgcctcctgctctcagttcctcgccagaggctgctgcccttcctggctgggctcaggaggctccttgtaggcatatgatggggagggggtgcccctacccacctccaagaggctacagccctgtgtctggccatgtgagccctggcctttcaccgggttgctggtttcttttctgtggggcccagacttctgtaaagcacacagatgtgggtaagatgaaaaactgtggcccaacagggcttaaccctatggatggtgggatttttatccaatagtttggcctggtgtgcccacaggatgggaacagggaggcaccatcaacacttgtcatgttaatgagcttttctttgctcgaggtgttcagagacaagtcctgtgtctacctgcgtcagcctgaaaatggaaatattggctgttgactcttgtcatttagtgacttcatccccctcccctcagtctgatcttgtctaagtagaatccaggcgttagttggaatcatatcataagtatccatgaagaaaacgtcatgatctgcctcggagtggggagaaacaggccctccttgtccttgtgcagcccccacttttgtcctggctgtgggtggccatccattttgagcacctctgccaggctgcagacctggaggcgaagggagtgtggaagaggagggtgtaagggtcgacgcgtgctgaatgggaggtgcaggtcctcggtgcgttggcagaagaggcttctggagtttcgaggccatacctcctttcaagagctttggatttggggcgacttccctgggtctaggggagtgttcctgtcccctgtcaggtcagccctgcggagccactccacccctcttccccttcccctggatttcctgacatagatggtgtgttcatgtgcaggtgtgagtgtgctgtccttctgatctctgttgatcccgctttcctactgagagggtggtggagagggtggtggtctcttctcacctcagtttttctgacacagcgaatcgagggctttggccaaggccaggtctctcaaacttgtccgccaagtaaaccatgatatatgtcttcccttccaccttaactttgccccaactcctcttttatcctaacatggacgctcagatttcagaggaatacccagcagggacaggtcagctctcaccaggagagtgaggcccctggctgctgctcggggtggcactggtgttgctggctcagctcttggtgcatgtttcagatatgtgtgtacacttctgactggtgatcagggcccggcccacggccctgagcggctgcagcctgctttgggacgatggtcaggtcccatgttgtccctgctgcctccctctggagtggccacttggccaaagcgcccatccacatctggaaagtcggagccgcagcctgctgcaccgtttccgctctgggatcttgtgagttacttttttaggctgtggtttggtgaaaggaaccaacacattaacgatttttcccccagaagccactgaataattctttttggtgtatttttgccttcctgttggctgtctggccttggagcaggtcgggagagtagagtacataatcagtgccacacagaggcagggcgtgtctgagagactaatgcctgtcctgcctctggcctgtgtcctgggtgtgtaccatacctgctgggccagtcccacacatttccaccctgcccctggagcagcagctttgataccatgggtgtcccttgagtctgagctagagtgtgtccccgataaactgtgagacctccctgttcttggtgaccccagttgggctttggcccctccagcaaccttgtgtcccgctgagaggtgggtccaagcagagttgatcagtccctgcctgccctgcctaggtctagccaggggaggttgtgtgtgtgggagaagaccccgggatctgctggggtgggatggaggttattaaagatctaagtgaggaggggctggggtttggatgcggggtgaggcccgagcgctcacacttcgtgtagggcgggcaggggcctgacctcttgcagggcagtggccttggtgccctacccctgccctgcgcagtatttattgctaaattattgtccaggaggggcagcactgggcctggccccccgggtatttattgctgtacatagtgtatgtttgtgatatataaggttttctttattttgtatatgatcaataaaccttttaaagaga

SEQ ID NO: 419729 - DNA, 903 bp, Homo sapiens
ccgtcacagtttctactcgggcacctagaagccagcatgctgcgctcacacagagcggcactgaccatgcgcaggaatgtctcgaccttgtccatgtccttcctgaagcagtagagcagcccgtagtccttgagcagtgcgtcatggttgtgcgagtttgtgtcaaacttgctgtaggtctgcttgaggatctgcccagatcccgtcgctctgccaaattggcagagcgtcgggagagtagagtacataatcagtgccacacagaggcagggcgtgtctgagagactaatgcctgtcctgcctctggcctgtgtcctgggtgtgtaccatacctgctgggccagtcccacacatttccaccctgcccctggagcagcagctttgataccatgggtgtcccttgagtctgagctagagtgtgtccccgataaactgggagtgggcacagaaagccttctcctggcaacaggacaagggctgcccgcgtgtccagccctgttgctctcctggcgctgagaggtgggtccaagcagagttgatcagtccctgcctgccctgcctaggtctagccaggggaggttgtgtgtgtgggagaagaccccgggatctgctggggtgggatggaggttattaaagatctaagtgaggaggggctggggtttggatgcggggtgaggcccgagcgctcacacttcgtgtagggcgggcaggggcctgacctcttgcagggcagtggccttggtgccctacccctgccctgcgcagtatttattgctaaattattgtccaggaggggcagcactgggcctggccccccgggtatttattgctgtacatagtgtatgtttgtgatatataaggttttctttattttgtatatgatcaataaaccttttaaagaga

SEQ ID NO: 419730 - DNA, 1159 bp, Homo sapiens
gcctactactactaaattcgcggccgcgtcgacatttcccaaaccccttgagtcttttcttttccttggtatttatggaattcttacaaagaaaaatttgcagaagtactattttcgtgaataaaacatatgtatcattctactaccattagcaaataacttagttgtagttaatataattgttaaaaggtttagctctgttacaaataaaaacataaagatctggcaaccagactttcatgatgttacattaccatgacaagaaactctgggcagtaaaagttggacccacatggagtacataagcatctgatacctggagatgtatttaaaatttttcaagttatcttccatgatttaggaaccatttagagacatgaagtctttatgggttgggggaaaggttgataattagtttgattaaaggtaatgattaatatccctttttgttcatacttccttctgaggctgttttcccctaaacagtatcttaatctgttacatgtaattgaaatattatttgaagcagtgagttattgtaacctcagattagttacattgatcaaaacattgatttatacacacacacacacacatacatatgtagcttttatatttagtctggttacattagtgaccatggtatttactttcttcttaaggagcctttgaatttcttgtccagataaaaatccgaatatttctcttagactcatacataaagggacacagttatcgttaggtagcatatgttttactatcggtttgtcaaaaaagttaataaaaagtgcttattgatttatttctctagaaatttgctttgtcttttttagcattaaaaataattactatagcaaagcagtcaaagttaggtatattatatatatacttggtaactaaagatgggaaacctaaaatgctatttttctttcatagcacatttactagtataaaggaagtaagatcctaataaactgagcctttatttaacttctttgacctagttttaggtttacagaaaagttgtaaaaatacaacagttctttatgtcttatattaatcttaatgttaaaatcttacgttatcatagaacatttataaaacttaagaaattaacctttgtataatactattaactaaagtagaacattttattttt

SEQ ID NO: 419731 - DNA, 2098 bp, Homo sapiens
agcggcgtgaaacgcaacggatcgtttccggaagccggtagccgcctcagtcgtcagaccggtgctagcgacacgggagtggcaaacgcatcctcttgccgttcccggtgtttgggccttgcctgtgacggtgggaaaagaaaatggccttgctgtgctacaaccggggctgcggtcagcgcttcgatcctgagaccaattccgacgatgcttgcacataccacccaggtgttccggtctttcacgatgcattaaagggttggtcttgctgtaagagaagaacaactgatttttctgatttcttaagcattgtaggctgtacaaaaggtagacataatagtgagaagccacctgagccagtcaaacctgaagtcaagactactgagaagaaggagctatgtgaattaaaacccaaatttcaggaacacatcattcaagcccctaagccagtagaagcaataaaaagaccaagcccagatgaaccaatgacaaatttggaattaaaaatatctgcctccctaaaacaagcacttgataaacttaaactgtcatcagggaatgaagaaaataagaaagaagaagacaatgatgaaattaagattgggacctcatgtaagaatggagggtgttcaaagacataccagggtctagagagtctagaagaagtctgtgtatatcattctggagtacctattttccatgaggggatgaaatactggagctgttgtagaagaaaaacttctgattttaatacattcttagcccaagagggctgtacaaaagggaaacacatgtggactaaaaaagatgctgggaaaaaagttgttccatgtagacatgactggcatcagactggaggtgaagttaccatttcagtatatgctaaaaactcacttccagaacttagccgagtagaagcaaatagcacattgttaaatgtgcatattgtatttgaaggagagaaggaatttgatcaaaatgtgaaattatggggtgtgattgatgtaaagcgaagttatgtaactatgactgcaacaaagattgaaatcactatgagaaaagctgaaccgatgcagtgggcaagccttgaactgcctgcagctaaaaagcaggaaaaacaaaaagatgacacaacagattgagtgggagatggaaggaaggctattacattatttccgaatttttaatactgtgtgaagtggtggcttgctgctgtaatcttttgttttgttgttgtgttactgaatgtggcatttcagggttaacattaggttcttaaaagccaaagtcagtttgtctttttgtgcctctcatctttcttttgtgttatgtaagattgattattcatttctccctactggtaggaaccatagttgtgtcctatacttgaagaggctggaaagtagcccataaccataattgcagtatttctttgtatttctctgttaagcaaagaaatattaaggaacattttttttatgtttttgtattattccataattagtaaagcaagatgaaatgtcaaattttaatcagttttttcatggatttgtgttcttacagtacttgaaaatatttaaggaagagatgaagctctgcagttttttctatgtgggatgattacttttttaaggaggattaattctgaggtagtatagtaactaaaggggaatatatgaattgtttaacaaattagaatttgtttacaactacttgaatttttaaattatgtcaaaacttacattacttgccaagcagtatgatgttataggaaacataaataagattacagaggtatcaatttggttaaaattcaccattttataagactaagcaataatcttaacaacctctttcctgaatatttaaatgtgtttgtatggtgttatgactaattgttactgatttagagactaagccctcttaaaacctttagttaaatataaaaagaaattatatatatcttgcctccctgatggaaaactatataaaattgtagacttaaaaggtttgtggaaatacattaggatatcagaaaactaaatatatggagttgctttatgactattacatgttaaataaaaatagcttaattgtt

SEQ ID NO: 419732 - DNA, 2531 bp, Homo sapiens
agcggcgtgaaacgcaacggatcgtttccggaagccggtagccgcctcagtcgtcagaccggtgctagcgacacgggagtggcaaacgcatcctcttgccgttcccggtgtttgggccttgcctgtgacggtgggaaaagaaaatggccttgctgtgctacaaccggggctgcggtcagcgcttcgatcctgagaccaattccgacgatgcttgcacataccacccaggtgttccggtctttcacgatgcattaaagggttggtcttgctgtaagagaagaacaactgatttttctgatttcttaagcattgtaggctgtacaaaaggtagacataatagtgagaagccacctgagccagtcaaacctgaagtcaagactactgagaagaaggagctatgtgaattaaaacccaaatttcaggaacacatcattcaagcccctaagccagtagaagcaataaaaagaccaagcccagatgaaccaatgacaaatttggaattaaaaatatctgcctccctaaaacaagcacttgataaacttaaactgtcatcagggaatgaagaaaataagaaagaagaagacaatgatgaaattaagattgggacctcatgtaagaatggagggtgttcaaagacataccagggtctagagagtctagaagaagtctgtgtatatcattctggagtacctattttccatgaggggatgaaatactggagctgttgtagaagaaaaacttctgattttaatacattcttagcccaagagggctgtacaaaagggaaacacatgtggactaaaaaagatgctgggaaaaaagttgttccatgtagacatgactggcatcagactggaggtgaagttaccatttcagtatatgctaaaaactcacttccagaacttagccgagtagaagcaaatagcacattgttaaatgtgcatattgtatttgaaggagagaaggaatttgatcaaaatgtgaaattatggggtgtgattgatgtaaagcgaagttatgtaactatgactgcaacaaagattgaaatcactatgagaaaagctgaaccgatgcagtgggcaagccttgaactgcctgcagctaaaaagcaggaaaaacaaaaagatgacacaacagattgagtgggagatggaaggaaggctattacattatttccgaatttttaatactgtgtgaagtggtggcttgctgctgtaatcttttgttttgttgttgtgttactgaatgtggcatttcagggttaacattaggttcttaaaagccaaagtcagtttgtctttttgtgcctctcatctttcttttgtgttatgtaagattgattattcatttctccctactggtaggaaccatagttgtgtcctatacttgaagaggctggaaagtagcccataaccataattgcagtatttctttgtatttctctgttaagcaaagaaatattaaggaacattttttttatgtttttgtattattccataattagtaaagcaagatgaaatgtcaaattttaatcagttttttcatggatttgtgttcttacagtacttgaaaatatttaaggaagagatgaagctctgcagttttttctatgtgggatgattacttttttaaggaggattaattctgaggtagtatagtaactaaaggggaatatatgaattgtttaacaaattagaatttgtttacaactacttgaatttttaaattatgtcaaaacttacattacttgccaagcagtatgatgttataggaaacataaataagattacagaggtatcaatttggttaaaattcaccattttataagactaagcaataatcttaacaacctctttcctgaatatttaaatgtgtttgtatggtgttatgactaattgttactgatttagagactaagccctcttaaaacctttagttaaatataaaaagaaattatatatatcttgcctccctgatggaaaactatataaaattgtagacttaaaaggtttgtggaaatacattaggatatcagaaaactaaatatatggagttgctttatgactattacatgttaaataaaaatagcttaattgttttggagtttttttttaaagtcatgaagagcttcacaattctagtgatacaatgttgactatatattgtactttatattaaatataggtaatacagaattagatcgtttggataggttttgagttagtgcagaactcaagaagaaaaattaggaaatattctgaaggccagaactctggaagaacttagaaagtttgggaataaattaaacttatgtagatttaaaattaaaaggggtttatttcccaaaccccttgagtcttttcttttccttggtatttatggaattcttacaaagaaaaatttgcagaagtactattttcgtgaataaaacatatgtatcattctactaccattagcaaataacttagttgtagttaatataattgttaaaaggtttagctctgttacaaataaaaacataaagatctggc

SEQ ID NO: 419733 - DNA, 1041 bp, Homo sapiens
agcggcgtgaaacgcaacggatcgtttccggaagccggtagccgcctcagtcgtcagaccggtgctagcgacacgggagtggcaaacgcatcctcttgccgttcccggtgtttgggccttgcctgtgacggtgggaaaagaaaatggccttgctgtgctacaaccggggctgcggtcagcgcttcgatcctgagaccaattccgacgatgcttgcacataccacccaggtgttccggtctttcacgatgcattaaagggttggtcttgctgtaagagaagaacaactgatttttctgatttcttaagcattgtaggctgtacaaaaggtagacataatagtgagaagccacctgagccagtcaaacctgaagtcaagactactgagaagaaggagctatgtgaattaaaacccaaatttcaggaacacatcattcaagcccctaagccagtagaagcaataaaaagaccaagcccagatgaaccaatgacaaatttggaattaaaaatatctgcctccctaaaacaagcacttgataaacttaaactgtcatcagggaatgaagaaaataagaaagaagaagacaatgatgaaattaagattgggacctcatgtaagaatggagggtgttcaaagagcctccatctacagcagcaatggggcccggatcttccagacaaaccctggatatatatataggtctgcagctcattttaccctttatagggataagaaatcaccatcactctagaacttccagaattgcttattagatttctcatattatttgacaatacttacatggagtttactgtacacataagtcatgcagtaactgtatttttattgagagtattaatcccttggtttcaacattgtttttgaaattagtaactaagtaagtacttgaatatgattggatgggatctcatactcaaaaggctgaaagcatcttaatatgactttctcaaaggaacctaaaacttaaccaagtccaaaagggaatcatttttcattttttaacagaatggcgtgggatgga

SEQ ID NO: 419734 - DNA, 1365 bp, Homo sapiens
ttttttttttgtattttaaccattctagtgtgtgtatagtgttttgtcatggttttgatttgtacttccctaatgatgactgcttttttgtatgtttattagccatttgtatatcctcttgtgaagtgtgcagaatcttttacctatctctaatgtctcttgcttaccagtttgtaagaattctttatatattttagctgtgactcttatcagaaattctatgctttttcactgtcttaatgacgactttgataaactttttatcaaattgctttttaacaaaatccaatttgtccatcattttgtttatgactagtgctttccatgttctatttaagaaatcgttgcttacttcagggctgtgagtgttttctcatatggaggcacatttaaatatgtaaatgacctggaactgattattgtataaggtgtgacatggatgtaattaaagaactttaaacaaaagggtgatagtaatttgataattagtagaaaatagaagtcgaaggctgagaaatagtagaaacctgttagtatagtctgattgcttaaaatctgctagcttatgaggaagattaacaaattaatatattcaagtcaaattgatgagatttcattatagactgcctatgggtggagggagaggagatgctgaagaggaacgaatggattttgctttgagaaactgagtctgtacggtgcatcaaataatatggggaaaagaatggactgtgggggcaatagcattaagtttagtagatgctaacatactgagttttatgttcttgtgaaatatcttaaggagaaatacacatctaatacttactttggatttataaaagataaacacagaattttattttctgtttgtaggtagtgctataaatacaaaaatagaaaatatactactggctacatccatgttttattaacataattttttgtgaattcatctgtagagcctccatctacagcagcaatggggcccggatcttccagacaaaccctggatatatatataggtctgcagctcattttaccctttatagggataagaaatcaccatcactctagaacttccagaattgcttattagatttctcatattatttgacaatacttacatggagtttactgtacacataagtcatgcagtaactgtatttttattgagagtattaatcccttggtttcaacattgtttttgaaattagtaactaagtaagtacttgaatatgattggatgggatctcatactcaaaaggctgaaagcatcttaatatgactttctcaaaggaacctaaaacttaaccaagtccaaaagggaatcatttttcattttttaacagaatggcgtgggatgga

SEQ ID NO: 419735 - DNA, 385 bp, Homo sapiens
agcggcgtgaaacgcaacggatcgtttccggaagccggtagccgcctcagtcgtcagaccggtgctagcgacacgggagtggcaaacgcatcctcttgccgttcccggtgtttgggccttgcctgtgacggtgggaaaagaaaatggccttgctgtgctacaaccggggctgcggtcagcgcttcgatcctgagaccaattccgacgaagcttgcacataccaccgaggtgtgcgggggctcacacctgtaatcccagaactttgggaggccaaggagggaggattgcattgagctgagtccaagaccagcctgggcaatatagtgagaccccatctctaccaaaaaattaaaaaaatagctggcgcggtgaacctattctggac

SEQ ID NO: 419736 - DNA, 226 bp, Homo sapiens
ttttttgccagatctttatgtttttatttgtaacagagctaaaccttttaacaattatattaactacaactaagttatttactattttcgtgaataaaacacaagtactattttcgtgaataaaacatatgtatcattctactaccattagcaaataacttagttgtagttaatataattgttaaaaggtttagctctgttacaaataaaaacataaagatctggc

SEQ ID NO: 419737 - DNA, 3463 bp, Homo sapiens
agcggcgtgaaacgcaacggatcgtttccggaagccggtagccgcctcagtcgtcagaccggtgctagcgacacgggagtggcaaacgcatcctcttgccgttcccggtgtttgggccttgcctgtgacggtgggaaaagaaaatggccttgctgtgctacaaccggggctgcggtcagcgcttcgatcctgagaccaattccgacgatgcttgcacataccacccaggtgttccggtctttcacgatgcattaaagggttggtcttgctgtaagagaagaacaactgatttttctgatttcttaagcattgtaggctgtacaaaaggtagacataatagtgagaagccacctgagccagtcaaacctgaagtcaagactactgagaagaaggagctatgtgaattaaaacccaaatttcaggaacacatcattcaagcccctaagccagtagaagcaataaaaagaccaagcccagatgaaccaatgacaaatttggaattaaaaatatctgcctccctaaaacaagcacttgataaacttaaactgtcatcagggaatgaagaaaataagaaagaagaagacaatgatgaaattaagattgggacctcatgtaagaatggagggtgttcaaagacataccagggtctagagagtctagaagaagtctgtgtatatcattctggagtacctattttccatgaggggatgaaatactggagctgttgtagaagaaaaacttctgattttaatacattcttagcccaagagggctgtacaaaagggaaacacatgtggactaaaaaagatgctgggaaaaaagttgttccatgtagacatgactggcatcagactggaggtgaagttaccatttcagtatatgctaaaaactcacttccagaacttagccgagtagaagcaaatagcacattgttaaatgtgcatattgtatttgaaggagagaaggaatttgatcaaaatgtgaaattatggggtgtgattgatgtaaagcgaagttatgtaactatgactgcaacaaagattgaaatcactatgagaaaagctgaaccgatgcagtgggcaagccttgaactgcctgcagctaaaaagcaggaaaaacaaaaagatgacacaacagattgagtgggagatggaaggaaggctattacattatttccgaatttttaatactgtgtgaagtggtggcttgctgctgtaatcttttgttttgttgttgtgttactgaatgtggcatttcagggttaacattaggttcttaaaagccaaagtcagtttgtctttttgtgcctctcatctttcttttgtgttatgtaagattgattattcatttctccctactggtaggaaccatagttgtgtcctatacttgaagaggctggaaagtagcccataaccataattgcagtatttctttgtatttctctgttaagcaaagaaatattaaggaacattttttttatgtttttgtattattccataattagtaaagcaagatgaaatgtcaaattttaatcagttttttcatggatttgtgttcttacagtacttgaaaatatttaaggaagagatgaagctctgcagttttttctatgtgggatgattacttttttaaggaggattaattctgaggtagtatagtaactaaaggggaatatatgaattgtttaacaaattagaatttgtttacaactacttgaatttttaaattatgtcaaaacttacattacttgccaagcagtatgatgttataggaaacataaataagattacagaggtatcaatttggttaaaattcaccattttataagactaagcaataatcttaacaacctctttcctgaatatttaaatgtgtttgtatggtgttatgactaattgttactgatttagagactaagccctcttaaaacctttagttaaatataaaaagaaattatatatatcttgcctccctgatggaaaactatataaaattgtagacttaaaaggtttgtggaaatacattaggatatcagaaaactaaatatatggagttgctttatgactattacatgttaaataaaaatagcttaattgttttggagtttttttttaaagtcatgaagagcttcacaattctagtgatacaatgttgactatatattgtactttatattaaatataggtaatacagaattagatcgtttggataggttttgagttagtgcagaactcaagaagaaaaattaggaaatattctgaaggccagaactctggaagaacttagaaagtttgggaataaattaaacttatgtagatttaaaattaaaaggggtttatttcccaaaccccttgagtcttttcttttccttggtatttatggaattcttacaaagaaaaatttgcagaagtactattttcgtgaataaaacatatgtatcattctactaccattagcaaataacttagttgtagttaatataattgttaaaaggtttagctctgttacaaataaaaacataaagatctggcaaccagactttcatgatgttacattaccatgacaagaaactctgggcagtaaaagttggacccacatggagtacataagcatctgatacctggagatgtatttaaaatttttcaagttatcttccatgatttaggaaccatttagagacatgaagtctttatgggttgggggaaaggttgataattagtttgattaaaggtaatgattaatatccctttttgttcatacttccttctgaggctgttttcccctaaacagtatcttaatctgttacatgtaattgaaatattatttgaagcagtgagttattgtaacctcagattagttacattgatcaaaacattgatttatacacacacacacacacatacatatgtagcttttatatttagtctggttacattagtgaccatggtatttactttcttcttaaggagcctttgaatttcttgtccagataaaaatccgaatatttctcttagactcatacataaagggacacagttatcgttaggtagcatatgttttactatcggtttgtcaaaaaagttaataaaaagtgcttattgatttatttctctagaaatttgctttgtcttttttagcattaaaaataattactatagcaaagcagtcaaagttaggtatattatatatatacttggtaactaaagatgggaaacctaaaatgctatttttctttcatagcacatttactagtataaaggaagtaagatcctaataaactgagcctttatttaacttctttgacctagttttaggtttacagaaaagttgtaaaaatacaacagttctttatgtcttatattaatcttaatgttaaaatcttacgttatcatagaacatttataaaacttaagaaattaacctttgtataatactattaactaaagtagaacattttattttt

SEQ ID NO: 419738 - DNA, 3058 bp, Homo sapiens
cctcaaaagaagaagaaatgtgtcatatatcaatttggggatataagcaaatcctagtcacagtcgttttctaaaaagtattgttttctggaaaaacctagtttttaagaatgatgccacagcgaagttctattttaactttttaatttgatttttttttctttgttacagaagaagacaatgatgaaattaagattgggacctcatgtaagaatggagggtgttcaaagacataccagggtctagagagtctagaagaagtctgtgtatatcattctggagtacctattttccatgaggggatgaaatactggagctgttgtagaagaaaaacttctgattttaatacattcttagcccaagagggctgtacaaaagggaaacacatgtggactaaaaaagatgctgggaaaaaagttgttccatgtagacatgactggcatcagactggaggtgaagttaccatttcagtatatgctaaaaactcacttccagaacttagccgagtagaagcaaatagcacattgttaaatgtgcatattgtatttgaaggagagaaggaatttgatcaaaatgtgaaattatggggtgtgattgatgtaaagcgaagttatgtaactatgactgcaacaaagattgaaatcactatgagaaaagctgaaccgatgcagtgggcaagccttgaactgcctgcagctaaaaagcaggaaaaacaaaaagatgacacaacagattgagtgggagatggaaggaaggctattacattatttccgaatttttaatactgtgtgaagtggtggcttgctgctgtaatcttttgttttgttgttgtgttactgaatgtggcatttcagggttaacattaggttcttaaaagccaaagtcagtttgtctttttgtgcctctcatctttcttttgtgttatgtaagattgattattcatttctccctactggtaggaaccatagttgtgtcctatacttgaagaggctggaaagtagcccataaccataattgcagtatttctttgtatttctctgttaagcaaagaaatattaaggaacattttttttatgtttttgtattattccataattagtaaagcaagatgaaatgtcaaattttaatcagttttttcatggatttgtgttcttacagtacttgaaaatatttaaggaagagatgaagctctgcagttttttctatgtgggatgattacttttttaaggaggattaattctgaggtagtatagtaactaaaggggaatatatgaattgtttaacaaattagaatttgtttacaactacttgaatttttaaattatgtcaaaacttacattacttgccaagcagtatgatgttataggaaacataaataagattacagaggtatcaatttggttaaaattcaccattttataagactaagcaataatcttaacaacctctttcctgaatatttaaatgtgtttgtatggtgttatgactaattgttactgatttagagactaagccctcttaaaacctttagttaaatataaaaagaaattatatatatcttgcctccctgatggaaaactatataaaattgtagacttaaaaggtttgtggaaatacattaggatatcagaaaactaaatatatggagttgctttatgactattacatgttaaataaaaatagcttaattgttttggagtttttttttaaagtcatgaagagcttcacaattctagtgatacaatgttgactatatattgtactttatattaaatataggtaatacagaattagatcgtttggataggttttgagttagtgcagaactcaagaagaaaaattaggaaatattctgaaggccagaactctggaagaacttagaaagtttgggaataaattaaacttatgtagatttaaaattaaaaggggtttatttcccaaaccccttgagtcttttcttttccttggtatttatggaattcttacaaagaaaaatttgcagaagtactattttcgtgaataaaacatatgtatcattctactaccattagcaaataacttagttgtagttaatataattgttaaaaggtttagctctgttacaaataaaaacataaagatctggcaaccagactttcatgatgttacattaccatgacaagaaactctgggcagtaaaagttggacccacatggagtacataagcatctgatacctggagatgtatttaaaatttttcaagttatcttccatgatttaggaaccatttagagacatgaagtctttatgggttgggggaaaggttgataattagtttgattaaaggtaatgattaatatccctttttgttcatacttccttctgaggctgttttcccctaaacagtatcttaatctgttacatgtaattgaaatattatttgaagcagtgagttattgtaacctcagattagttacattgatcaaaacattgatttatacacacacacacacacatacatatgtagcttttatatttagtctggttacattagtgaccatggtatttactttcttcttaaggagcctttgaatttcttgtccagataaaaatccgaatatttctcttagactcatacataaagggacacagttatcgttaggtagcatatgttttactatcggtttgtcaaaaaagttaataaaaagtgcttattgatttatttctctagaaatttgctttgtcttttttagcattaaaaataattactatagcaaagcagtcaaagttaggtatattatatatatacttggtaactaaagatgggaaacctaaaatgctatttttctttcatagcacatttactagtataaaggaagtaagatcctaataaactgagcctttatttaacttctttgacctagttttaggtttacagaaaagttgtaaaaatacaacagttctttatgtcttatattaatcttaatgttaaaatcttacgttatcatagaacatttataaaacttaagaaattaacctttgtataatactattaactaaagtagaacattttattttt

SEQ ID NO: 419739 - DNA, 2735 bp, Homo sapiens
tgatttataaagaaaaagaggtttaatgaactcacagttccatatggctggggaggcctcacaatcatggcagaaggtagagcgagtaataaaggaatgttttacatggtggcaggcaagaaaaaaaccatcagaacttctgagacttattcactatcatgagaacagcatgggaaaaaggcatccccatgatccagttacctcccactaggtccgtcacacaccatgtggagattatgggagctagaattcaagatgagatttggttggtgacacagggaaaccatatcagtgaccgactaatattttttattattttgcggagacagggttccactttgttgcccaggcttcaagcagtcctcttgcctcagcctcccaaagtgttgggattatgggcataagcgaccatgccttgcctatgtacttttaaaatgcctcttttgtcagttttttcatcgaggatatagaatgaatagcctacgatttttatttttattgctgtgtttattaatatgtttaatacttatttattgagtggacttaaattatgtatacaacacttagccattatgaaatgttagaagatgttgttttttaaaccctactgaaattgccttgcaatacgatcatatctgaatttacagatccatatgccagtgtccacataaattatctccactggtagaagtgagtatggattcacttagaacttacttatatttcatgtttattatgtgctcagcattgagcttgggcatgggatgtaaaagtacattatggtcccttcctcagcattactcatcttgaaaaccttggattcctagtctttattcctttctcgttagtgcaactgattaatacttaaatatgctgacaatagcgtgattatttgagacttactattctaatataaggagcttttctgttaagacagaatgtagatacattgtaacaattatttataaaataccttttaaccttttaatgggaatcatttgatacacaaagcatttggcttctcagaaagcttttaaggttattaatttggagtacaaagaaatattttggtatattaataatggtaataaggtttcaaaattctccagcccagatgaaccaatgacaaatttggaattaaaaatatctgcctccctaaaacaagcacttgataaacttaaactgtcatcagggaatgaagaaaataagaaagaagaagacaatgatgaaattaagattgggacctcatgtaagaatggagggtgttcaaagacataccagggtctagagagtctagaagaagtctgtgtatatcattctggagtacctattttccatgaggggatgaaatactggagctgttgtagaagaaaaacttctgattttaatacattcttagcccaagagggctgtacaaaagggaaacacatgtggactaaaaaagatgctgggaaaaaagttgttccatgtagacatgactggcatcagactggaggtgaagttaccatttcagtatatgctaaaaactcacttccagaacttagccgagtagaagcaaatagcacattgttaaatgtgcatattgtatttgaaggagagaaggaatttgatcaaaatgtgaaattatggggtgtgattgatgtaaagcgaagttatgtaactatgactgcaacaaagattgaaatcactatgagaaaagctgaaccgatgcagtgggcaagccttgaactgcctgcagctaaaaagcaggaaaaacaaaaagatgacacaacagattgagtgggagatggaaggaaggctattacattatttccgaatttttaatactgtgtgaagtggtggcttgctgctgtaatcttttgttttgttgttgtgttactgaatgtggcatttcagggttaacattaggttcttaaaagccaaagtcagtttgtctttttgtgcctctcatctttcttttgtgttatgtaagattgattattcatttctccctactggtaggaaccatagttgtgtcctatacttgaagaggctggaaagtagcccataaccataattgcagtatttctttgtatttctctgttaagcaaagaaatattaaggaacattttttttatgtttttgtattattccataattagtaaagcaagatgaaatgtcaaattttaatcagttttttcatggatttgtgttcttacagtacttgaaaatatttaaggaagagatgaagctctgcagttttttctatgtgggatgattacttttttaaggaggattaattctgaggtagtatagtaactaaaggggaatatatgaattgtttaacaaattagaatttgtttacaactacttgaatttttaaattatgtcaaaacttacattacttgccaagcagtatgatgttataggaaacataaataagattacagaggtatcaatttggttaaaattcaccattttataagactaagcaataatcttaacaacctctttcctgaatatttaaatgtgtttgtatggtgttatgactaattgttactgatttagagactaagccctcttaaaacctttagttaaatataaaaagaaattatatatatcttgcctccctgatggaaaactatataaaattgtagacttaaaaggtttgtggaaatacattaggatatcagaaaactaaatatatggagttgctttatgactattacatgttaaataaaaatagcttaattgtt

SEQ ID NO: 419740 - DNA, 1279 bp, Homo sapiens
agcggcgtgaaacgcaacggatcgtttccggaagccggtagccgcctcagtcgtcagaccggtgctagcgacacgggagtggcaaacgcatcctcttgccgttcccggtgtttgggccttgcctgtgacggtgggaaaagaaaatggccttgctgtgctacaaccggggctgcggtcagcgcttcgatcctgagaccaattccgacgatgcttgcacataccacccaggtgttccggtctttcacgatgcattaaagggttggtcttgctgtaagagaagaacaactgatttttctgatttcttaagcattgtaggctgtacaaaaggtagacataatagtgagaagccacctgagccagtcaaacctgaagtcaagactactgagaagaaggagctatgtgaattaaaacccaaatttcaggaacacatcattcaagcccctaagccagtagaagcaataaaaagaccaagcccagatgaaccaatgacaaatttggaattaaaaatatctgcctccctaaaacaagcacttgataaacttaaactgtcatcagggaatgaagaaaataagaaagaagaagacaatgatgaaattaagattgggacctcatgtaagaatggagggtgttcaaagacataccagggtctagagagtctagaagaagtctgtgtatatcattctggagtacctattttccatgaggggtaacttatgcatgacttattaaaatagtttatggtagaatttagaaagttaaacctttctgtctttaaacattgtttgccatgcagtgttattaggcattttacttacattgccattaacatcttcacaatagcctacacaaacacaggggtttgtatgttgtgtgtttatacatgagaaaacagaaacaaggttacagttcttaagtggtcattgtgatataaactgcctgtttttcttcatattctgtatttaaaagtgatgctatttgggctaaatgttttgtttgaaggactgtcctacacattgcagggcatttagaattttgggccctggggcactaagacaacattatcccaagacgacccatacttttccgcatcctgcagttgagagcctctcttctgtattatgctctagtttatagaaatgcagcactgtgtaaaaatcttccactctgtttccacattcttcctgatatactgtacattcatttttagtaacttagacacttgtaaaatgctagagtttgtacacttactggcttattaaaaatcagatttatccctaaa

SEQ ID NO: 419741 - DNA, 724 bp, Homo sapiens
ggtcaccaatactgcaaatatgtatgagatgtaactgtaagatacgcagctaattttttttctctttgtttcctttttagacataccagggtctagagagtctagaagaagtctgtgtatatcattctggagtacctattttccatgaggggtaacttatgcatgacttattaaaatagtttatggtagaatttagaaagttaaacctttctgtctttaaacattgtttgccatgcagtgttattaggcattttacttacattgccattaacatcttcacaatagcctacacaaacacaggggtttgtatgttgtgtgtttatacatgagaaaacagaaacaaggttacagttcttaagtggtcattgtgatataaactgcctgtttttcttcatattctgtatttaaaagtgatgctatttgggctaaatgttttgtttgaaggactgtcctacacattgcagggcatttagaattttgggccctggggcactaagacaacattatcccaagacgacccatacttttccgcatcctgcagttgagagcctctcttctgtattatgctctagtttatagaaatgcagcactgtgtaaaaatcttccactctgtttccacattcttcctgatatactgtacattcatttttagtaacttagacacttgtaaaatgctagagtttgtacacttactggcttattaaaaatcagatttatccctaaa

SEQ ID NO: 419742 - DNA, 2041 bp, Homo sapiens
agcggcgtgaaacgcaacggatcgtttccggaagccggtagccgcctcagtcgtcagaccggtgctagcgacacgggagtggcaaacgcatcctcttgccgttcccggtgtttgggccttgcctgtgacggtgggaaaagaaaatggccttgctgtgctacaaccggggctgcggtcagcgcttcgatcctgagaccaattccgacgatgcttgcacataccacccaggtgttccggtctttcacgatgcattaaagggctgtacaaaaggtagacataatagtgagaagccacctgagccagtcaaacctgaagtcaagactactgagaagaaggagctatgtgaattaaaacccaaatttcaggaacacatcattcaagcccctaagccagtagaagcaataaaaagaccaagcccagatgaaccaatgacaaatttggaattaaaaatatctgcctccctaaaacaagcacttgataaacttaaactgtcatcagggaatgaagaaaataagaaagaagaagacaatgatgaaattaagattgggacctcatgtaagaatggagggtgttcaaagacataccagggtctagagagtctagaagaagtctgtgtatatcattctggagtacctattttccatgaggggatgaaatactggagctgttgtagaagaaaaacttctgattttaatacattcttagcccaagagggctgtacaaaagggaaacacatgtggactaaaaaagatgctgggaaaaaagttgttccatgtagacatgactggcatcagactggaggtgaagttaccatttcagtatatgctaaaaactcacttccagaacttagccgagtagaagcaaatagcacattgttaaatgtgcatattgtatttgaaggagagaaggaatttgatcaaaatgtgaaattatggggtgtgattgatgtaaagcgaagttatgtaactatgactgcaacaaagattgaaatcactatgagaaaagctgaaccgatgcagtgggcaagccttgaactgcctgcagctaaaaagcaggaaaaacaaaaagatgacacaacagattgagtgggagatggaaggaaggctattacattatttccgaatttttaatactgtgtgaagtggtggcttgctgctgtaatcttttgttttgttgttgtgttactgaatgtggcatttcagggttaacattaggttcttaaaagccaaagtcagtttgtctttttgtgcctctcatctttcttttgtgttatgtaagattgattattcatttctccctactggtaggaaccatagttgtgtcctatacttgaagaggctggaaagtagcccataaccataattgcagtatttctttgtatttctctgttaagcaaagaaatattaaggaacattttttttatgtttttgtattattccataattagtaaagcaagatgaaatgtcaaattttaatcagttttttcatggatttgtgttcttacagtacttgaaaatatttaaggaagagatgaagctctgcagttttttctatgtgggatgattacttttttaaggaggattaattctgaggtagtatagtaactaaaggggaatatatgaattgtttaacaaattagaatttgtttacaactacttgaatttttaaattatgtcaaaacttacattacttgccaagcagtatgatgttataggaaacataaataagattacagaggtatcaatttggttaaaattcaccattttataagactaagcaataatcttaacaacctctttcctgaatatttaaatgtgtttgtatggtgttatgactaattgttactgatttagagactaagccctcttaaaacctttagttaaatataaaaagaaattatatatatcttgcctccctgatggaaaactatataaaattgtagacttaaaaggtttgtggaaatacattaggatatcagaaaactaaatatatggagttgctttatgactattacatgttaaataaaaatagcttaattgtt

SEQ ID NO: 419743 - DNA, 648 bp, Homo sapiens
agcggcgtgaaacgcaacggatcgtttccggaagccggtagccgcctcagtcgtcagaccggtgctagcgacacgggagtggcaaacgcatcctcttgccgttcccggtgtttgggccttgcctgtgacggtgggaaaagaaaatggccttgctgtgctacaaccggggctgcggtcagcgcttcgatcctgagaccaattccgacgatgcttgcacataccacccaggtgttccggtctttcacgatgcattaaagggttggtcttgctgtaagagaagaacaactgatttttctgatttcttaagcattgtaggctgtacaaaaggtagacataatagtgagaagccacctgagccagtcaaacctgaagtcaagactactgagaagaaggagctatgtgaattaaaacccaaatttcaggaacacatcattcaagcccctaagccagtagaagcaataaaaagaccaaggtatactttatacagttacatatttttgtcacacttgaatagtagcacttgtgcatggtactttcctttatgatttagcatgataccatttgtagctactatgtaggccaccaagctttgaaccatttggtttctcccttaaatctgccttaaatttttatttctcttcaacttga

SEQ ID NO: 419744 - DNA, 2044 bp, Homo sapiens
agcggcgtgaaacgcaacggatcgtttccggaagccggtagccgcctcagtcgtcagaccggtgctagcgacacgggagtggcaaacgcatcctcttgccgttcccggtgtttgggccttgcctgtgacggtgggaaaagaaaatggccttgctgtgctacaaccggggctgcggtcagcgcttcgatcctgagaccaattccgacgatgcttgcacataccacccaggtgttccggtctttcacgatgcattaaagggttggtcttgctgtaagagaagaacaactgatttttctgatttcttaagcattgtaggctgtacaaaaggtagacataatagtgagaagccacctgagccagtcaaacctgaagtcaagactactgagaagaaggagctatgtgaattaaaacccaaatttcaggaacacatcattcaagcccctaagccagtagaagcaataaaaagaccaagcccagatgaaccaatgacaaatttggaattaaaaatatctgcctccctaaaacaagcacttgataaacttaaactgtcatcagggaatgaagaaaataagaaagaagaagacaatgatgaaattaagattgggacctcatgtaagaatggagggtgttcaaagacataccagggtctagagagtctagaagaagtctgtgtatatcattctggagtacctattttccatgaggggatgaaatactggagctgttgtagaagaaaaacttctgattttaatacattcttagcccaagagggctgtacaaaagggaaacacatgtggactaaaaaagatgctgggaaaaaagttgttccatgtagacatgactggcatcagactggaggtgaagttaccatttcagtatatgctaaaaactcacttccagaacttagccgagtagaagcaaatagcacattgttaaatgtgcatattgtatttgaaggagagaaggaatttgatcaaaatgtgaaattatggggtgtgattgatgtaaagcgaagttatgtaactatgactgcaacaaagattgaaatcactatgagaaaagctgaaccgatgcagtgggcaagccttgaactgcctgcagctaaaaagcaggaaaaacaaaaagatgacacaacagattgagtgggagatggaaggaaggctattacattatttccgaatttttaatactgtgtgaagtggtggcttgctgctgtaatcttttgttttgttgttgtgttactgaatgtggcatttcagggttaacattaggttcttaaaagccaaagtcagtttgtctttttgtgcctctcatctttcttttgtgttatgtaagattgattattcatttctccctactggtaggaaccatagttgtgtcctatacttgaagaggctggaaagtagcccataaccataattgcagtatttctttgtatttctctgttaagcaaagaaatattaaggaacattttttttatgtttttgtattattccataattagtaaagcaagatgaaatgtcaaattttaatcagttttttcatggatttgtgttcttacagtacttgattttttaaggaggattaattctgaggtagtatagtaactaaaggggaatatatgaattgtttaacaaattagaatttgtttacaactacttgaatttttaaattatgtcaaaacttacattacttgccaagcagtatgatgttataggaaacataaataagattacagaggtatcaatttggttaaaattcaccattttataagactaagcaataatcttaacaacctctttcctgaatatttaaatgtgtttgtatggtgttatgactaattgttactgatttagagactaagccctcttaaaacctttagttaaatataaaaagaaattatatatatcttgcctccctgatggaaaactatataaaattgtagacttaaaaggtttgtggaaatacattaggatatcagaaaactaaatatatggagttgctttatgactattacatgttaaataaaaatagcttaattgtt

SEQ ID NO: 419745 - DNA, 2045 bp, Homo sapiens
gctatcggaagataccttgtcattgctggaaacgatcgccccttcacgacaagtgtacgaagaatctctgcgtccgtgtgcgcctgctgtggagtgggaaaagaaatggctgtgtgctacggggctgggcacgcttcatcctgaacaatccgagatgcttgcacataccacccaggtgttccggtctttcacgatgcattaaagggttggtcttgctgtaagagaagaacaactgatttttctgatttcttaagcattgtaggctgtacaaaaggtagacataatagtgagaagccacctgagccagtcaaacctgaagtcaagactactgagaagaaggagctatgtgaattaaaacccaaatttcaggaacacatcattcaagcccctaagccagtagaagcaataaaaagaccaagcccagatgaaccaatgacaaatttggaattaaaaatatctgcctccctaaaacaagcacttgataaacttaaactgtcatcagggaatgaagaaaataagaaagaagaagacaatgatgaaattaagattgggacctcatgtaagaatggagggtgttcaaagacataccagggtctagagagtctagaagaagtctgtgtatatcattctggagtacctattttccatgaggggatgaaatactggagctgttgtagaagaaaaacttctgattttaatacattcttagcccaagagggctgtacaaaagggaaacacatgtggactaaaaaagatgctgggaaaaaagttgttccatgtagacatgactggcatcagactggaggtgaagttaccatttcagtatatgctaaaaactcacttccagaacttagccgagtagaagcaaatagcacattgttaaatgtgcatattgtatttgaaggagagaaggaatttgatcaaaatgtgaaattatggggtgtgattgatgtaaagcgaagttatgtaactatgactgcaacaaagattgaaatcactatgagaaaagctgaaccgatgcagtgggcaagccttgaactgcctgcagctaaaaagcaggaaaaacaaaaagatgacacaacagattgagtgggagatggaaggaaggctattacattatttccgaatttttaatactgtgtgaagtggtggcttgctgctgtaatcttttgttttgttgttgtgttactgaatgtggcatttcagggttaacattaggttcttaaaagccaaagtcagtttgtctttttgtgcctctcatctttcttttgtgttatgtaagattgattattcatttctccctactggtaggaaccatagttgtgtcctatacttgaagaggctggaaagtagcccataaccataattgcagtatttctttgtatttctctgttaagcaaagaaatattaaggaacattttttttatgtttttgtattattccataattagtaaagcaagatgaaatgtcaaattttaatcagttttttcatggatttgtgttcttacagtacttgaaaatatttaaggaagagatgaagctctgcagttttttctatgtgggatgattacttttttaaggaggattaattctgaggtagtatagtaactaaaggggaatatatgaattgtttaacaaattagaatttgtttacaactacttgaatttttaaattatgtcaaaacttacattacttgccaagcagtatgatgttataggaaacataaataagattacagaggtatcaatttggttaaaattcaccattttataagactaagcaataatcttaacaacctctttcctgaatatttaaatgtgtttgtatggtgttatgactaattgttactgatttagagactaagccctcttaaaacctttagttaaatataaaaagaaattatatatatcttgcctccctgatggaaaactatataaaattgtagacttaaaaggtttgtggaaatacattaggatatcagaaaactaaatatatggagttgctttatgactattacatgttaaataaaaatagcttaattgtt

SEQ ID NO: 419746 - DNA, 2199 bp, Homo sapiens
aatcagagcccgtgctctccctagtgccggccaatgggaggtgcgctcgggctgcttccggctccgcgctccgctcgccccctcccaaggtctccccgcgactggcgggacgcaggggcgggcgtcggccgcggtgacgcgcagcgggcctggagccaataaggggcgggctcggtgctgatggacggtgctggtggccagtggagaggcgctggccgcacttcccgtcggggagagagtgtaatatggcgaagacctacgattacctgttcaagctgctgctgatcggggactcgggggtggggaagacctgtgtcctgttccgcttctccgaggacgccttcaactccacttttatctccaccataggaattgactttaaaattaggaccatagagctcgatggcaagagaattaaactgcagatatgggacacagccggtcaggaacggtttcggacgatcacaacggcctactacaggggtgcaatgggcatcatgctggtctacgacatcaccaacgagaagtccttcgacaacatccggaactggattcgcaacattgaggagcacgcctctgcagacgtcgaaaagatgatactcgggaacaagtgtgatgtgaatgacaagagacaagtttccaaggaacggggagaaaagctggccctcgactatggaatcaagttcatggagaccagcgcgaaggccaacatcaatgtggaaaatgcatttttcactctcgccagagatatcaaagcaaaaatggacaaaaaattggaaggcaacagcccccaggggagcaaccagggagtcaaaatcacaccggaccagcagaagaggagcagctttttccgatgtgttcttctgtgaggaacaccgccttactctgagcctcgctcagcccagctgactgtgcctgttctgagtgagcccctcactcagccggggccctcccacctccaacgccccgcccacgccgcggccaccgggcccacggccaccagaatgcaattgagaaatcgtttattttagtaactgtctgatctttttcaactttggagatggaataagttaaaaatttgctatttttcctgtaacatctgctgaacgggcccacccacacgttgtatattcagagagagagagggagtcaaggtgtgaccgtcgaccacagccagtgtcaggcctctgcctctgggcctttgctttgtggcctcactgcaacacaaagctccaccaggaggctggttcacgtcccctaccacggaagcgaggtcccagaaggccagcggtggttccaggagcaacagctcccaaaccctgagcaaggcaaccgatcgccaggaccaggaagcatcacccaggagatttggcgcccacttccacctcttctctcagttttggacaagtgacaaaccattttgccccctcactcttcttttttaactgttaaaccaaaggaaagcacaaatgaaggaaatcctgtgtaaagcattgagaaggaaagaagcctggagcagcctctcctgtccacagccaggggttaggtctgcaggcccgtctgcggtccccatcgagcatcaaggggacgctgtgtgtgctgcaagtgaccccgaaaacaaccacagccgtcacatggtcctcctgaagttggggcaccctcctctcagcaccaaaatggcccccactccttcgtgtcctcccgctatctccaaatcggacgttctttctagctgagatttttatttttccacatctgtagtgccatgaagcgattctgtctttgacttccaatggcaaacctgggtgatcgggaacaagcacgttgtacccttggctggacatggccaagacacaaggcattccacggcggcaagctgaccgcacagcagtctggcttgattttcagccgtcatcattgggttctgttttgacagctctgctgtcccatagggactgcgactgggaccaggtcaaccacgccaggggggtgtcaccagccttttctttttttctttctttttttttttttcctccttaagctgctgtcaatccaaaccattggcatcatcgtttcttttgaattaaaaccaacatatcagcaatagtctgctctccccgggaatctctaacatgctctgtttacatcgataaatgcacttaaggaaaacaaacaaattaaagctcatcttaaagtcca

SEQ ID NO: 419747 - DNA, 2798 bp, Homo sapiens
aatcagagcccgtgctctccctagtgccggccaatgggaggtgcgctcgggctgcttccggctccgcgctccgctcgccccctcccaaggtctccccgcgactggcgggacgcaggggcgggcgtcggccgcggtgacgcgcagcgggcctggagccaataaggggcgggctcggtgctgatggacggtgctggtggccagtggagaggcgctggccgcacttcccgtcggggagagagtgtaatatggcgaagacctacgattacctgttcaagctgctgctgatcggggactcgggggtggggaagacctgtgtcctgttccgcttctccgaggacgccttcaactccacttttatctccaccataggaattgactttaaaattaggaccatagagctcgatggcaagagaattaaactgcagatatgggacacagccggtcaggaacggtttcggacgatcacaacggcctactacaggggtgcaatgggcatcatgctggtctacgacatcaccaacgagaagtccttcgacaacatccggaactggattcgcaacattgaggagcacgcctctgcagacgtcgaaaagatgatactcgggaacaagtgtgatgtgaatgacaagagacaagtttccaaggaacggggagaaaagctggccctcgactatggaatcaagttcatggagaccagcgcgaaggccaacatcaatgtggaaaatgcatttttcactctcgccagagatatcaaagcaaaaatggacaaaaaattggaaggcaacagcccccaggggagcaaccagggagtcaaaatcacaccggaccagcagaagaggagcagctttttccgatgtgttcttctgtgaggaacaccgccttactctgagcctcgctcagcccagctgactgtgcctgttctgagtgagcccctcactcagccggggccctcccacctccaacgccccgcccacgccgcggccaccgggcccacggccaccagaatgcaattgagaaatcgtttattttagtaactgtctgatctttttcaactttggagatggaataagttaaaaatttgctatttttcctgtaacatctgctgaacgggcccacccacacgttgtatattcagagagagagagggagtcaaggtgtgaccgtcgaccacagccagtgtcaggcctctgcctctgggcctttgctttgtggcctcactgcaacacaaagctccaccaggaggctggttcacgtcccctaccacggaagcgaggtcccagaaggccagcggtggttccaggagcaacagctcccaaaccctgagcaaggcaaccgatcgccaggaccaggaagcatcacccaggagatttggcgcccacttccacctcttctctcagttttggacaagtgacaaaccattttgccccctcactcttcttttttaactgttaaaccaaaggaaagcacaaatgaaggaaatcctgtgtaaagcattgagaaggaaagaagcctggagcagcctctcctgtccacagccaggggttaggtctgcaggcccgtctgcggtccccatcgagcatcaaggggacgctgtgtgtgctgcaagtgaccccgaaaacaaccacagccgtcacatggtcctcctgaagttggggcaccctcctctcagcaccaaaatggcccccactccttcgtgtcctcccgctatctccaaatcggacgttctttctagctgagatttttatttttccacatctgtagtgccatgaagcgattctgtctttgacttccaatggcaaacctgggtgatcgggaacaagcacgttgtacccttggctggacatggccaagacacaaggcattccacggcggcaagctgaccgcacagcagtctggcttgattttcagccgtcatcattgggttctgttttgacagctctgctgtcccatagggactgcgactgggaccaggtcaaccacgccaggggggtgtcaccagccttttctttttttctttctttttttttttttcctccttaagctgctgtcaatccaaaccattggcatcatcgtttcttttgaattaaaaccaacatatcagcaatagtctgctctccccgggaatctctaacatgctctgtttacatcgataaatgcacttaaggaaaacaaacaaattaaagctcatcttaaagtccaaggatttttatgtccacattttccctgtaggccacacggacatggccaggtgctgggggtgggtctggacaagatggtagagcccatggattaccccatcgagcggccacctcagaggagatgccacccatcatcaaaagactaaattgggaaaagaagcctcctggcttggtgcagtggctcacacctgtaatcccagcactctgggaggccaaggcgggctgatcacttgagctcaggtgttcgagaccagcctggccaacatggtgagcctgcgtcacctggcttctggcacacagctcggccactgtgtccctcctgcctccctggcaggtccttctaggggccctctcctggctggctttccagggcattccttccactctatccagggtccttcccaagaccacacccaggtccagtcattccctaggacttggcagagagctgtactcacagccaagatcacagcaaaatcagcaaagggaaaaggcatgcagagtgaagtccagaggcaaccagacagaagcatccagaatcctctcacagtggggtcacacaccccatgcttaactcccccaacaatgagttgtaacaac

SEQ ID NO: 419748 - DNA, 1004 bp, Homo sapiens
  misc_feature (859)..(859): n is a, c, g, or t
  misc_feature (871)..(871): n is a, c, g, or t
ttagctaggtacgagcctgggttataatcggccgagggcgaagacctacgattacctgttcaagctgctgctgatcggggactcgggggtggggaagacctgtgtcctgttccgcttctccgaggacgccttcaactccacttttatctccaccataggaattgactttaaaattaggaccatagagctcgatggcaagagaattaaactgcagatatgggacacagccggtcaggaacggtttcggacgatcacaacggcctactacaggggtgcaatgggcatcatgctggtctacgacatcaccaacgagaagtccttcgacaacatccggaactggattcgcaacattgaggagcacgcctctgcagacgtcgaaaagatgatactcgggaacaagtgtgatgtgaatgacaagagacaagtttccaaggaacggggagaaaagctggccctcgactatggaatcaagttcatggagaccagcgcgaaggccaacatcaatgtggaaaatgcatttttcactctcgccagagatatcaaagcaaaaatggacaaaaaattggaaggcaacagcccccaggggagcaaccagggagtcaaaatcacaccggaccagcagaagaggagcagctttttccgatgtgttcttctgtgaggaacaccgccttactctgagcctcgctcagcccagctgactgtgcctgttctgagtgagcccctcactcagccggggccctcccacctccaacgccccgcccacgccgcggccaccgggcccacggccaccagaatgcaattgagaaatcgtttattttagtaactgtctgatctttttcaactttggagatggattgcnttttcccgtccnttggggacggcccccccgtgtttcagggggccgggccggttggcggcgccccgttggctccctgcctgttgggctccagcccggggcgccccgcaggccagccgggggggccccggaggggaacagggggcct

SEQ ID NO: 419749 - DNA, 569 bp, Homo sapiens
tcatgcactacagattggaaaaataaaaattctcgagctaagaacgtccgatttggagatagcgggaggacacgaaggagtgggggccattttggtgctgagaggagggtgccccaacttcaggaggaccatgtgacggctgtggttgttttcggggtcacttgtcagcacacactgcgtccccttgatgctctatggggaccgcatactggcctgcgaacctctgaggttccctagcgcgattctgtcttcgtcttcctatgtcttacctgtgtgatattgttctccagtacccttggctggacatggccaagacacaaggcattccacggcggcaagctgaccgcacagcagtctggcttgattttcagccgtcatcattgggttctgttttgacagctctgctgtcccatagggactgcgactgggaccaggtcaaccacgccaggggggtgtcaccagccttttctttttttctttctttttttttttttcctccttaagctgctgtcaatccaaaccattggcatcatcgtttcttttgaattaaaaccaacatatcagcaata

SEQ ID NO: 419750 - DNA, 2106 bp, Homo sapiens
aatcagagcccgtgctctccctagtgccggccaatgggaggtgcgctcgggctgcttccggctccgcgctccgctcgccccctcccaaggtctccccgcgactggcgggacgcaggggcgggcgtcggccgcggtgacgcgcagcgggcctggagccaataaggggcgggctcggtgctgatggacggtgctggtggccagtggagaggcgctggccgcacttcccgtcggggagagagtgtaatatggcgaagacctacgattacctgttcaagctgctgctgatcggggactcgggggtggggaagacctgtgtcctgttccgcttctccgaggacgccttcaactccacttttatctccaccataggaattgactttaaaattaggaccatagagctcgatggcaagagaattaaactgcagatatgggacacagccggtcaggaacggtttcggacgatcacaacggcctactacaggggtgcaatgggcatcatgctggtctacgacatcaccaacgagaagtccttcgacaacatccggaactggattcgcaacattgaggagcacgcctctgcagacgtcgaaaagatgatactcgggaacaagtgtgatgtgaatgacaagagacaagtttccaaggaacggggagaaaagctggccctcgactatggaatcaagttcatggagaccagcgcgaaggccaacatcaatgtggaaaatgcatttttcactctcgccagagatatcaaagcaaaaatggacaaaaaattggaaggcaacagcccccaggggagcaaccagggagtcaaaatcacaccggaccagcagaagaggagcagctttttccgatgtgttcttctgtgaggaacaccgccttactctgagcctcgctcagcccagctgactgtgcctgttctgagtgagcccctcactcagccggggccctcccacctccaacgccccgcccacgccgcggccaccgggcccacggccaccagaatgcaattgagaaatcgtttattttagtaactgtctgatctttttcaactttggagatggaataagttaaaaatttgctatttttcctgtaacatctgctgaacgggcccacccacacgttgtatattcagagagagagagggagtcaaggtgtgaccgtcgaccacagccagtgtcaggcctctgcctctgggcctttgctttgtggcctcactgcaacacaaagctccaccaggaggctggttcacgtcccctaccacggaagcgaggtcccagaaggccagcggtggttccaggagcaacagctcccaaaccctgagcaaggcaaccgatcgccaggaccaggaagcatcacccaggagatttggcgcccacttccacctcttctctcagttttggacaagtgacaaaccattttgccccctcactcttcttttttaactgttaaaccaaaggaaagcacaaatgaaggaaatcctgtgtaaagcattgagaaggaaagaagcctggagcagcctctcctgtccacagccaggggttaggtctgcaggcccgtctgcggtccccatcgagcatcaaggggacgctgtgtgtgctgcaagtgaccccgaaaacaaccacagccgtcacatggtcctcctgaagttggggcaccctcctctcagcaccaaaatggcccccactccttcgtgtcctcccgctatctccaaatcggacgttctttctagctgagatttttatttttccacatctgtagtgccatgaagcgattctgtctttgacttccaatggcaaacctgggtgatcgggaacaagcacgttgtacccttggctggacatggccaagacacaaggcattccacggcggcaagctgaccgcacagcagtctggcttgattttcagccgtcatcattgggttctgttttgacagctctgctgtcccatagggactgcgactgggaccaggtcaaccacgccaggggggtgtcaccagccttttctttttttctttctttttttttttttcctccttaagctgctgtcaatccaaaccattggcatcatcgtttcttttgaattaaaaccaacatatcagcaata

SEQ ID NO: 419751 - DNA, 1885 bp, Homo sapiens
gctggtacggtccggaagcgttgggaggcgaagacctacgattacctgttcaagctgctgctgatcggggactcgggggtggggaagacctgtgtcctgttccgcttctccgaggacgccttcaactccacttttatctccaccataggaattgactttaaaattaggaccatagagctcgatggcaagagaattaaactgcagatatgggacacagccggtcaggaacggtttcggacgatcacaacggcctactacaggggtgcaatgggcatcatgctggtctacgacatcaccaacgagaagtccttcgacaacatccggaactggattcgcaacattgaggagcacgcctctgcagacgtcgaaaagatgatactcgggaacaagtgtgatgtgaatgacaagagacaagtttccaaggaacggggagaaaagctggccctcgactatggaatcaagttcatggagaccagcgcgaaggccaacatcaatgtggaaaatgcatttttcactctcgccagagatatcaaagcaaaaatggacaaaaaattggaaggcaacagcccccaggggagcaaccagggagtcaaaatcacaccggaccagcagaagaggagcagctttttccgatgtgttcttctgtgaggaacaccgccttactctgagcctcgctcagcccagctgactgtgcctgttctgagtgagcccctcactcagccggggccctcccacctccaacgccccgcccacgccgcggccaccgggcccacggccaccagaatgcaattgagaaatcgtttattttagtaactgtctgatctttttcaactttggagatggaataagttaaaaatttgctatttttcctgtaacatctgctgaacgggcccacccacacgttgtatattcagagagagagagggagtcaaggtgtgaccgtcgaccacagccagtgtcaggcctctgcctctgggcctttgctttgtggcctcactgcaacacaaagctccaccaggaggctggttcacgtcccctaccacggaagcgaggtcccagaaggccagcggtggttccaggagcaacagctcccaaaccctgagcaaggcaaccgatcgccaggaccaggaagcatcacccaggagatttggcgcccacttccacctcttctctcagttttggacaagtgacaaaccattttgccccctcactcttcttttttaactgttaaaccaaaggaaagcacaaatgaaggaaatcctgtgtaaagcattgagaaggaaagaagcctggagcagcctctcctgtccacagccaggggttaggtctgcaggcccgtctgcggtccccatcgagcatcaaggggacgctgtgtgtgctgcaagtgaccccgaaaacaaccacagccgtcacatggtcctcctgaagttggggcaccctcctctcagcaccaaaatggcccccactccttcgtgtcctcccgctatctccaaatcggacgttctttctagctgagatttttatttttccacatctgtagtgccatgaagcgattctgtctttgacttccaatggcaaacctgggtgatcgggaacaagcacgttgtacccttggctggacatggccaagacacaaggcattccacggcggcaagctgaccgcacagcagtctggcttgattttcagccgtcatcattgggttctgttttgacagctctgctgtcccatagggactgcgactgggaccaggtcaaccacgccaggggggtgtcaccagccttttctttttttctttctttttttttttttcctccttaagctgctgtcaatccaaaccattggcatcatcgtttcttttgaattaaaaccaacatatcagcaata

SEQ ID NO: 419752 - DNA, 1763 bp, Homo sapiens
  misc_feature (1694)..(1694): n is a, c, g, or t
  misc_feature (1706)..(1706): n is a, c, g, or t
  misc_feature (1708)..(1708): n is a, c, g, or t
  misc_feature (1721)..(1721): n is a, c, g, or t
  misc_feature (1737)..(1737): n is a, c, g, or t
  misc_feature (1754)..(1754): n is a, c, g, or t
aatcagagcccgtgctctccctagtgccggccaatgggaggtgcgctcgggctgcttccggctccgcgctccgctcgccccctcccaaggtctccccgcgactggcgggacgcaggggcgggcgtcggccgcggtgacgcgcagcgggcctggagccaataaggggcgggctcggtgctgatggacggtgctggtggccagtggagaggcgctggccgcacttcccgtcggggagagagtgtaatatggcgaagacctacgattacctgttcaagctgctgctgatcggggactcgggggtggggaagacctgtgtcctgttccgcttctccgaggacgccttcaactccacttttatctccaccataggaattgactttaaaattaggaccatagagctcgatggcaagagaattaaactgcagatatgggacacagccggtcaggaacggtttcggacgatcacaacggcctactacaggggtgcaatgggcatcatgctggtctacgacatcaccaacgagaagtccttcgacaacatccggaactggattcgcaacattgaggagcacgcctctgcagacgtcgaaaagatgatactcgggaacaagtgtgatgtgaatgacaagagacaagtttccaaggaacggggagaaaagctggccctcgactatggaatcaagttcatggagaccagcgcgaaggccaacatcaatgtggaaaatgcatttttcactctcgccagagatatcaaagcaaaaatggacaaaaaattggaaggcaacagcccccaggggagcaaccagggagtcaaaatcacaccggaccagcagaagaggagcagctttttccgatgtgttcttctgtgaggaacaccgccttactctgagcctcgctcagcccagctgactgtgcctgttctgagtgagcccctcactcagccggggccctcccacctccaacgccccgcccacgccgcggccaccgggcccacggccaccagaatgcaattgagaaatcgtttattttagtaactgtctgatctttttcaactttggagatggaataagttaaaaatttgctatttttcctgtaacatctgctgaacgggcccacccacacgttgtatattcagagagagagagggagtcaaggtgtgaccgtcgaccacagccagtgtcaggcctctgcctctgggcctttgctttgtggcctcactgcaacacaaagctccaccaggaggctggttcacgtcccctaccacggaagcgaggtcccagaaggccagcggtggttccaggagcaacagctcccaaaccctgagcaaggcaaccgatcgccaggaccaggaagcatcacccaggagatttggcgcccacttccacctcttctctcagttttggacaagtgacaaaccattttgccccctcactcttcttttttaactgttaaaccaaaggaaagcacaaatgaaggaaatcctgtgtaaagcattgagaaggaaagaagcctggagcagcctctcctgtccacagccaggggttaggtctgcaggcccgtctgcggtccccatcgagcatcaaggggacgctgtgtgtgctgcaagtgaccccgaaaacaaccacagccgtcacatggtccgtcaggcctcccagacccaatcacgcgggggttttttttgtgttgaaaaggancaacaaaaaaancnaaccccctccccntcccaacaaaaatacncccccaaaaaaacctangtagtaagg

SEQ ID NO: 419753 - DNA, 1525 bp, Homo sapiens
aatcagagcccgtgctctccctagtgccggccaatgggaggtgcgctcgggctgcttccggctccgcgctccgctcgccccctcccaaggtctccccgcgactggcgggacgcaggggcgggcgtcggccgcggtgacgcgcagcgggcctggagccaataaggggcgggctcggtgctgatggacggtgctggtggccagtggagaggcgctggccgcacttcccgtcggggagagagtgtaatatggcgaagacctacgattacctgttcaagctgctgctgatcggggactcgggggtggggaagacctgtgtcctgttccgcttctccgaggacgccttcaactccacttttatctccaccataggaattgactttaaaattaggaccatagagctcgatggcaagagaattaaactgcagatatgggacacagccggtcaggaacggtttcggacgatcacaacggcctactacaggggtgcaatgggcatcatgctggtctacgacatcaccaacgagaagtccttcgacaacatccggaactggattcgcaacattgaggagcacgcctctgcagacgtcgaaaagatgatactcgggaacaagtgtgatgtgaatgacaagagacaagtttccaaggaacggggagaaaagctggccctcgactatggaatcaagttcatggagaccagcgcgaaggccaacatcaatgtggaaaatgcatttttcactctcgccagagatatcaaagcaaaaatggacaaaaaattggaaggcaacagcccccaggggagcaaccagggagtcaaaatcacaccggaccagcagaagaggagcagctttttccgatgtgttcttctgtgaggaacaccgccttactctgagcctcgctcagcccagctgactgtgcctgttctgagtgagcccctcactcagccggggccctcccacctccaacgccccgcccacgccgcggccaccgggcccacggccaccagaatgcaattgagaaatcgtttattttagtaactgtctgatctttttcaactttggagatggaataagttaaaaatttgctatttttcctgtaacatctgctgaacgggcccacccacacgttgtatattcagagagagagagggagtcaaggtgtgaccgtcgaccacagccagtgtcaggcctctgcctctgggcctttgctttgtggcctcactgcaacacaaagctccaccaggaggctggttcacgtcccctaccacggaagcgaggtcccagaaggccagcggtggttccaggagcaacagctcccaaaccctgagcaaggcaaccgatcgccaggaccaggaagcatcacccaggagatttggcgcccacttccacctcttctctcagttttggacaagtgacaaaccattttgccccctcactcttctttttttttttttcctccttaagctgctgtcaatccaaaccattggcatcatcgtttcttttgaattaaaaccaacatatcagcaata

SEQ ID NO: 419754 - DNA, 1228 bp, Homo sapiens
aatcagagcccgtgctctccctagtgccggccaatgggaggtgcgctcgggctgcttccggctccgcgctccgctcgccccctcccaaggtctccccgcgactggcgggacgcaggggcgggcgtcggccgcggtgacgcgcagcgggcctggagccaataaggggcgggctcggtgctgatggacggtgctggtggccagtggagaggcgctggccgcacttcccgtcggggagagagtgtaatatggcgaagacctacgattacctgttcaagctgctgctgatcggggactcgggggtggggaagacctgtgtcctgttccgcttctccgaggacgccttcaactccacttttatctccaccataggaattgactttaaaattaggaccatagagctcgatggcaagagaattaaactgcagatatgggacacagccggtcaggaacggtttcggacgatcacaacggcctactacaggggtgcaatgggcatcatgctggtctacgacatcaccaacgagaagtccttcgacaacatccggaactggattcgcaacattgaggagcacgcctctgcagacgtcgaaaagatgatactcgggaacaagtgtgatgtgaatgacaagagacaagtttccaaggaacggggagaaaagctggccctcgactatggaatcaagttcatggagaccagcgcgaaggccaacatcaatgtggaaaatgcatttttcactctcgccagagatatcaaagcaaaaatggacaaaaaattggaaggcaacagcccccaggggagcaaccagggagtcaaaatcacaccggaccagcagaagaggagcagctttttccgatgtgttcttctgtgaggaacaccgccttactctgagcctcgctcagcccagctgactgtgcctgttctgagtgagcccctcactcagccggggccctcccacctccaacgccccgcccacgccgcggccaccgggcccacggccaccagaatgcaattgagaaatcgtttattttagtaactgtctgatctttttcaactttggagatggaataagttaaaaatttgctatttttcctgtaacatctgctgaacggcaccgtgtttttccgaagcgacggggggtcccgggtgccgtcgaccagccggtcggccttgctctgggctttgttgggcttctggaccaagtccccggggggtggtccgtcccacccg

SEQ ID NO: 419755 - DNA, 1215 bp, Homo sapiens
  misc_feature (1070)..(1070): n is a, c, g, or t
  misc_feature (1082)..(1082): n is a, c, g, or t
aatcagagcccgtgctctccctagtgccggccaatgggaggtgcgctcgggctgcttccggctccgcgctccgctcgccccctcccaaggtctccccgcgactggcgggacgcaggggcgggcgtcggccgcggtgacgcgcagcgggcctggagccaataaggggcgggctcggtgctgatggacggtgctggtggccagtggagaggcgctggccgcacttcccgtcggggagagagtgtaatatggcgaagacctacgattacctgttcaagctgctgctgatcggggactcgggggtggggaagacctgtgtcctgttccgcttctccgaggacgccttcaactccacttttatctccaccataggaattgactttaaaattaggaccatagagctcgatggcaagagaattaaactgcagatatgggacacagccggtcaggaacggtttcggacgatcacaacggcctactacaggggtgcaatgggcatcatgctggtctacgacatcaccaacgagaagtccttcgacaacatccggaactggattcgcaacattgaggagcacgcctctgcagacgtcgaaaagatgatactcgggaacaagtgtgatgtgaatgacaagagacaagtttccaaggaacggggagaaaagctggccctcgactatggaatcaagttcatggagaccagcgcgaaggccaacatcaatgtggaaaatgcatttttcactctcgccagagatatcaaagcaaaaatggacaaaaaattggaaggcaacagcccccaggggagcaaccagggagtcaaaatcacaccggaccagcagaagaggagcagctttttccgatgtgttcttctgtgaggaacaccgccttactctgagcctcgctcagcccagctgactgtgcctgttctgagtgagcccctcactcagccggggccctcccacctccaacgccccgcccacgccgcggccaccgggcccacggccaccagaatgcaattgagaaatcgtttattttagtaactgtctgatctttttcaactttggagatggattgcnttttcccgtccnttggggacggcccccccgtgtttcagggggccgggccggttggcggcgccccgttggctccctgcctgttgggctccagcccggggcgccccgcaggccagccgggggggccccggaggggaacagggggcct

SEQ ID NO: 419756 - DNA, 1773 bp, Homo sapiens
  misc_feature (17)..(17): n is a, c, g, or t
gtcaggtaggtacaggncgcgtggctaatcggccgaggattgactttaaaattaggaccatagagctcgatggcaagagaattaaactgcagatatgggacacagccggtcaggaacggtttcggacgatcacaacggcctactacaggggtgcaatgggcatcatgctggtctacgacatcaccaacgagaagtccttcgacaacatccggaactggattcgcaacattgaggagcacgcctctgcagacgtcgaaaagatgatactcgggaacaagtgtgatgtgaatgacaagagacaagtttccaaggaacggggagaaaagctggccctcgactatggaatcaagttcatggagaccagcgcgaaggccaacatcaatgtggaaaatgcatttttcactctcgccagagatatcaaagcaaaaatggacaaaaaattggaaggcaacagcccccaggggagcaaccagggagtcaaaatcacaccggaccagcagaagaggagcagctttttccgatgtgttcttctgtgaggaacaccgccttactctgagcctcgctcagcccagctgactgtgcctgttctgagtgagcccctcactcagccggggccctcccacctccaacgccccgcccacgccgcggccaccgggcccacggccaccagaatgcaattgagaaatcgtttattttagtaactgtctgatctttttcaactttggagatggaataagttaaaaatttgctatttttcctgtaacatctgctgaacgggcccacccacacgttgtatattcagagagagagagggagtcaaggtgtgaccgtcgaccacagccagtgtcaggcctctgcctctgggcctttgctttgtggcctcactgcaacacaaagctccaccaggaggctggttcacgtcccctaccacggaagcgaggtcccagaaggccagcggtggttccaggagcaacagctcccaaaccctgagcaaggcaaccgatcgccaggaccaggaagcatcacccaggagatttggcgcccacttccacctcttctctcagttttggacaagtgacaaaccattttgccccctcactcttcttttttaactgttaaaccaaaggaaagcacaaatgaaggaaatcctgtgtaaagcattgagaaggaaagaagcctggagcagcctctcctgtccacagccaggggttaggtctgcaggcccgtctgcggtccccatcgagcatcaaggggacgctgtgtgtgctgcaagtgaccccgaaaacaaccacagccgtcacatggtcctcctgaagttggggcaccctcctctcagcaccaaaatggcccccactccttcgtgtcctcccgctatctccaaatcggacgttctttctagctgagatttttatttttccacatctgtagtgccatgaagcgattctgtctttgacttccaatggcaaacctgggtgatcgggaacaagcacgttgtacccttggctggacatggccaagacacaaggcattccacggcggcaagctgaccgcacagcagtctggcttgattttcagccgtcatcattgggttctgttttgacagctctgctgtcccatagggactgcgactgggaccaggtcaaccacgccaggggggtgtcaccagccttttctttttttctttctttttttttttttcctccttaagctgctgtcaatccaaaccattggcatcatcgtttcttttgaattaaaaccaacatatcagcaata

SEQ ID NO: 419757 - DNA, 1692 bp, Homo sapiens
ctggttttctatgctcgccagaaatctcttttctaggagttagccagtgaacccacgcgtccgcaggggtgcaactgggcatcatgctggtctacgacatcaccaacgagaagtccttcgacaacatccggaactggattcgcaacattgaggagcacgcctctgcagacgtcgaaaagatgatactcgggaacaagtgtgatgtgaatgacaagagacaagtttccaaggaacggggagaaaagctggccctcgactatggaatcaagttcatggagaccagcgcgaaggccaacatcaatgtggaaaatgcatttttcactctcgccagagatatcaaagcaaaaatggacaaaaaattggaaggcaacagcccccaggggagcaaccagggagtcaaaatcacaccggaccagcagaagaggagcagctttttccgatgtgttcttctgtgaggaacaccgccttactctgagcctcgctcagcccagctgactgtgcctgttctgagtgagcccctcactcagccggggccctcccacctccaacgccccgcccacgccgcggccaccgggcccacggccaccagaatgcaattgagaaatcgtttattttagtaactgtctgatctttttcaactttggagatggaataagttaaaaatttgctatttttcctgtaacatctgctgaacgggcccacccacacgttgtatattcagagagagagagggagtcaaggtgtgaccgtcgaccacagccagtgtcaggcctctgcctctgggcctttgctttgtggcctcactgcaacacaaagctccaccaggaggctggttcacgtcccctaccacggaagcgaggtcccagaaggccagcggtggttccaggagcaacagctcccaaaccctgagcaaggcaaccgatcgccaggaccaggaagcatcacccaggagatttggcgcccacttccacctcttctctcagttttggacaagtgacaaaccattttgccccctcactcttcttttttaactgttaaaccaaaggaaagcacaaatgaaggaaatcctgtgtaaagcattgagaaggaaagaagcctggagcagcctctcctgtccacagccaggggttaggtctgcaggcccgtctgcggtccccatcgagcatcaaggggacgctgtgtgtgctgcaagtgaccccgaaaacaaccacagccgtcacatggtcctcctgaagttggggcaccctcctctcagcaccaaaatggcccccactccttcgtgtcctcccgctatctccaaatcggacgttctttctagctgagatttttatttttccacatctgtagtgccatgaagcgattctgtctttgacttccaatggcaaacctgggtgatcgggaacaagcacgttgtacccttggctggacatggccaagacacaaggcattccacggcggcaagctgaccgcacagcagtctggcttgattttcagccgtcatcattgggttctgttttgacagctctgctgtcccatagggactgcgactgggaccaggtcaaccacgccaggggggtgtcaccagccttttctttttttctttctttttttttttttcctccttaagctgctgtcaatccaaaccattggcatcatcgtttcttttgaattaaaaccaacatatcagcaata

SEQ ID NO: 419758 - DNA, 1672 bp, Homo sapiens
ggtcgatctgaagaggatccccgagcggcttcaacggcctactacaggagtgcaatgggcatcatgctggtctacgacatcaccaacgagaagtccttcgacaacatccggaactggattcgcaacattgaggagcacgcctctgcagacgtcgaaaagatgatactcgggaacaagtgtgatgtgaatgacaagagacaagtttccaaggaacggggagaaaagctggccctcgactatggaatcaagttcatggagaccagcgcgaaggccaacatcaatgtggaaaatgcatttttcactctcgccagagatatcaaagcaaaaatggacaaaaaattggaaggcaacagcccccaggggagcaaccagggagtcaaaatcacaccggaccagcagaagaggagcagctttttccgatgtgttcttctgtgaggaacaccgccttactctgagcctcgctcagcccagctgactgtgcctgttctgagtgagcccctcactcagccggggccctcccacctccaacgccccgcccacgccgcggccaccgggcccacggccaccagaatgcaattgagaaatcgtttattttagtaactgtctgatctttttcaactttggagatggaataagttaaaaatttgctatttttcctgtaacatctgctgaacgggcccacccacacgttgtatattcagagagagagagggagtcaaggtgtgaccgtcgaccacagccagtgtcaggcctctgcctctgggcctttgctttgtggcctcactgcaacacaaagctccaccaggaggctggttcacgtcccctaccacggaagcgaggtcccagaaggccagcggtggttccaggagcaacagctcccaaaccctgagcaaggcaaccgatcgccaggaccaggaagcatcacccaggagatttggcgcccacttccacctcttctctcagttttggacaagtgacaaaccattttgccccctcactcttcttttttaactgttaaaccaaaggaaagcacaaatgaaggaaatcctgtgtaaagcattgagaaggaaagaagcctggagcagcctctcctgtccacagccaggggttaggtctgcaggcccgtctgcggtccccatcgagcatcaaggggacgctgtgtgtgctgcaagtgaccccgaaaacaaccacagccgtcacatggtcctcctgaagttggggcaccctcctctcagcaccaaaatggcccccactccttcgtgtcctcccgctatctccaaatcggacgttctttctagctgagatttttatttttccacatctgtagtgccatgaagcgattctgtctttgacttccaatggcaaacctgggtgatcgggaacaagcacgttgtacccttggctggacatggccaagacacaaggcattccacggcggcaagctgaccgcacagcagtctggcttgattttcagccgtcatcattgggttctgttttgacagctctgctgtcccatagggactgcgactgggaccaggtcaaccacgccaggggggtgtcaccagccttttctttttttctttctttttttttttttcctccttaagctgctgtcaatccaaaccattggcatcatcgtttcttttgaattaaaaccaacatatcagcaata

SEQ ID NO: 419759 - DNA, 1354 bp, Homo sapiens
aatcgagctggataccccccgactgaaggcaacagcccccaggggagcaaccagggagtcaaaatcacaccggaccagcagaagaggagcagctttttccgatgtgttcttctgtgaggaacaccgccttactctgagcctcgctcagcccagctgactgtgcctgttctgagtgagcccctcactcagccggggccctcccacctccaacgccccgcccacgccgcggccaccgggcccacggccaccagaatgcaattgagaaatcgtttattttagtaactgtctgatctttttcaactttggagatggaataagttaaaaatttgctatttttcctgtaacatctgctgaacgggcccacccacacgttgtatattcagagagagagagggagtcaaggtgtgaccgtcgaccacagccagtgtcaggcctctgcctctgggcctttgctttgtggcctcactgcaacacaaagctccaccaggaggctggttcacgtcccctaccacggaagcgaggtcccagaaggccagcggtggttccaggagcaacagctcccaaaccctgagcaaggcaaccgatcgccaggaccaggaagcatcacccaggagatttggcgcccacttccacctcttctctcagttttggacaagtgacaaaccattttgccccctcactcttcttttttaactgttaaaccaaaggaaagcacaaatgaaggaaatcctgtgtaaagcattgagaaggaaagaagcctggagcagcctctcctgtccacagccaggggttaggtctgcaggcccgtctgcggtccccatcgagcatcaaggggacgctgtgtgtgctgcaagtgaccccgaaaacaaccacagccgtcacatggtcctcctgaagttggggcaccctcctctcagcaccaaaatggcccccactccttcgtgtcctcccgctatctccaaatcggacgttctttctagctgagatttttatttttccacatctgtagtgccatgaagcgattctgtctttgacttccaatggcaaacctgggtgatcgggaacaagcacgttgtacccttggctggacatggccaagacacaaggcattccacggcggcaagctgaccgcacagcagtctggcttgattttcagccgtcatcattgggttctgttttgacagctctgctgtcccatagggactgcgactgggaccaggtcaaccacgccaggggggtgtcaccagccttttctttttttctttctttttttttttttcctccttaagctgctgtcaatccaaaccattggcatcatcgtttcttttgaattaaaaccaacatatcagcaata

SEQ ID NO: 419760 - DNA, 1317 bp, Homo sapiens
cagtaggctagtagaggcccggtgttaatcggcaccgagggcagaagaggagcagctttttccgatgtgttcttctgtgaggaacaccgccttactctgagcctcgctcagcccagctgactgtgcctgttctgagtgagcccctcactcagccggggccctcccacctccaacgccccgcccacgccgcggccaccgggcccacggccaccagaatgcaattgagaaatcgtttattttagtaactgtctgatctttttcaactttggagatggaataagttaaaaatttgctatttttcctgtaacatctgctgaacgggcccacccacacgttgtatattcagagagagagagggagtcaaggtgtgaccgtcgaccacagccagtgtcaggcctctgcctctgggcctttgctttgtggcctcactgcaacacaaagctccaccaggaggctggttcacgtcccctaccacggaagcgaggtcccagaaggccagcggtggttccaggagcaacagctcccaaaccctgagcaaggcaaccgatcgccaggaccaggaagcatcacccaggagatttggcgcccacttccacctcttctctcagttttggacaagtgacaaaccattttgccccctcactcttcttttttaactgttaaaccaaaggaaagcacaaatgaaggaaatcctgtgtaaagcattgagaaggaaagaagcctggagcagcctctcctgtccacagccaggggttaggtctgcaggcccgtctgcggtccccatcgagcatcaaggggacgctgtgtgtgctgcaagtgaccccgaaaacaaccacagccgtcacatggtcctcctgaagttggggcaccctcctctcagcaccaaaatggcccccactccttcgtgtcctcccgctatctccaaatcggacgttctttctagctgagatttttatttttccacatctgtagtgccatgaagcgattctgtctttgacttccaatggcaaacctgggtgatcgggaacaagcacgttgtacccttggctggacatggccaagacacaaggcattccacggcggcaagctgaccgcacagcagtctggcttgattttcagccgtcatcattgggttctgttttgacagctctgctgtcccatagggactgcgactgggaccaggtcaaccacgccaggggggtgtcaccagccttttctttttttctttctttttttttttttcctccttaagctgctgtcaatccaaaccattggcatcatcgtttcttttgaattaaaaccaacatatcagcaata

SEQ ID NO: 419761 - DNA, 1247 bp, Homo sapiens
  misc_feature (6)..(6): n is a, c, g, or t
tgatanaatcagctcgtaccagcagcatgatttaccgtcagcccagctgactgtgcctgttctgagtgagcccctcactcagccggggccctcccacctccaacgccccgcccacgccgcggccaccgggcccacggccaccagaatgcaattgagaaatcgtttattttagtaactgtctgatctttttcaactttggagatggaataagttaaaaatttgctatttttcctgtaacatctgctgaacgggcccacccacacgttgtatattcagagagagagagggagtcaaggtgtgaccgtcgaccacagccagtgtcaggcctctgcctctgggcctttgctttgtggcctcactgcaacacaaagctccaccaggaggctggttcacgtcccctaccacggaagcgaggtcccagaaggccagcggtggttccaggagcaacagctcccaaaccctgagcaaggcaaccgatcgccaggaccaggaagcatcacccaggagatttggcgcccacttccacctcttctctcagttttggacaagtgacaaaccattttgccccctcactcttcttttttaactgttaaaccaaaggaaagcacaaatgaaggaaatcctgtgtaaagcattgagaaggaaagaagcctggagcagcctctcctgtccacagccaggggttaggtctgcaggcccgtctgcggtccccatcgagcatcaaggggacgctgtgtgtgctgcaagtgaccccgaaaacaaccacagccgtcacatggtcctcctgaagttggggcaccctcctctcagcaccaaaatggcccccactccttcgtgtcctcccgctatctccaaatcggacgttctttctagctgagatttttatttttccacatctgtagtgccatgaagcgattctgtctttgacttccaatggcaaacctgggtgatcgggaacaagcacgttgtacccttggctggacatggccaagacacaaggcattccacggcggcaagctgaccgcacagcagtctggcttgattttcagccgtcatcattgggttctgttttgacagctctgctgtcccatagggactgcgactgggaccaggtcaaccacgccaggggggtgtcaccagccttttctttttttctttctttttttttttttcctccttaagctgctgtcaatccaaaccattggcatcatcgtttcttttgaattaaaaccaacatatcagcaata

SEQ ID NO: 419762 - DNA, 1018 bp, Homo sapiens
  misc_feature (19)..(19): n is a, c, g, or t
actcgagctcggtaccggnatagcccacccacacgttgtatattcagagagagagagggagtcaaggtgtgaccgtcgaccacagccagtgtcaggcctctgcctctgggcctttgctttgtggcctcactgcaacacaaagctccaccaggaggctggttcacgtcccctaccacggaagcgaggtcccagaaggccagcggtggttccaggagcaacagctcccaaaccctgagcaaggcaaccgatcgccaggaccaggaagcatcacccaggagatttggcgcccacttccacctcttctctcagttttggacaagtgacaaaccattttgccccctcactcttcttttttaactgttaaaccaaaggaaagcacaaatgaaggaaatcctgtgtaaagcattgagaaggaaagaagcctggagcagcctctcctgtccacagccaggggttaggtctgcaggcccgtctgcggtccccatcgagcatcaaggggacgctgtgtgtgctgcaagtgaccccgaaaacaaccacagccgtcacatggtcctcctgaagttggggcaccctcctctcagcaccaaaatggcccccactccttcgtgtcctcccgctatctccaaatcggacgttctttctagctgagatttttatttttccacatctgtagtgccatgaagcgattctgtctttgacttccaatggcaaacctgggtgatcgggaacaagcacgttgtacccttggctggacatggccaagacacaaggcattccacggcggcaagctgaccgcacagcagtctggcttgattttcagccgtcatcattgggttctgttttgacagctctgctgtcccatagggactgcgactgggaccaggtcaaccacgccaggggggtgtcaccagccttttctttttttctttctttttttttttttcctccttaagctgctgtcaatccaaaccattggcatcatcgtttcttttgaattaaaaccaacatatcagcaata

SEQ ID NO: 419763 - DNA, 1062 bp, Homo sapiens
tctggaccccattcttggtttcctatgctgtttctctcccctttttgcagtttttttcccctaaacgcccacccacacgttgtatattcagagagagagagggagtcaaggtgtgaccgtcgaccacagccagtgtcaggcctctgcctctgggcctttgctttgtggcctcactgcaacacaaagctccaccaggaggctggttcacgtcccctaccacggaagcgaggtcccagaaggccagcggtggttccaggagcaacagctcccaaaccctgagcaaggcaaccgatcgccaggaccaggaagcatcacccaggagatttggcgcccacttccacctcttctctcagttttggacaagtgacaaaccattttgccccctcactcttcttttttaactgttaaaccaaaggaaagcacaaatgaaggaaatcctgtgtaaagcattgagaaggaaagaagcctggagcagcctctcctgtccacagccaggggttaggtctgcaggcccgtctgcggtccccatcgagcatcaaggggacgctgtgtgtgctgcaagtgaccccgaaaacaaccacagccgtcacatggtcctcctgaagttggggcaccctcctctcagcaccaaaatggcccccactccttcgtgtcctcccgctatctccaaatcggacgttctttctagctgagatttttatttttccacatctgtagtgccatgaagcgattctgtctttgacttccaatggcaaacctgggtgatcgggaacaagcacgttgtacccttggctggacatggccaagacacaaggcattccacggcggcaagctgaccgcacagcagtctggcttgattttcagccgtcatcattgggttctgttttgacagctctgctgtcccatagggactgcgactgggaccaggtcaaccacgccaggggggtgtcaccagccttttctttttttctttctttttttttttttcctccttaagctgctgtcaatccaaaccattggcatcatcgtttcttttgaattaaaaccaacatatcagcaata

SEQ ID NO: 419764 - DNA, 895 bp, Homo sapiens
taggctaggtacgaggcctgggtggtgggaggctggttcacgtcccctaccacggaagcgaggtcccagaaggccagcggtggttccaggagcaacagctcccaaaccctgagcaaggcaaccgatcgccaggaccaggaagcatcacccaggagatttggcgcccacttccacctcttctctcagttttggacaagtgacaaaccattttgccccctcactcttcttttttaactgttaaaccaaaggaaagcacaaatgaaggaaatcctgtgtaaagcattgagaaggaaagaagcctggagcagcctctcctgtccacagccaggggttaggtctgcaggcccgtctgcggtccccatcgagcatcaaggggacgctgtgtgtgctgcaagtgaccccgaaaacaaccacagccgtcacatggtcctcctgaagttggggcaccctcctctcagcaccaaaatggcccccactccttcgtgtcctcccgctatctccaaatcggacgttctttctagctgagatttttatttttccacatctgtagtgccatgaagcgattctgtctttgacttccaatggcaaacctgggtgatcgggaacaagcacgttgtacccttggctggacatggccaagacacaaggcattccacggcggcaagctgaccgcacagcagtctggcttgattttcagccgtcatcattgggttctgttttgacagctctgctgtcccatagggactgcgactgggaccaggtcaaccacgccaggggggtgtcaccagccttttctttttttctttctttttttttttttcctccttaagctgctgtcaatccaaaccattggcatcatcgtttcttttgaattaaaaccaacatatcagcaata

SEQ ID NO: 419765 - DNA, 1021 bp, Homo sapiens
aatcagagcccgtgctctccctagtgccggccaatgggaggtgcgctcgggctgcttccggctccgcgctccgctcgccccctcccaaggtctccccgcgactggcgggacgcaggggcgggcgtcggccgcggtgacgcgcagcgggcctggagccaataaggggcgggctcggtgctgatggacggtgctggtggccagtggagaggcgctggccgcacttcccgtcggggagagagtgtaatatggcgaagacctacgattacctgttcaagctgctgctgatcggggactcgggggtggggaagacctgtgtcctgttccgcttctccgaggacgccttcaactccacttttatctccaccataggaattgactttaaaattaggaccatagagctcgatggcaagagaattaaactgcagatatgggacacagccggtcaggaacggtttcggacgatcacaacggcctactacaggggtgcaatgggcatcatgctggtctacgacatcaccaacgagaagtccttcgacaacatccggaactggattcgcaacattgaggagcacgcctctgcagacgtcgaaaagatgatactcgggaacaagtgtgatgtgaatgacaagagacaagtttccaaggaacggggagaaaagctggccctcgactatggaatcaagttcatggagaccagcgcgaaggccaacatcaatgtggaaaatgcatttttcactctcgccagagatatcaaagcaaaaatggacaaaaaattggaaggcaacagcccccaggggagcaaccagggagtcaaaatcacaccggaccagcagaagaggagcagctttttccgatgtgttcttctgtgaggaacaccgccttactctgagcctcgctcagcccagctgactgtgcctgttctgagtgagcccctcactcagccggggccctccgggccattcaacgcctccgctggccattcaacgcctccgggccattcaacgcctccggccattcaacg

SEQ ID NO: 419766 - DNA, 858 bp, Homo sapiens
ggctcggtacccgggcagtacggatgtgcgggccagtaagcggtggttccaggagcaacagctcccaaaccctgagcaaggcaaccgatcgccaggaccaggaagcatcacccaggagatttggcgcccacttccacctcttctctcagttttggacaagtgacaaaccattttgccccctcactcttcttttttaactgttaaaccaaaggaaagcacaaatgaaggaaatcctgtgtaaagcattgagaaggaaagaagcctggagcagcctctcctgtccacagccaggggttaggtctgcaggcccgtctgcggtccccatcgagcatcaaggggacgctgtgtgtgctgcaagtgaccccgaaaacaaccacagccgtcacatggtcctcctgaagttggggcaccctcctctcagcaccaaaatggcccccactccttcgtgtcctcccgctatctccaaatcggacgttctttctagctgagatttttatttttccacatctgtagtgccatgaagcgattctgtctttgacttccaatggcaaacctgggtgatcgggaacaagcacgttgtacccttggctggacatggccaagacacaaggcattccacggcggcaagctgaccgcacagcagtctggcttgattttcagccgtcatcattgggttctgttttgacagctctgctgtcccatagggactgcgactgggaccaggtcaaccacgccaggggggtgtcaccagccttttctttttttctttctttttttttttttcctccttaagctgctgtcaatccaaaccattggcatcatcgtttcttttgaattaaaaccaacatatcagcaata

SEQ ID NO: 419767 - DNA, 950 bp, Homo sapiens
  misc_feature (903)..(903): n is a, c, g, or t
  misc_feature (919)..(919): n is a, c, g, or t
  misc_feature (929)..(929): n is a, c, g, or t
aatcagagcccgtgctctccctagtgccggccaatgggaggtgcgctcgggctgcttccggctccgcgctccgctcgccccctcccaaggtctccccgcgactggcgggacgcaggggcgggcgtcggccgcggtgacgcgcagcgggcctggagccaataaggggcgggctcggtgctgatggacggtgctggtggccagtggagaggcgctggccgcacttcccgtcggggagagagtgtaatatggcgaagacctacgattacctgttcaagctgctgctgatcggggactcgggggtggggaagacctgtgtcctgttccgcttctccgaggacgccttcaactccacttttatctccaccataggaattgactttaaaattaggaccatagagctcgatggcaagagaattaaactgcagatatgggacacagccggtcaggaacggtttcggacgatcacaacggcctactacaggggtgcaatgggcatcatgctggtctacgacatcaccaacgagaagtccttcgacaacatccggaactggattcgcaacattgaggagcacgcctctgcagacgtcgaaaagatgatactcgggaacaagtgtgatgtgaatgacaagagacaagtttccaaggaacggggagaaaagctggccctcgactatggaatcaagttcatggagaccagcgcgaaggccaacatcaatgtggaaaatgcatttttcactctcgccagagatatcaaagcaaaaatggacaaaaaattggtccacagccaggggttaggtctgcaggcccgtctgcggtccccatcgagcatcaaggggacgctgtgtgtgctgcaagtgaccccgaaaacaaccacagccgtcacatggtcaacgccccgcccangccgcgggcaacgggnccacgggcancaaaatgcaatttagaaatcg

SEQ ID NO: 419768 - DNA, 921 bp, Homo sapiens
  misc_feature (735)..(735): n is a, c, g, or t
aatcagagcccgtgctctccctagtgccggccaatgggaggtgcgctcgggctgcttccggctccgcgctccgctcgccccctcccaaggtctccccgcgactggcgggacgcaggggcgggcgtcggccgcggtgacgcgcagcgggcctggagccaataaggggcgggctcggtgctgatggacggtgctggtggccagtggagaggcgctggccgcacttcccgtcggggagagagtgtaatatggcgaagacctacgattacctgttcaagctgctgctgatcggggactcgggggtggggaagacctgtgtcctgttccgcttctccgaggacgccttcaactccacttttatctccaccataggaattgactttaaaattaggaccatagagctcgatggcaagagaattaaactgcagatatgggacacagccggtcaggaacggtttcggacgatcacaacggcctactacaggggtgcaatgggcatcatgctggtctacgacatcaccaacgagaagtccttcgacaacatccggaactggattcgcaacattgaggagcacgcctctgcagacgtcgaaaagatgatactcgggaacaagtgtgatgtgaatgacaagagacaagtttccaaggaacggggagaaaagctggccctcgactatggaatcaagttcatggagaccagcgcgaaggccaacatcaatgtggaaaatgcatttttcnctctcgccagagatatcaaagctgaatttagccaaaaaagccgaagaaatggagcaacctgaaaagaaagtaatgccaaacagtccccagaatggtgtgctggttaaggaaactgctatagaaaccaaagttaccgtcttcgaagaagagattcttgcagcaaccagaggaatgaatggagactct

SEQ ID NO: 419769 - DNA, 892 bp, Homo sapiens
  misc_feature (735)..(735): n is a, c, g, or t
aatcagagcccgtgctctccctagtgccggccaatgggaggtgcgctcgggctgcttccggctccgcgctccgctcgccccctcccaaggtctccccgcgactggcgggacgcaggggcgggcgtcggccgcggtgacgcgcagcgggcctggagccaataaggggcgggctcggtgctgatggacggtgctggtggccagtggagaggcgctggccgcacttcccgtcggggagagagtgtaatatggcgaagacctacgattacctgttcaagctgctgctgatcggggactcgggggtggggaagacctgtgtcctgttccgcttctccgaggacgccttcaactccacttttatctccaccataggaattgactttaaaattaggaccatagagctcgatggcaagagaattaaactgcagatatgggacacagccggtcaggaacggtttcggacgatcacaacggcctactacaggggtgcaatgggcatcatgctggtctacgacatcaccaacgagaagtccttcgacaacatccggaactggattcgcaacattgaggagcacgcctctgcagacgtcgaaaagatgatactcgggaacaagtgtgatgtgaatgacaagagacaagtttccaaggaacggggagaaaagctggccctcgactatggaatcaagttcatggagaccagcgcgaaggccaacatcaatgtggaaaatgcatttttcnctctcgccagagatatcaaagcaggaaactcagactccgaggaagatgatgctaatgggcgggtggaactgatccttgaaccaaaggatctatacattgatcgtcctttaccatatctcattgggtcaaagctgttcatggaacaagaagatgtagg

SEQ ID NO: 419770 - DNA, 691 bp, Homo sapiens
gcatgcatcggcttggaaagggatggatgagtggatggttcttggttggaagggatggatggttggttgattggtttgttggttggaagcaggtggatagacggatggaagggaatgggtgagtggatggatggatggttgaaagggtatagatggatggttggttggttggttggttggttggttggttggttggttggttggatggttggaaggggacagctggacggactggcagatgatggatggatggtttgatggctgattggttggttggatggctggaatggtaatggatggatgacctggcagatgatggatggatggttggatggctcgttggttagttggttggtttggctggtttgattggtttggttgtttggttggttggttggttggttggttggatggttggatggatggttaggtggatggttaggtggatggctggttgattgtgagacgtagtgctgattctcagtgataacctcagaaaacctcttgtgatttcaggaaggcaacagcccccaggggagcaaccagggagtcaaaatcacaccggaccagcagaagaggagcagctttttccgatgtgttcttctgtgaggaacaccgccttactctgagcctcgctcagcccagctgactgtgcctgttctgagtgagcccctcactcagccggggccct

SEQ ID NO: 419771 - DNA, 1721 bp, Homo sapiens
cactgtcctccattgtaagataaaaagagctacctaagagatctgtggctcagttccttttgttcagtatatatacctcagggtaaaggacctaaggctctggcacttcctacataatttgttcataaaaataattttctgtacctgtaggtgcagggattcatagtgatttttctgttttaaaaaatatctttctacactgtctgatttttaaaaatgagattatcagtataaaagaaatacagctattttgtaaaagaaaaatacaggagaaaaaggataaagctactttgttttaaaacgcagtatcattaaaacaaaaacaaaccaaatttgttctaagtttgactttagagtcaggaaacttaagcttacatttttggtctgccatctattacttttaaagcttgggcaaattattcatttgaagtctaagtttattaatctgttaatgggaacagattagaaatcttcagagaagctctagcctttgtaacattgtgactataatgctgagaactgcttcactcatcccattcatattttaaaaatactaatattttgtgtttgagcattttaataggctcagaaacttaaaaatgatgtttcttttctaacaacatactcttttcaatgggatattatggttgttattatttaacatgacatttagggactcaacatacattaaggtgatggcactaagataaatgtagaaataaccagtaccatgtaattttcataagtgcttaaattgttggtaaacaattttatgagttggaggtgttgaagcaaatattattaatatttgaacataaaagctgatcaaaggggcctggtccacagaagatgtttatttgatgtaacaaaacaatacagttagtgttagatccaaccacaaagagcaaaaggaatgaaaaatttgtacaatgtacatagaaaaaacaagatatttactgtgacaactatatattcctaaaataatgcttctaaaattactcaattattgaaatctacatgaaaaaaaggatgttaatagcgacaaagtgcataaaatcaaacattgtattttgagcaaattaacatactaggcaattttgctaagaatgcatgattttttttttcttgtttacagtctgctcaaaatatctttataccaacagggtaggcagaacatttaggtttaatatcagttacacaatattagcataaacttccacaactacatagggtattgttttcttttgagctggcaaagtgactatagaaacatcagatgatttctctgaattgagaattttatccaaataaatgccacataccttctagatatatgcatatctttctatattatgtaaatggctttacccatttaaataataaaccatacagcatttaagaatcattattatatgattaacaatgtcatgttccaggtttaacaatttcataggccaaaaaaaatttcttcttaaaaactagttttataaacgcagaatatattccatgagtaactgctggtattttttaagaaaatatattgtgcaattgtggctaccacgtactgctggcaaagcattattatttatgtaaaatgtgaaaaaaaaggtgtaaaaatttttcaactgcctatgatcatgatgaaaggttactgccttcttacaaaaattatattggcatcttcttaaaaataattcgaaaaagggataaactccctagcc

SEQ ID NO: 419772 - DNA, 2182 bp, Homo sapiens
gcgcctaggtacgggctgagtatcaatcggccgaggccgagaggcccggttcctttaggccgcctgcccgcctccagctctcggggtcggctccaggaggcgccctcaggagaggggcgggcgctctattccagagaccgagtggcagggcggccactgtggcggggctctttccccgtttcgcctcagctacccctcagctccggtagtcgccagtccggggtcgtcgccgtttggggcgggagctgctcggccccgccgccgtccccgtcgccgcttccgggtccaggcccctcgggccgcctgccgccgtcatgaggctgcgggtgcggcttctgaagcggacctggccgctggaggtgcccgagacggagccgacgctggggcatttgcgctcgcacctgaggcagtccctgctgtgcacctgggggtacagttctaatacccgatttacaattacattgaactacaaggatcccctcactggagatgaagagaccttggcttcatatgggattgtttctggggacttgatatgtttgattcttcaagatgacattccagcgcctaatataccttcatccacagattcagagcattcttcactccagaataatgagcaaccctctttggccaccagctccaatcagactagcatgcaggatgaacaaccaagtgattcattccaaggacaggcagcccagtctggtgtttggaatgacgacagtatgttagggcctagtcaaaattttgaagctgagtcaattcaagataatgcgcatatggcagagggcacaggtttctatccctcagaacccatgctctgtagtgaatcggtggaagggcaagtgccacattcattagagaccttgtatcaatcagctgactgttctgatgccaatgatgccttgatagtgttgatacatcttctcatgttggagtcaggttacatacctcagggcaccgaagccaaagcactgtccatgccggagaagtggaagttgagcggggtgtataagctgcagtacatgcatcctctctgcgagggcagctccgctactctcacctgtgtgcctttgggaaacctgattgttgtaaatgctacactaaaaatcaacaatgagattagaagtgtgaaaagattgcagctgctaccagaatcttttatttgcaaagagaaactaggggaaaatgtagccaacatatacaaagatcttcagaaactctctcgcctctttaaagaccagctggtgtatcctcttctggcttttacccgacaagcactgaacctaccagatgtatttgggttggtcgtcctcccattggaactgaaactacggatcttccgacttctggatgttcgttccgtcttgtctttgtctgcggtttgtcgtgacctctttactgcttcaaatgacccactcctgtggaggtttttatatctgcgtgattttcgagacaatactgtcagagttcaagacacagattggaaagaactgtacaggaagaggcacatacaaagaaaagaatccccgaaagggcggtttgtgatgctcctgccatcgtcaactcacaccattccattctatcccaaccccttgcaccctaggccatttcctagctcccgccttcctccaggaattatcgggggtgaatatgaccaaagaccaacacttccctatgttggagacccaatcagttcactcattcctggtcctggggagacgcccagccagtttcctccactgagaccacgctttgatccagttggcccacttccaggacctaaccccatcttgccagggcgaggcggccccaatgacagatttccctttagacccagcaggggtcggccaactgatggccggctgtcattcatgtgattgatttgtaatttcatttctggagctccatttgtttttgtttctaaactacagatgtcaactccttggggtgctgatctcgagtgttattttctgattgtggtgttgagagttgcactcccagaaaccttttaagagatacatttatagccctaggggtggtatgacccaaaggttcctctgtgacaaggttggccttgggaatagttggctgccaatctccctgctcttggttctcctctagattgaagtttgttttctgatgctgttcttaccagattaaaaaaaagtgtaaatta

SEQ ID NO: 419773 - DNA, 708 bp, Homo sapiens
attttaaacgacttcactaaaggggatttggccctcaagggccaaaattcggcccgagccgaaagggcggtttgtgatgctcctgccatcgtcaactcacaccattccattctatcccaaccccttgcaccctaggccatttcctagctcccgccttcctccaggaattatcgggggtgaatatgaccaaagaccaacacttccctatgttggagacccaatcagttcactcattcctggtcctggggagacgcccagccagtttcctccactgagaccacgctttgatccagttggcccacttccaggacctaaccccatcttgccagggcgaggcggccccaatgacagatttccctttagacccagcaggggtcggccaactgatggccggctgtcattcatgtgattgatttgtaatttcatttctggagctccatttgtttttgtttctaaactacagatgtcaactccttggggtgctgatctcgagtgttattttctgattgtggtgttgagagttgcactcccagaaaccttttaagagatacatttatagccctaggggtggtatgacccaaaggttcctctgtgacaaggttggccttgggaatagttggctgccaatctccctgctcttggttctcctctagattgaagtttgttttctgatgctgttcttaccagattaaaaaaaagtgtaaatta

SEQ ID NO: 419774 - DNA, 1002 bp, Homo sapiens
cgggcgataggccaagtgcggggacgccgggggggccttcacgggaggcccgggctcttccgggcgtcgcggagccggagggtgcaggcgacgggaagcgcgggtggtcggctggggtccggctcctggagaacatggcccggcctcccgggggctctggtcccctcctcgttctaatacccgatttacaattacattgaactacaaggatcccctcactggagatgaagagaccttggcttcatatgggattgtttctggggacttgatatgtttgattcttcaagatgacattccagcgcctaatataccttcatccacagattcagagcattcttcactccagaataatgagcaaccctctttggccaccagctccaatcagactagcatgcaggatgaacaaccaagtgattcattccaaggacaggcagcccagtctggtgtttggaatgacgacagtatgttagggcctagtcaaaattttgaagctgagtcaattcaagataatgcgcatatggcagagggcacaggtttctatccctcagaacccatgctctgtagtgaatcggtggaagggcaagtgccacattcattagagaccttgtatcaatcagctgactgttctgatgccaatgatgccttgatagtgttgatacatcttctcatgttggagtcaggttacatacctcagggcaccgaagccaaagcactgtccatgccggagaagtggaagttgagcggggtgtataagctgcagtacatgcatcctctctgcgagggcagctccgctactctcacctgtgtgcctttgggaaacctgattgttgtaaatggttgtctacatggggatcactaaaaatttgatgagggaaattggaaacgttttaaaatgacttggcagttggtaaccagaagatcttatagttgggcccaagaacttcggggaaaagagtttccaggatttataaagcttgaggaagttcacgagtataaaaaaca

SEQ ID NO: 419775 - DNA, 1033 bp, Homo sapiens
cgggcgataggccaagtgcggggacgccgggggggccttcacgggaggcccgggctcttccgggcgtcgcggagccggagggtgcaggcgacgggaagcgcgggtggtcggctggggtccggctcctggagaacatggcccggcctcccgggggctctggtcccctcctcgattcagagcattcttcactccagaataatgagcaaccctctttggccaccagctccaatcagactagcatgcaggatgaacaaccaagtgattcattccaaggacaggcagcccagtctggtgtttggaatgacgacagtatgttagggcctagtcaaaattttgaagctgagtcaattcaagataatgcgcatatggcagagggcacaggtttctatccctcagaacccatgctctgtagtgaatcggtggaagggcaagtgccacattcattagagaccttgtatcaatcagctgactgttctgatgccaatgatgccttgatagtgttgatacatcttctcatgttggagtcaggttacatacctcagggcaccgaagccaaagcactgtccatgccggagaagtggaagttgagcggggtgtataagctgcagtacatgcatcctctctgcgagggcagctccgctactctcacctgtgtgcctttgggaaacctgattgttgtaaatgctacactaaaaatcaacaatgagattagaagtgtgaaaagattgcagctgctaccagaatcttttatttgcaaagagaaactaggggaaaatgtagccaacatatacaaagatcttcagaaactctctcgcctctttaaagaccagctggtgtatcctcttctggcttttacccgacaagcactgaactagcagatgtattcgggcggcgcccatgggaggaaagagctccgacagagagtgacgctgtttgggcggaggcagccttgcaagcacccgagggatacgtggaaagagtgcagggttcgctatcaatttttttgttttccggtgacatagttatacagaac

SEQ ID NO: 419776 - DNA, 318 bp, Homo sapiens
  misc_feature (35)..(35): n is a, c, g, or t
gagagagagagagagagagagagagagagagaganagagagagagagagagagagagagagagagagagagagatgtcaactccttggggtgctgatctcgagtgttattttctgattgtggtgttgagagttgcactcccagaaaccttttaagagatacatttatagccctaggggtggtatgacccaaaggttcctctgtgacaaggttggccttgggaatagttggctgccaatctccctgctcttggttctcctctagattgaagtttgttttctgatgctgttcttaccagattaaaaaaaagtgtaaatta

SEQ ID NO: 419777 - DNA, 768 bp, Homo sapiens
tgtaaaaataagtctttaattaattcattgttttgttttcctttttcagttagggcctagtcaaaattttgaagctgagtcaattcaagataatgcgcatatggcagagggcacaggtttctatccctcagaacccatgctctgtagtgaatcggtggaagggcaagtgccacattcattagagaccttgtatcaatcagctgactgttctgatgccaatgatgccttgatagtgttgatacatcttctcatgttggagtcaggttacatacctcaggtaagtactgcaagcaaaacacagacatcttatgattgctcatacatgtggatggttcctgctctcaagttgcccgtagtctgagagtggcagagagagacaaaaatataaagcactgtgctatattggtgaagttctgggagaaacatactcatatataggatgccaggaattcatggaggagaacatttagaatattgcttctcaaactttaatgcgctttggaatacctggggaccttattaaaatgcagattctgatttagtaactgtagaatggaccgtgaacttcttcatactcctgcataataccaatgttgctggtctgtgagccatgttataagttacaaagatacagagtagttcggtgatcagtgcacacctgcagcatgccatgcactgacctagaaattaggatataaaaatattgggatatttcttgtcttcaaggagtccatacatagagggagacgatgaataaaaagatactca

SEQ ID NO: 419778 - DNA, 307 bp, Homo sapiens
tgtaaaaataagtctttaattaattcattgttttgttttcctttttcagttagggcctagtcaaaattttgaagctgagtcaattcaagataatgcgcatatggcagagggcacaggtttctatccctcagaacccatgctctgtagtgaatcggtggaagggcaagtgccacattcattagagaccttgtatcaatcagctgactgttctgatgccaatgatgccttgatagtgttgatacatcttctcatgttggagtcaggttacatacctcaggtaagtacaaaagtccggggagatttcgtg

SEQ ID NO: 419779 - DNA, 307 bp, Homo sapiens
cttatgcttaacgggtaagtttcacttttcttaggagaaaaacaaaacccactgtttaatgcaggacgaatgaaatgtttttaaatccttatttttcccttttcctttgtagacaatactgtcagagttcaagacacagattggaaagaagtaggtatttttaaatattaagactaatgtccataacacagaaatgactagtgaattaatatattaagggtatattttcacttttatatgatgtagtgaaatctgttttaatttattgctaaatttcagtaaatgaaaatgttttcaacttttaaaa

SEQ ID NO: 419780 - DNA, 1917 bp, Homo sapiens
cgggcgataggccaagtgcggggacgccgggggggccttcacgggaggcccgggctcttccgggcgtcgcggagccggagggtgcaggcgacgggaagcgcgggtggtcggctggggtccggctcctggagaacatggcccggcctcccgggggctctggtcccctcctcgttctaatacccgatttacaattacattgaactacaaggatcccctcactggagatgaagagaccttggcttcatatgggattgtttctggggacttgatatgtttgattcttcaagatgacattccagcgcctaatataccttcatccacagattcagagcattcttcactccagaataatgagcaaccctctttggccaccagctccaatcagactagcatgcaggatgaacaaccaagtgattcattccaaggacaggcagcccagtctggtgtttggaatgacgacagtatgttagggcctagtcaaaattttgaagctgagtcaattcaagataatgcgcatatggcagagggcacaggtttctatccctcagaacccatgctctgtagtgaatcggtggaagggcaagtgccacattcattagagaccttgtatcaatcagctgactgttctgatgccaatgatgccttgatagtgttgatacatcttctcatgttggagtcaggttacatacctcagggcaccgaagccaaagcactgtccatgccggagaagtggaagttgagcggggtgtataagctgcagtacatgcatcctctctgcgagggcagctccgctactctcacctgtgtgcctttgggaaacctgattgttgtaaatgctacactaaaaatcaacaatgagattagaagtgtgaaaagattgcagctgctaccagaatcttttatttgcaaagagaaactaggggaaaatgtagccaacatatacaaagatcttcagaaactctctcgcctctttaaagaccagctggtgtatcctcttctggcttttacccgacaagcactgaacctaccagatgtatttgggttggtcgtcctcccattggaactgaaactacggatcttccgacttctggatgttcgttccgtcttgtctttgtctgcggtttgtcgtgacctctttactgcttcaaatgacccactcctgtggaggtttttatatctgcgtgattttcgagacaatactgtcagagttcaagacacagattggaaagaactgtacaggaagaggcacatacaaagaaaagaatccccgaaagggcggtttgtgatgctcctgccatcgtcaactcacaccattccattctatcccaaccccttgcaccctaggccatttcctagctcccgccttcctccaggaattatcgggggtgaatatgaccaaagaccaacacttccctatgttggagacccaatcagttcactcattcctggtcctggggagacgcccagccagtttcctccactgagaccacgctttgatccagttggcccacttccaggacctaaccccatcttgccagggcgaggcggccccaatgacagatttccctttagacccagcaggggtcggccaactgatggccggctgtcattcatgtgattgatttgtaatttcatttctggagctccatttgtttttgtttctaaactacagatgtcaactccttggggtgctgatctcgagtgttattttctgattgtggtgttgagagttgcactcccagaaaccttttaagagatacatttatagccctaggggtggtatgacccaaaggttcctctgtgacaaggttggccttgggaatagttggctgccaatctccctgctcttggttctcctctagattgaagtttgttttctgatgctgttcttaccagattaaaaaaaagtgtaaatta

SEQ ID NO: 419781 - DNA, 1908 bp, Homo sapiens
tgaagaggagtcagtcatttgaagatctggaagaacaaacggagaggcccgaaggctgcaatgaagttgatctgctttttggaacggatggaaagctcatgtgaatagagaacagtgagagaggatggatggcacaggatgcagtaggagaaatgggaagagttctaatacccgatttacaattacattgaactacaaggatcccctcactggagatgaagagaccttggcttcatatgggattgtttctggggacttgatatgtttgattcttcaagatgacattccagcgcctaatataccttcatccacagattcagagcattcttcactccagaataatgagcaaccctctttggccaccagctccaatcagactagcatgcaggatgaacaaccaagtgattcattccaaggacaggcagcccagtctggtgtttggaatgacgacagtatgttagggcctagtcaaaattttgaagctgagtcaattcaagataatgcgcatatggcagagggcacaggtttctatccctcagaacccatgctctgtagtgaatcggtggaagggcaagtgccacattcattagagaccttgtatcaatcagctgactgttctgatgccaatgatgccttgatagtgttgatacatcttctcatgttggagtcaggttacatacctcagggcaccgaagccaaagcactgtccatgccggagaagtggaagttgagcggggtgtataagctgcagtacatgcatcctctctgcgagggcagctccgctactctcacctgtgtgcctttgggaaacctgattgttgtaaatgctacactaaaaatcaacaatgagattagaagtgtgaaaagattgcagctgctaccagaatcttttatttgcaaagagaaactaggggaaaatgtagccaacatatacaaagatcttcagaaactctctcgcctctttaaagaccagctggtgtatcctcttctggcttttacccgacaagcactgaacctaccagatgtatttgggttggtcgtcctcccattggaactgaaactacggatcttccgacttctggatgttcgttccgtcttgtctttgtctgcggtttgtcgtgacctctttactgcttcaaatgacccactcctgtggaggtttttatatctgcgtgattttcgagacaatactgtcagagttcaagacacagattggaaagaactgtacaggaagaggcacatacaaagaaaagaatccccgaaagggcggtttgtgatgctcctgccatcgtcaactcacaccattccattctatcccaaccccttgcaccctaggccatttcctagctcccgccttcctccaggaattatcgggggtgaatatgaccaaagaccaacacttccctatgttggagacccaatcagttcactcattcctggtcctggggagacgcccagccagtttcctccactgagaccacgctttgatccagttggcccacttccaggacctaaccccatcttgccagggcgaggcggccccaatgacagatttccctttagacccagcaggggtcggccaactgatggccggctgtcattcatgtgattgatttgtaatttcatttctggagctccatttgtttttgtttctaaactacagatgtcaactccttggggtgctgatctcgagtgttattttctgattgtggtgttgagagttgcactcccagaaaccttttaagagatacatttatagccctaggggtggtatgacccaaaggttcctctgtgacaaggttggccttgggaatagttggctgccaatctccctgctcttggttctcctctagattgaagtttgttttctgatgctgttcttaccagattaaaaaaaagtgtaaatta

SEQ ID NO: 419782 - DNA, 1970 bp, Homo sapiens
catcgagttccgcatcctgaaagcatggagccaaagacaaagatgactgaaagaactttagactaaaatcttccagttacattgtcttactctcttttacttctcagacacttcccccaccctcatagaacctgttgcatgcaacttagtttcacagctttgcctcttctttttgatgtatttattccagacctttctgccacgattggaatgacgacagtatgttctaatacccgatttacaattacattgaactacaaggatcccctcactggagatgaagagaccttggcttcatatgggattgtttctggggacttgatatgtttgattcttcaagatgacattccagcgcctaatataccttcatccacagattcagagcattcttcactccagaataatgagcaaccctctttggccaccagctccaatcagactagcatgcaggatgaacaaccaagtgattcattccaaggacaggcagcccagtctggtgtttggaatgacgacagtatgttagggcctagtcaaaattttgaagctgagtcaattcaagataatgcgcatatggcagagggcacaggtttctatccctcagaacccatgctctgtagtgaatcggtggaagggcaagtgccacattcattagagaccttgtatcaatcagctgactgttctgatgccaatgatgccttgatagtgttgatacatcttctcatgttggagtcaggttacatacctcagggcaccgaagccaaagcactgtccatgccggagaagtggaagttgagcggggtgtataagctgcagtacatgcatcctctctgcgagggcagctccgctactctcacctgtgtgcctttgggaaacctgattgttgtaaatgctacactaaaaatcaacaatgagattagaagtgtgaaaagattgcagctgctaccagaatcttttatttgcaaagagaaactaggggaaaatgtagccaacatatacaaagatcttcagaaactctctcgcctctttaaagaccagctggtgtatcctcttctggcttttacccgacaagcactgaacctaccagatgtatttgggttggtcgtcctcccattggaactgaaactacggatcttccgacttctggatgttcgttccgtcttgtctttgtctgcggtttgtcgtgacctctttactgcttcaaatgacccactcctgtggaggtttttatatctgcgtgattttcgagacaatactgtcagagttcaagacacagattggaaagaactgtacaggaagaggcacatacaaagaaaagaatccccgaaagggcggtttgtgatgctcctgccatcgtcaactcacaccattccattctatcccaaccccttgcaccctaggccatttcctagctcccgccttcctccaggaattatcgggggtgaatatgaccaaagaccaacacttccctatgttggagacccaatcagttcactcattcctggtcctggggagacgcccagccagtttcctccactgagaccacgctttgatccagttggcccacttccaggacctaaccccatcttgccagggcgaggcggccccaatgacagatttccctttagacccagcaggggtcggccaactgatggccggctgtcattcatgtgattgatttgtaatttcatttctggagctccatttgtttttgtttctaaactacagatgtcaactccttggggtgctgatctcgagtgttattttctgattgtggtgttgagagttgcactcccagaaaccttttaagagatacatttatagccctaggggtggtatgacccaaaggttcctctgtgacaaggttggccttgggaatagttggctgccaatctccctgctcttggttctcctctagattgaagtttgttttctgatgctgttcttaccagattaaaaaaaagtgtaaatta

SEQ ID NO: 419783 - DNA, 1928 bp, Homo sapiens
gtgaaatgttgcttttttgctaaaactgaggcaaacgttgatcttgagagcttgcagtttgggggcagtaaagttgagaaaggatcatattctgttattggtttgtgggactgcaggtgaagctgctttgtttccctaaaagatactttttggggacaataatttgggagtaaagcggcaagttctaatacccgatttacaattacattgaactacaaggatcccctcactggagatgaagagaccttggcttcatatgggattgtttctggggacttgatatgtttgattcttcaagatgacattccagcgcctaatataccttcatccacagattcagagcattcttcactccagaataatgagcaaccctctttggccaccagctccaatcagactagcatgcaggatgaacaaccaagtgattcattccaaggacaggcagcccagtctggtgtttggaatgacgacagtatgttagggcctagtcaaaattttgaagctgagtcaattcaagataatgcgcatatggcagagggcacaggtttctatccctcagaacccatgctctgtagtgaatcggtggaagggcaagtgccacattcattagagaccttgtatcaatcagctgactgttctgatgccaatgatgccttgatagtgttgatacatcttctcatgttggagtcaggttacatacctcagggcaccgaagccaaagcactgtccatgccggagaagtggaagttgagcggggtgtataagctgcagtacatgcatcctctctgcgagggcagctccgctactctcacctgtgtgcctttgggaaacctgattgttgtaaatgctacactaaaaatcaacaatgagattagaagtgtgaaaagattgcagctgctaccagaatcttttatttgcaaagagaaactaggggaaaatgtagccaacatatacaaagatcttcagaaactctctcgcctctttaaagaccagctggtgtatcctcttctggcttttacccgacaagcactgaacctaccagatgtatttgggttggtcgtcctcccattggaactgaaactacggatcttccgacttctggatgttcgttccgtcttgtctttgtctgcggtttgtcgtgacctctttactgcttcaaatgacccactcctgtggaggtttttatatctgcgtgattttcgagacaatactgtcagagttcaagacacagattggaaagaactgtacaggaagaggcacatacaaagaaaagaatccccgaaagggcggtttgtgatgctcctgccatcgtcaactcacaccattccattctatcccaaccccttgcaccctaggccatttcctagctcccgccttcctccaggaattatcgggggtgaatatgaccaaagaccaacacttccctatgttggagacccaatcagttcactcattcctggtcctggggagacgcccagccagtttcctccactgagaccacgctttgatccagttggcccacttccaggacctaaccccatcttgccagggcgaggcggccccaatgacagatttccctttagacccagcaggggtcggccaactgatggccggctgtcattcatgtgattgatttgtaatttcatttctggagctccatttgtttttgtttctaaactacagatgtcaactccttggggtgctgatctcgagtgttattttctgattgtggtgttgagagttgcactcccagaaaccttttaagagatacatttatagccctaggggtggtatgacccaaaggttcctctgtgacaaggttggccttgggaatagttggctgccaatctccctgctcttggttctcctctagattgaagtttgttttctgatgctgttcttaccagattaaaaaaaagtgtaaatta

SEQ ID NO: 419784 - DNA, 2144 bp, Homo sapiens
gcgcctaggtacgggctgagtatcaatcggccgaggccgagaggcccggttcctttaggccgcctgcccgcctccagctctcggggtcggctccaggaggcgccctcaggagaggggcgggcgctctattccagagaccgagtggcagggcggccactgtggcggggctctttccccgtttcgcctcagctacccctcagctccggtagtcgccagtccggggtcgtcgccgtttggggcgggagctgctcggccccgccgccgtccccgtcgccgcttccgggtccaggcccctcgggccgcctgccgccgtcatgaggctgcgggtgcggcttctgaagcggacctggccgctggaggtgcccgagacggagccgacgctggggcatttgcgctcgcacctgaggcagtccctgctgtgcacctgggggtacagttctaatacccgatttacaattacattgaactacaaggatcccctcactggagatgaagagaccttggcttcatatgggattgtttctggggacttgatatgtttgattcttcaagatgacattccagcgcctaatataccttcatccacagattcagagcattcttcactccagaataatgagcaaccctctttggccaccagctccaatcagactagcatgcaggatgaacaaccaagtgattcattccaaggacaggcagcccagtctggtgtttggaatgacgacagtatgttagggcctagtcaaaattttgaagctgagtcaattcaagataatgcgcatatggcagagggcacaggtttctatccctcagaacccatgctctgtagtgaatcggtggaagggcaagtgccacattcattagagaccttgtatcaatcagctgactgttctgatgccaatgatgccttgatagtgttgatacatcttctcatgttggagtcaggttacatacctcagggcaccgaagccaaagcactgtccatgccggagaagtggaagttgagcggggtgtataagctgcagtacatgcatcctctctgcgagggcagctccgctactctcacctgtgtgcctttgggaaacctgattgttgtaaatgctacactaaaaatcaacaatgagattagaagtgtgaaaagattgcagctgctaccagaatcttttatttgcaaagagaaactaggggaaaatgtagccaacatatacaaagatcttcagaaactctctcgcctctttaaagaccagctggtgtatcctcttctggcttttacccgacaagcactgaacctaccagatgtatttgggttggtcgtcctcccattggaactgaaactacggatcttccgacttctggatgttcgttccgtcttgtctttgtctgcggtttgtcgtgacctctttactgcttcaaatgacccactcctgtggaggtttttatatctgcgtgattttcgagctgtacaggaagaggcacatacaaagaaaagaatccccgaaagggcggtttgtgatgctcctgccatcgtcaactcacaccattccattctatcccaaccccttgcaccctaggccatttcctagctcccgccttcctccaggaattatcgggggtgaatatgaccaaagaccaacacttccctatgttggagacccaatcagttcactcattcctggtcctggggagacgcccagccagtttcctccactgagaccacgctttgatccagttggcccacttccaggacctaaccccatcttgccagggcgaggcggccccaatgacagatttccctttagacccagcaggggtcggccaactgatggccggctgtcattcatgtgattgatttgtaatttcatttctggagctccatttgtttttgtttctaaactacagatgtcaactccttggggtgctgatctcgagtgttattttctgattgtggtgttgagagttgcactcccagaaaccttttaagagatacatttatagccctaggggtggtatgacccaaaggttcctctgtgacaaggttggccttgggaatagttggctgccaatctccctgctcttggttctcctctagattgaagtttgttttctgatgctgttcttaccagattaaaaaaaagtgtaaatta

SEQ ID NO: 419785 - DNA, 2030 bp, Homo sapiens
gcgcctaggtacgggctgagtatcaatcggccgaggccgagaggcccggttcctttaggccgcctgcccgcctccagctctcggggtcggctccaggaggcgccctcaggagaggggcgggcgctctattccagagaccgagtggcagggcggccactgtggcggggctctttccccgtttcgcctcagctacccctcagctccggtagtcgccagtccggggtcgtcgccgtttggggcgggagctgctcggccccgccgccgtccccgtcgccgcttccgggtccaggcccctcgggccgcctgccgccgtcatgaggctgcgggtgcggcttctgaagcggacctggccgctggaggtgcccgagacggagccgacgctggggcatttgcgctcgcacctgaggcagtccctgctgtgcacctgggggtacagattcagagcattcttcactccagaataatgagcaaccctctttggccaccagctccaatcagactagcatgcaggatgaacaaccaagtgattcattccaaggacaggcagcccagtctggtgtttggaatgacgacagtatgttagggcctagtcaaaattttgaagctgagtcaattcaagataatgcgcatatggcagagggcacaggtttctatccctcagaacccatgctctgtagtgaatcggtggaagggcaagtgccacattcattagagaccttgtatcaatcagctgactgttctgatgccaatgatgccttgatagtgttgatacatcttctcatgttggagtcaggttacatacctcagggcaccgaagccaaagcactgtccatgccggagaagtggaagttgagcggggtgtataagctgcagtacatgcatcctctctgcgagggcagctccgctactctcacctgtgtgcctttgggaaacctgattgttgtaaatgctacactaaaaatcaacaatgagattagaagtgtgaaaagattgcagctgctaccagaatcttttatttgcaaagagaaactaggggaaaatgtagccaacatatacaaagatcttcagaaactctctcgcctctttaaagaccagctggtgtatcctcttctggcttttacccgacaagcactgaacctaccagatgtatttgggttggtcgtcctcccattggaactgaaactacggatcttccgacttctggatgttcgttccgtcttgtctttgtctgcggtttgtcgtgacctctttactgcttcaaatgacccactcctgtggaggtttttatatctgcgtgattttcgagacaatactgtcagagttcaagacacagattggaaagaactgtacaggaagaggcacatacaaagaaaagaatccccgaaagggcggtttgtgatgctcctgccatcgtcaactcacaccattccattctatcccaaccccttgcaccctaggccatttcctagctcccgccttcctccaggaattatcgggggtgaatatgaccaaagaccaacacttccctatgttggagacccaatcagttcactcattcctggtcctggggagacgcccagccagtttcctccactgagaccacgctttgatccagttggcccacttccaggacctaaccccatcttgccagggcgaggcggccccaatgacagatttccctttagacccagcaggggtcggccaactgatggccggctgtcattcatgtgattgatttgtaatttcatttctggagctccatttgtttttgtttctaaactacagatgtcaactccttggggtgctgatctcgagtgttattttctgattgtggtgttgagagttgcactcccagaaaccttttaagagatacatttatagccctaggggtggtatgacccaaaggttcctctgtgacaaggttggccttgggaatagttggctgccaatctccctgctcttggttctcctctagattgaagtttgttttctgatgctgttcttaccagattaaaaaaaagtgtaaatta

SEQ ID NO: 419786 - DNA, 1765 bp, Homo sapiens
cgggcgataggccaagtgcggggacgccgggggggccttcacgggaggcccgggctcttccgggcgtcgcggagccggagggtgcaggcgacgggaagcgcgggtggtcggctggggtccggctcctggagaacatggcccggcctcccgggggctctggtcccctcctcgattcagagcattcttcactccagaataatgagcaaccctctttggccaccagctccaatcagactagcatgcaggatgaacaaccaagtgattcattccaaggacaggcagcccagtctggtgtttggaatgacgacagtatgttagggcctagtcaaaattttgaagctgagtcaattcaagataatgcgcatatggcagagggcacaggtttctatccctcagaacccatgctctgtagtgaatcggtggaagggcaagtgccacattcattagagaccttgtatcaatcagctgactgttctgatgccaatgatgccttgatagtgttgatacatcttctcatgttggagtcaggttacatacctcagggcaccgaagccaaagcactgtccatgccggagaagtggaagttgagcggggtgtataagctgcagtacatgcatcctctctgcgagggcagctccgctactctcacctgtgtgcctttgggaaacctgattgttgtaaatgctacactaaaaatcaacaatgagattagaagtgtgaaaagattgcagctgctaccagaatcttttatttgcaaagagaaactaggggaaaatgtagccaacatatacaaagatcttcagaaactctctcgcctctttaaagaccagctggtgtatcctcttctggcttttacccgacaagcactgaacctaccagatgtatttgggttggtcgtcctcccattggaactgaaactacggatcttccgacttctggatgttcgttccgtcttgtctttgtctgcggtttgtcgtgacctctttactgcttcaaatgacccactcctgtggaggtttttatatctgcgtgattttcgagacaatactgtcagagttcaagacacagattggaaagaactgtacaggaagaggcacatacaaagaaaagaatccccgaaagggcggtttgtgatgctcctgccatcgtcaactcacaccattccattctatcccaaccccttgcaccctaggccatttcctagctcccgccttcctccaggaattatcgggggtgaatatgaccaaagaccaacacttccctatgttggagacccaatcagttcactcattcctggtcctggggagacgcccagccagtttcctccactgagaccacgctttgatccagttggcccacttccaggacctaaccccatcttgccagggcgaggcggccccaatgacagatttccctttagacccagcaggggtcggccaactgatggccggctgtcattcatgtgattgatttgtaatttcatttctggagctccatttgtttttgtttctaaactacagatgtcaactccttggggtgctgatctcgagtgttattttctgattgtggtgttgagagttgcactcccagaaaccttttaagagatacatttatagccctaggggtggtatgacccaaaggttcctctgtgacaaggttggccttgggaatagttggctgccaatctccctgctcttggttctcctctagattgaagtttgttttctgatgctgttcttaccagattaaaaaaaagtgtaaatta

SEQ ID NO: 419787 - DNA, 1485 bp, Homo sapiens
  misc_feature (13)..(13): n is a, c, g, or t
tgcaggtgacccnaggattaatgccaataacctcttagggcctagtcaaaattttgaagctgagtcaattcaagataatgcgcatatggcagagggcacaggtttctatccctcagaacccatgctctgtagtgaatcggtggaagggcaagtgccacattcattagagaccttgtatcaatcagctgactgttctgatgccaatgatgccttgatagtgttgatacatcttctcatgttggagtcaggttacatacctcagggcaccgaagccaaagcactgtccatgccggagaagtggaagttgagcggggtgtataagctgcagtacatgcatcctctctgcgagggcagctccgctactctcacctgtgtgcctttgggaaacctgattgttgtaaatgctacactaaaaatcaacaatgagattagaagtgtgaaaagattgcagctgctaccagaatcttttatttgcaaagagaaactaggggaaaatgtagccaacatatacaaagatcttcagaaactctctcgcctctttaaagaccagctggtgtatcctcttctggcttttacccgacaagcactgaacctaccagatgtatttgggttggtcgtcctcccattggaactgaaactacggatcttccgacttctggatgttcgttccgtcttgtctttgtctgcggtttgtcgtgacctctttactgcttcaaatgacccactcctgtggaggtttttatatctgcgtgattttcgagacaatactgtcagagttcaagacacagattggaaagaactgtacaggaagaggcacatacaaagaaaagaatccccgaaagggcggtttgtgatgctcctgccatcgtcaactcacaccattccattctatcccaaccccttgcaccctaggccatttcctagctcccgccttcctccaggaattatcgggggtgaatatgaccaaagaccaacacttccctatgttggagacccaatcagttcactcattcctggtcctggggagacgcccagccagtttcctccactgagaccacgctttgatccagttggcccacttccaggacctaaccccatcttgccagggcgaggcggccccaatgacagatttccctttagacccagcaggggtcggccaactgatggccggctgtcattcatgtgattgatttgtaatttcatttctggagctccatttgtttttgtttctaaactacagatgtcaactccttggggtgctgatctcgagtgttattttctgattgtggtgttgagagttgcactcccagaaaccttttaagagatacatttatagccctaggggtggtatgacccaaaggttcctctgtgacaaggttggccttgggaatagttggctgccaatctccctgctcttggttctcctctagattgaagtttgttttctgatgctgttcttaccagattaaaaaaaagtgtaaatta

SEQ ID NO: 419788 - DNA, 1622 bp, Homo sapiens
cgggcgataggccaagtgcggggacgccgggggggccttcacgggaggcccgggctcttccgggcgtcgcggagccggagggtgcaggcgacgggaagcgcgggtggtcggctggggtccggctcctggagaacatggcccggcctcccgggggctctggtcccctcctcgttagggcctagtcaaaattttgaagctgagtcaattcaagataatgcgcatatggcagagggcacaggtttctatccctcagaacccatgctctgtagtgaatcggtggaagggcaagtgccacattcattagagaccttgtatcaatcagctgactgttctgatgccaatgatgccttgatagtgttgatacatcttctcatgttggagtcaggttacatacctcagggcaccgaagccaaagcactgtccatgccggagaagtggaagttgagcggggtgtataagctgcagtacatgcatcctctctgcgagggcagctccgctactctcacctgtgtgcctttgggaaacctgattgttgtaaatgctacactaaaaatcaacaatgagattagaagtgtgaaaagattgcagctgctaccagaatcttttatttgcaaagagaaactaggggaaaatgtagccaacatatacaaagatcttcagaaactctctcgcctctttaaagaccagctggtgtatcctcttctggcttttacccgacaagcactgaacctaccagatgtatttgggttggtcgtcctcccattggaactgaaactacggatcttccgacttctggatgttcgttccgtcttgtctttgtctgcggtttgtcgtgacctctttactgcttcaaatgacccactcctgtggaggtttttatatctgcgtgattttcgagacaatactgtcagagttcaagacacagattggaaagaactgtacaggaagaggcacatacaaagaaaagaatccccgaaagggcggtttgtgatgctcctgccatcgtcaactcacaccattccattctatcccaaccccttgcaccctaggccatttcctagctcccgccttcctccaggaattatcgggggtgaatatgaccaaagaccaacacttccctatgttggagacccaatcagttcactcattcctggtcctggggagacgcccagccagtttcctccactgagaccacgctttgatccagttggcccacttccaggacctaaccccatcttgccagggcgaggcggccccaatgacagatttccctttagacccagcaggggtcggccaactgatggccggctgtcattcatgtgattgatttgtaatttcatttctggagctccatttgtttttgtttctaaactacagatgtcaactccttggggtgctgatctcgagtgttattttctgattgtggtgttgagagttgcactcccagaaaccttttaagagatacatttatagccctaggggtggtatgacccaaaggttcctctgtgacaaggttggccttgggaatagttggctgccaatctccctgctcttggttctcctctagattgaagtttgttttctgatgctgttcttaccagattaaaaaaaagtgtaaatta

SEQ ID NO: 419789 - DNA, 1887 bp, Homo sapiens
gcgcctaggtacgggctgagtatcaatcggccgaggccgagaggcccggttcctttaggccgcctgcccgcctccagctctcggggtcggctccaggaggcgccctcaggagaggggcgggcgctctattccagagaccgagtggcagggcggccactgtggcggggctctttccccgtttcgcctcagctacccctcagctccggtagtcgccagtccggggtcgtcgccgtttggggcgggagctgctcggccccgccgccgtccccgtcgccgcttccgggtccaggcccctcgggccgcctgccgccgtcatgaggctgcgggtgcggcttctgaagcggacctggccgctggaggtgcccgagacggagccgacgctggggcatttgcgctcgcacctgaggcagtccctgctgtgcacctgggggtacagttagggcctagtcaaaattttgaagctgagtcaattcaagataatgcgcatatggcagagggcacaggtttctatccctcagaacccatgctctgtagtgaatcggtggaagggcaagtgccacattcattagagaccttgtatcaatcagctgactgttctgatgccaatgatgccttgatagtgttgatacatcttctcatgttggagtcaggttacatacctcagggcaccgaagccaaagcactgtccatgccggagaagtggaagttgagcggggtgtataagctgcagtacatgcatcctctctgcgagggcagctccgctactctcacctgtgtgcctttgggaaacctgattgttgtaaatgctacactaaaaatcaacaatgagattagaagtgtgaaaagattgcagctgctaccagaatcttttatttgcaaagagaaactaggggaaaatgtagccaacatatacaaagatcttcagaaactctctcgcctctttaaagaccagctggtgtatcctcttctggcttttacccgacaagcactgaacctaccagatgtatttgggttggtcgtcctcccattggaactgaaactacggatcttccgacttctggatgttcgttccgtcttgtctttgtctgcggtttgtcgtgacctctttactgcttcaaatgacccactcctgtggaggtttttatatctgcgtgattttcgagacaatactgtcagagttcaagacacagattggaaagaactgtacaggaagaggcacatacaaagaaaagaatccccgaaagggcggtttgtgatgctcctgccatcgtcaactcacaccattccattctatcccaaccccttgcaccctaggccatttcctagctcccgccttcctccaggaattatcgggggtgaatatgaccaaagaccaacacttccctatgttggagacccaatcagttcactcattcctggtcctggggagacgcccagccagtttcctccactgagaccacgctttgatccagttggcccacttccaggacctaaccccatcttgccagggcgaggcggccccaatgacagatttccctttagacccagcaggggtcggccaactgatggccggctgtcattcatgtgattgatttgtaatttcatttctggagctccatttgtttttgtttctaaactacagatgtcaactccttggggtgctgatctcgagtgttattttctgattgtggtgttgagagttgcactcccagaaaccttttaagagatacatttatagccctaggggtggtatgacccaaaggttcctctgtgacaaggttggccttgggaatagttggctgccaatctccctgctcttggttctcctctagattgaagtttgttttctgatgctgttcttaccagattaaaaaaaagtgtaaatta

SEQ ID NO: 419790 - DNA, 1675 bp, Homo sapiens
catcgagttccgcatcctgaaagcatggagccaaagacaaagatgactgaaagaactttagactaaaatcttccagttacattgtcttactctcttttacttctcagacacttcccccaccctcatagaacctgttgcatgcaacttagtttcacagctttgcctcttctttttgatgtatttattccagacctttctgccacgattggaatgacgacagtatgttagggcctagtcaaaattttgaagctgagtcaattcaagataatgcgcatatggcagagggcacaggtttctatccctcagaacccatgctctgtagtgaatcggtggaagggcaagtgccacattcattagagaccttgtatcaatcagctgactgttctgatgccaatgatgccttgatagtgttgatacatcttctcatgttggagtcaggttacatacctcagggcaccgaagccaaagcactgtccatgccggagaagtggaagttgagcggggtgtataagctgcagtacatgcatcctctctgcgagggcagctccgctactctcacctgtgtgcctttgggaaacctgattgttgtaaatgctacactaaaaatcaacaatgagattagaagtgtgaaaagattgcagctgctaccagaatcttttatttgcaaagagaaactaggggaaaatgtagccaacatatacaaagatcttcagaaactctctcgcctctttaaagaccagctggtgtatcctcttctggcttttacccgacaagcactgaacctaccagatgtatttgggttggtcgtcctcccattggaactgaaactacggatcttccgacttctggatgttcgttccgtcttgtctttgtctgcggtttgtcgtgacctctttactgcttcaaatgacccactcctgtggaggtttttatatctgcgtgattttcgagacaatactgtcagagttcaagacacagattggaaagaactgtacaggaagaggcacatacaaagaaaagaatccccgaaagggcggtttgtgatgctcctgccatcgtcaactcacaccattccattctatcccaaccccttgcaccctaggccatttcctagctcccgccttcctccaggaattatcgggggtgaatatgaccaaagaccaacacttccctatgttggagacccaatcagttcactcattcctggtcctggggagacgcccagccagtttcctccactgagaccacgctttgatccagttggcccacttccaggacctaaccccatcttgccagggcgaggcggccccaatgacagatttccctttagacccagcaggggtcggccaactgatggccggctgtcattcatgtgattgatttgtaatttcatttctggagctccatttgtttttgtttctaaactacagatgtcaactccttggggtgctgatctcgagtgttattttctgattgtggtgttgagagttgcactcccagaaaccttttaagagatacatttatagccctaggggtggtatgacccaaaggttcctctgtgacaaggttggccttgggaatagttggctgccaatctccctgctcttggttctcctctagattgaagtttgttttctgatgctgttcttaccagattaaaaaaaagtgtaaatta

SEQ ID NO: 419791 - DNA, 2629 bp, Homo sapiens
gcgcctaggtacgggctgagtatcaatcggccgaggccgagaggcccggttcctttaggccgcctgcccgcctccagctctcggggtcggctccaggaggcgccctcaggagaggggcgggcgctctattccagagaccgagtggcagggcggccactgtggcggggctctttccccgtttcgcctcagctacccctcagctccggtagtcgccagtccggggtcgtcgccgtttggggcgggagctgctcggccccgccgccgtccccgtcgccgcttccgggtccaggcccctcgggccgcctgccgccgtcatgaggctgcgggtgcggcttctgaagcggacctggccgctggaggtgcccgagacggagccgacgctggggcatttgcgctcgcacctgaggcagtccctgctgtgcacctgggggtacagttctaatacccgatttacaattacattgaactacaaggatcccctcactggagatgaagagaccttggcttcatatgggattgtttctggggacttgatatgtttgattcttcaagatgacattccagcgcctaatataccttcatccacagattcagagcattcttcactccagaataatgagcaaccctctttggccaccagctccaatcagactagcatgcaggatgaacaaccaagtgattcattccaaggacaggcagcccagtctggtgtttggaatgacgacagtatgttagggcctagtcaaaattttgaagctgagtcaattcaagataatgcgcatatggcagagggcacaggtttctatccctcagaacccatgctctgtagtgaatcggtggaagggcaagtgccacattcattagagaccttgtatcaatcagctgactgttctgatgccaatgatgccttgatagtgttgatacatcttctcatgttggagtcaggttacatacctcagggcaccgaagccaaagcactgtccatgccggagaagtggaagttgagcggggtgtataagctgcagtacatgcatcctctctgcgagggcagctccgctactctcacctgtgtgcctttgggaaacctgattgttgtaaatgctacactaaaaatcaacaatgagattagaagtgtgaaaagattgcagctgctaccagaatcttttatttgcaaagagaaactaggggaaaatgtagccaacatatacaaagatcttcagaaactctctcgcctctttaaagaccagctggtgtatcctcttctggcttttacccgacaagcactgaacctaccagatgtatttgggttggtcgtcctcccattggaactgaaactacggatcttccgacttctggatgttcgttccgtcttgtctttgtctgcggtttgtcgtgacctctttactgcttcaaatgacccactcctgtggaggtttttatatctgcgtgattttcgagacaatactgtcagagttcaagacacagattggaaagaactgtacaggaagaggcacatacaaagaaaagaatccccgaaagggcggtttgtgatgctcctgccatcgtcaactcacaccattccattctatcccaaccccttgcaccctaggccatttcctagctcccgccttcctccaggaattatcgggggtgaatatgaccaaagaccaacacttccctatgttggagacccaatcagttcactcattcctggtcctggggagacgcccagccagtttcctccactgagaccacgctttgatccagttggcccacttccaggacctaaccccatcttgccagggcgaggcggccccaatgacagatttccctttagacccagcaggggtcggccaactgatggccggctgtcattcatgtgattgatttgtaatttcatttctggagctccatttgtttttgtttctaaactacagatgtcaactccttggggtgctgatctcgagtgttattttctgattgtggtgttgagagttgcactcccagaaaccttttaagagatacatttatagccctaggggtggtatgacccaaaggttcctctgtgacaaggttggccttgggaatagttggctgccaatctccctgctcttggttctcctctagattgaagtttgttttctgatgctgttcttaccagattaaaaaaaagtgtaaattacatggtggtcttgacttttattacagaaagatatgtagtaaatattcagaacagatacacaatgttacttggacatttcagaattatcagagaacatagcataggcagataatttttgtaagggttttctgtttgtttgttttttttttttttagcagcgctctgtcttctaataaaggcctgatttatgaaatgaatgaaaacagagctagtttggttgaactggacttggggtgggtgctttggctacacacctactcaaatccacctcttctctcgacttctctctctctgcagctctttcttgggttctgtggtggaactttctgggctgtgaagcaatgctgttgaaaggccatttggtattagggactcctgtttgtggctcctgggatgaggtggttatgattttgttttccttgtgttttgaacacttagcccctaatt

SEQ ID NO: 419792 - DNA, 1466 bp, Homo sapiens
tgtaaaaataagtctttaattaattcattgttttgttttcctttttcagttagggcctagtcaaaattttgaagatgcgcatatggcagagggcacaggtttctatccctcagaacccatgctctgtagtgaatcggtggaagggcaagtgccacattcattagagctgactgttctgatgccaatgatgccttgatagtgttgatacatcttctcatgttggagtcaggttacatacctcagggcaccgaagccaaagcactgtccatgccggagaagtggaagttgagcggggtgtataagctgcagtacatgcatcctctctgcgagggcagctccgctactctcacctgtgtgcctttgggaaacctgattgttgtaaatgctacactaaaaatcaacaatgagattagaagtgtgaaaagattgcagctgctaccagaatcttttatttgcaaagagaaactaggggaaaatgtagccaacatatacaaagatcttcagaaactctctcgcctctttaaagaccagctggtgtatcctcttctggcttttacccgacaagcactgaacctaccagatgtatttgggttggtcgtcctcccattggaactgaaactacggatcttccgacttctggatgttcgttccgtcttgtctttgtctgcggtttgtcgtgacctctttactgcttcaaatgacccactcctgtggaggtttttatatctgcgtgattttcgagacaatactgtcagagttcaagacacagattggaaagaactgtacaggaagaggcacatacaaagaaaagaatccccgaaagggcggtttgtgatgctcctgccatcgtcaactcacaccattccattctatcccaaccccttgcaccctaggccatttcctagctcccgccttcctccaggaattatcgggggtgaatatgaccaaagaccaacacttccctatgttggagacccaatcagttcactcattcctggtcctggggagacgcccagccagtttcctccactgagaccacgctttgatccagttggcccacttccaggacctaaccccatcttgccagggcgaggcggccccaatgacagatttccctttagacccagcaggggtcggccaactgatggccggctgtcattcatgtgattgatttgtaatttcatttctggagctccatttgtttttgtttctaaactacagatgtcaactccttggggtgctgatctcgagtgttattttctgattgtggtgttgagagttgcactcccagaaaccttttaagagatacatttatagccctaggggtggtatgacccaaaggttcctctgtgacaaggttggccttgggaatagttggctgccaatctccctgctcttggttctcctctagattgaagtttgttttctgatgctgttcttaccagattaaaaaaaagtgtaaatta

SEQ ID NO: 419793 - DNA, 1333 bp, Homo sapiens
  misc_feature (8)..(8): n is a, c, g, or t
gaatcacnttctcacgcttggtctttctgagcaccctgcttaaaacgcagtcacgctcacatgggctgctgccacatcttctcatgttggagtcaggttacatacctcagggcaccgaagccaaagcactgtccatgccggagaagtggaagttgagcggggtgtataagctgcagtacatgcatcctctctgcgagggcagctccgctactctcacctgtgtgcctttgggaaacctgattgttgtaaatgctacactaaaaatcaacaatgagattagaagtgtgaaaagattgcagctgctaccagaatcttttatttgcaaagagaaactaggggaaaatgtagccaacatatacaaagatcttcagaaactctctcgcctctttaaagaccagctggtgtatcctcttctggcttttacccgacaagcactgaacctaccagatgtatttgggttggtcgtcctcccattggaactgaaactacggatcttccgacttctggatgttcgttccgtcttgtctttgtctgcggtttgtcgtgacctctttactgcttcaaatgacccactcctgtggaggtttttatatctgcgtgattttcgagacaatactgtcagagttcaagacacagattggaaagaactgtacaggaagaggcacatacaaagaaaagaatccccgaaagggcggtttgtgatgctcctgccatcgtcaactcacaccattccattctatcccaaccccttgcaccctaggccatttcctagctcccgccttcctccaggaattatcgggggtgaatatgaccaaagaccaacacttccctatgttggagacccaatcagttcactcattcctggtcctggggagacgcccagccagtttcctccactgagaccacgctttgatccagttggcccacttccaggacctaaccccatcttgccagggcgaggcggccccaatgacagatttccctttagacccagcaggggtcggccaactgatggccggctgtcattcatgtgattgatttgtaatttcatttctggagctccatttgtttttgtttctaaactacagatgtcaactccttggggtgctgatctcgagtgttattttctgattgtggtgttgagagttgcactcccagaaaccttttaagagatacatttatagccctaggggtggtatgacccaaaggttcctctgtgacaaggttggccttgggaatagttggctgccaatctccctgctcttggttctcctctagattgaagtttgttttctgatgctgttcttaccagattaaaaaaaagtgtaaatta

SEQ ID NO: 419794 - DNA, 1278 bp, Homo sapiens
tctttccttcacccaaggcatcctgcttggtgcacatgtgcataagcacatcactgggctctttcatggaatgagatgaagtgcgcctttgtatacatgattaaaattgaaccctctggtgatgtcaagtatatttatcctttgggtctggaagagagatgatgctgtgaaaactagcaagattattttaatgaacactacactaaaaatcaacaatgagattagaagtgtgaaaagattgcagctgctaccagaatcttttatttgcaaagagaaactaggggaaaatgtagccaacatatacaaagatcttcagaaactctctcgcctctttaaagaccagctggtgtatcctcttctggcttttacccgacaagcactgaacctaccagatgtatttgggttggtcgtcctcccattggaactgaaactacggatcttccgacttctggatgttcgttccgtcttgtctttgtctgcggtttgtcgtgacctctttactgcttcaaatgacccactcctgtggaggtttttatatctgcgtgattttcgagacaatactgtcagagttcaagacacagattggaaagaactgtacaggaagaggcacatacaaagaaaagaatccccgaaagggcggtttgtgatgctcctgccatcgtcaactcacaccattccattctatcccaaccccttgcaccctaggccatttcctagctcccgccttcctccaggaattatcgggggtgaatatgaccaaagaccaacacttccctatgttggagacccaatcagttcactcattcctggtcctggggagacgcccagccagtttcctccactgagaccacgctttgatccagttggcccacttccaggacctaaccccatcttgccagggcgaggcggccccaatgacagatttccctttagacccagcaggggtcggccaactgatggccggctgtcattcatgtgattgatttgtaatttcatttctggagctccatttgtttttgtttctaaactacagatgtcaactccttggggtgctgatctcgagtgttattttctgattgtggtgttgagagttgcactcccagaaaccttttaagagatacatttatagccctaggggtggtatgacccaaaggttcctctgtgacaaggttggccttgggaatagttggctgccaatctccctgctcttggttctcctctagattgaagtttgttttctgatgctgttcttaccagattaaaaaaaagtgtaaatta

SEQ ID NO: 419795 - DNA, 2065 bp, Homo sapiens
gcgcctaggtacgggctgagtatcaatcggccgaggccgagaggcccggttcctttaggccgcctgcccgcctccagctctcggggtcggctccaggaggcgccctcaggagaggggcgggcgctctattccagagaccgagtggcagggcggccactgtggcggggctctttccccgtttcgcctcagctacccctcagctccggtagtcgccagtccggggtcgtcgccgtttggggcgggagctgctcggccccgccgccgtccccgtcgccgcttccgggtccaggcccctcgggccgcctgccgccgtcatgaggctgcgggtgcggcttctgaagcggacctggccgctggaggtgcccgagacggagccgacgctggggcatttgcgctcgcacctgaggcagtccctgctgtgcacctgggggtacagttctaatacccgatttacaattacattgaactacaaggatcccctcactggagatgaagagaccttggcttcatatgggattgtttctggggacttgatatgtttgattcttcaagatgacattccagcgcctaatataccttcatccacagattcagagcattcttcactccagaataatgagcaaccctctttggccaccagctccaatcagactagcatgcaggatgaacaaccaagtgattcattccaaggacaggcagcccagtctggtgtttggaatgacgacagtatgttagggcctagtcaaaattttgaagctgagtcaattcaagataatgcgcatatggcagagggcacaggtttctatccctcagaacccatgctctgtagtgaatcggtggaagggcaagtgccacattcattagagaccttgtatcaatcagctgactgttctgatgccaatgatgccttgatagtgttgatacatcttctcatgttggagtcaggttacatacctcagggcaccgaagccaaagcactgtccatgccggagaagtggaagttgagcggggtgtataagctgcagtacatgcatcctctctgcgagggcagctccgctactctcacctgtgtgcctttgggaaacctgattgttgtaaatgctacactaaaaatcaacaatgagattagaagtgtgaaaagattgcagctgctaccagaatcttttatttgcaaagagaaactaggggaaaatgtagccaacatatacaaagatcttcagaaactctctcgcctctttaaagaccagctggtgtatcctcttctggcttttacccgacaagcactgaacctaccagatgtatttgggttggtcgtcctcccattggaactgaaactacggatcttccgacttctggatgttcgttccgtcttgtctttgtctgcggtttgtcgtgacctctttactgcttcaaatgacccactcctgtggaggtttttatatctgcgtgattttcgagacaatactgtcagagttcaagacacagattggaaagaactgtacaggaagaggcacatacaaagaaaagaatccccgaaagggcggtttgtgatgctcctgccatcgtcaactcacaccattccattctatcccaaccccttgcaccctaggccatttcctagctcccgccttcctccaggaattatcgggggtgaatatgaccaaagacctaaccccatcttgccagggcgaggcggccccaatgacagatttccctttagacccagcaggggtcggccaactgatggccggctgtcattcatgtgattgatttgtaatttcatttctggagctccatttgtttttgtttctaaactacagatgtcaactccttggggtgctgatctcgagtgttattttctgattgtggtgttgagagttgcactcccagaaaccttttaagagatacatttatagccctaggggtggtatgacccaaaggttcctctgtgacaaggttggccttgggaatagttggctgccaatctccctgctcttggttctcctctagattgaagtttgttttctgatgctgttcttaccagattaaaaaaaagtgtaaatta

SEQ ID NO: 419796 - DNA, 1469 bp, Homo sapiens
tgcatcctcataggttaggtctcacaagatttggttttccattctagagttacttcacttaaaataatggcctccagctgcatccaagttgctgcaaaagacattatttcattcctttttatggctgagtagtattccatggtgtatatatgccacattttctttatcagtggtttcttggaatggaatctattcctggacaacaaaggatttcgaatattacataaatttagttgacaaaacagaagcaaggtttgagaaggttgactctgattttgaaagttttactgtgggtaaaatgccatcaaacagcatcgcatgtacagagaaatctttcatgaaaggaagagtgagtcaatgtgacaaacttcactgttgtattattttaagaaattgccacagccacttcagcctttagcaaccagcaccctgatctgtcagcagcaacgaacatggaggcaagaccctctattagcaaaaagattgcaacttgctaaaggctcaggtgattgttagcatatttttaaattaaggtatgtacattgtctttttagatataatgctattgcacatttactatagtgtaaacatagcatagcatttatatacactgggaaaccaaaaaaatttgtgtgacttggtttattgcattggtttgggactaaatccacaatatgtctgaggtgtgcctatagatctttactatgaaagcaaattagaactaaagggaaacatccagatcacttaccttatcttgttcttttatttttcttttttctacagctgtacaggaagaggcacatacaaagaaaagaatccccgaaagggcggtttgtgatgctcctgccatcgtcaactcacaccattccattctatcccaaccccttgcaccctaggccatttcctagctcccgccttcctccaggaattatcgggggtgaatatgaccaaagaccaacacttccctatgttggagacccaatcagttcactcattcctggtcctggggagacgcccagccagtttcctccactgagaccacgctttgatccagttggcccacttccaggacctaaccccatcttgccagggcgaggcggccccaatgacagatttccctttagacccagcaggggtcggccaactgatggccggctgtcattcatgtgattgatttgtaatttcatttctggagctccatttgtttttgtttctaaactacagatgtcaactccttggggtgctgatctcgagtgttattttctgattgtggtgttgagagttgcactcccagaaaccttttaagagatacatttatagccctaggggtggtatgacccaaaggttcctctgtgacaaggttggccttgggaatagttggctgccaatctccctgctcttggttctcctctagattgaagtttgttttctgatgctgttcttaccagattaaaaaaaagtgtaaatta

SEQ ID NO: 419797 - DNA, 1924 bp, Homo sapiens
gcgcctaggtacgggctgagtatcaatcggccgaggccgagaggcccggttcctttaggccgcctgcccgcctccagctctcggggtcggctccaggaggcgccctcaggagaggggcgggcgctctattccagagaccgagtggcagggcggccactgtggcggggctctttccccgtttcgcctcagctacccctcagctccggtagtcgccagtccggggtcgtcgccgtttggggcgggagctgctcggccccgccgccgtccccgtcgccgcttccgggtccaggcccctcgggccgcctgccgccgtcatgaggctgcgggtgcggcttctgaagcggacctggccgctggaggtgcccgagacggagccgacgctggggcatttgcgctcgcacctgaggcagtccctgctgtgcacctgggggtacagttctaatacccgatttacaattacattgaactacaaggatcccctcactggagatgaagagaccttggcttcatatgggattgtttctggggacttgatatgtttgattcttcaagatgacattccagcgcctaatataccttcatccacagattcagagcattcttcactccagaataatgagcaaccctctttggccaccagctccaatcagactagcatgcaggatgaacaaccaagtgattcattccaaggacaggcagcccagtctggtgtttggaatgacgacagtatgttagggcctagtcaaaattttgaagctgagtcaattcaagataatgcgcatatggcagagggcacaggtttctatccctcagaacccatgctctgtagtgaatcggtggaagggcaagtgccacattcattagagaccttgtatcaatcagctgactgttctgatgccaatgatgccttgatagtgttgatacatcttctcatgttggagtcaggttacatacctcagggcaccgaagccaaagcactgtccatgccggagaagtggaagttgagcggggtgtataagctgcagtacatgcatcctctctgcgagggcagctccgctactctcacctgtgtgcctttgggaaacctgattgttgtaaatgctacactaaaaatcaacaatgagattagaagtgtgaaaagattgcagctgctaccagaatcttttatttgcaaagagaaactaggggaaaatgtagccaacatatacaaagatcttcagaaactctctcgcctctttaaagaccagctggtgtatcctcttctggcttttacccgacaagcactgaacctaccagatgtatttgggttggtcgtcctcccattggaactgaaactacggatcttccgacttctggatgttcgttccgtcttgtctttgtctgcggtttgtcgtgacctctttactgcttcaaatgacccactcctgtggaggtttttatatctgcgtgattttcgagacaatactgtcagagttcaagacacagattggaaagaactgtacaggaagaggcacatacaaagaaaagaatccccgaaagggcggtttgtgatgctcctgccatcgtcaactcacaccattccattctatcccaaccccttgcaccctaggccatttcctagctcccgccttcctccaggaattatcgggggtgaatatgaccaaagaccaacacttccctatgttggagacccaatcagttcactcattcctggtcctggggagacgcccagccagtttcctccactgagaccacgctttgatccagttggcccacttccaggacctaaccccatcttgccagggagattggcagccaactattcccaaggccaaccttgtcacagaggaacctttgggtcataccacccctagggctataaatgtatctcttaaaaggtttctgggagtgcaactctcaacac

SEQ ID NO: 419798 - DNA, 1425 bp, Homo sapiens
tgcatcctcataggttaggtctcacaagatttggttttccattctagagttacttcacttaaaataatggcctccagctgcatccaagttgctgcaaaagacattatttcattcctttttatggctgagtagtattccatggtgtatatatgccacattttctttatcagtggtttcttggaatggaatctattcctggacaacaaaggatttcgaatattacataaatttagttgacaaaacagaagcaaggtttgagaaggttgactctgattttgaaagttttactgtgggtaaaatgccatcaaacagcatcgcatgtacagagaaatctttcatgaaaggaagagtgagtcaatgtgacaaacttcactgttgtattattttaagaaattgccacagccacttcagcctttagcaaccagcaccctgatctgtcagcagcaacgaacatggaggcaagaccctctattagcaaaaagattgcaacttgctaaaggctcaggtgattgttagcatatttttaaattaaggtatgtacattgtctttttagatataatgctattgcacatttactatagtgtaaacatagcatagcatttatatacactgggaaaccaaaaaaatttgtgtgacttggtttattgcattggtttgggactaaatccacaatatgtctgaggtgtgcctatagatctttactatgaaagcaaattagaactaaagggaaacatccagatcacttaccttatcttgttcttttatttttcttttttctacagctgtacaggaagaggcacatacaaagaaaagaatcccattccattctatcccaaccccttgcaccctaggccatttcctagctcccgccttcctccaggaattatcgggggtgaatatgaccaaagaccaacacttccctatgttggagacccaatcagttcactcattcctggtcctggggagacgcccagccagtttcctccactgagaccacgctttgatccagttggcccacttccaggacctaaccccatcttgccagggcgaggcggccccaatgacagatttccctttagacccagcaggggtcggccaactgatggccggctgtcattcatgtgattgatttgtaatttcatttctggagctccatttgtttttgtttctaaactacagatgtcaactccttggggtgctgatctcgagtgttattttctgattgtggtgttgagagttgcactcccagaaaccttttaagagatacatttatagccctaggggtggtatgacccaaaggttcctctgtgacaaggttggccttgggaatagttggctgccaatctccctgctcttggttctcctctagattgaagtttgttttctgatgctgttcttaccagattaaaaaaaagtgtaaatta

SEQ ID NO: 419799 - DNA, 2654 bp, Homo sapiens
gcgcctaggtacgggctgagtatcaatcggccgaggccgagaggcccggttcctttaggccgcctgcccgcctccagctctcggggtcggctccaggaggcgccctcaggagaggggcgggcgctctattccagagaccgagtggcagggcggccactgtggcggggctctttccccgtttcgcctcagctacccctcagctccggtagtcgccagtccggggtcgtcgccgtttggggcgggagctgctcggccccgccgccgtccccgtcgccgcttccgggtccaggcccctcgggccgcctgccgccgtcatgaggctgcgggtgcggcttctgaagcggacctggccgctggaggtgcccgagacggagccgacgctggggcatttgcgctcgcacctgaggcagtccctgctgtgcacctgggggtacagttctaatacccgatttacaattacattgaactacaaggatcccctcactggagatgaagagaccttggcttcatatgggattgtttctggggacttgatatgtttgattcttcaagatgacattccagcgcctaatataccttcatccacagattcagagcattcttcactccagaataatgagcaaccctctttggccaccagctccaatcagactagcatgcaggatgaacaaccaagtgattcattccaaggacaggcagcccagtctggtgtttggaatgacgacagtatgttagggcctagtcaaaattttgaagctgagtcaattcaagataatgcgcatatggcagagggcacaggtttctatccctcagaacccatgctctgtagtgaatcggtggaagggcaagtgccacattcattagagaccttgtatcaatcagctgactgttctgatgccaatgatgccttgatagtgttgatacatcttctcatgttggagtcaggttacatacctcagggcaccgaagccaaagcactgtccatgccggagaagtggaagttgagcggggtgtataagctgcagtacatgcatcctctctgcgagggcagctccgctactctcacctgtgtgcctttgggaaacctgattgttgtaaatgctacactaaaaatcaacaatgagattagaagtgtgaaaagattgcagctgctaccagaatcttttatttgcaaagagaaactaggggaaaatgtagccaacatatacaaagatcttcagaaactctctcgcctctttaaagaccagctggtgtatcctcttctggcttttacccgacaagcactgaacctaccagatgtatttgggttggtcgtcctcccattggaactgaaactacggatcttccgacttctggatgttcgttccgtcttgtctttgtctgcggtttgtcgtgacctctttactgcttcaaatgacccactcctgtggaggtttttatatctgcgtgattttcgaggtgatttccgtaatgacatattcacaagaaagggctcttattgtcttgattactcagctcaccaaaagtttttagttgtaggatttttctgttgcaaatgattacaataaatagccttaaagagactgactctaagcttcatatacctgtgcctgtgtccctaaaactctctcatttttgtgttttgcacaacacaaatcactcattagactaagaagattatttcaggatagagaaatggaagtaaaacaggcttattttctcactagagaccatagtcagtatctgacgtagaaacgagctggcatttctgaactgctttcatggttgagaccaatgtgtaagttaggagagttttgttgacctgttccaagttgctagggtagctttatttctgtatggtcacattatggtgacctggtaattattttggcagtgatgatggtagaacttgtgcatcaggatttcctgctacaaggccaaaagcctgattgtggaacttttttttctgctaccaccattttactacatattagtgttttcagaatgtttgaccctggggtgggtcatgaaatccatttaatgggtcatgttacaaaaaaacaaaacccacaatggaaaaatccatatttattttataaatagtattcctatttataaaataggagtaaacttctatttcaattatgtataggtaggtgtatactgtgttgcaatgtaaaatttttatgtggttcacataaatgtttgaatgatactgctatatgtgatgttaacacataccaccttagtaactgtaaaaatgtggtgggtagatagctcccttaaaaaaaaaaaaaacaacaaaaagagacaacgatccgagaaagaagaagcaatagggaacgcacacaggagagaccaacacaaccacagcaacacagccaacaacaagagaagaaagggtacacagagcaccaggggaagagcgtcaccaagaacagaacaagacgaagaaaaaacacacgggaaagagcaaaagcgatgtaccaacaacaaagaaaagaagaaagcaaacaaataacacagagaagaaaaaacataccaagacacacacgacaacacaaaagaggaaccaaaacaatgagagaccaagaaaacaaacaggcaccaaacaccgggaaaaaaaaaataacacaaaaaaagaagaagaaaaa

SEQ ID NO: 419800 - DNA, 1450 bp, Homo sapiens
gcgcctaggtacgggctgagtatcaatcggccgaggccgagaggcccggttcctttaggccgcctgcccgcctccagctctcggggtcggctccaggaggcgccctcaggagaggggcgggcgctctattccagagaccgagtggcagggcggccactgtggcggggctctttccccgtttcgcctcagctacccctcagctccggtagtcgccagtccggggtcgtcgccgtttggggcgggagctgctcggccccgccgccgtccccgtcgccgcttccgggtccaggcccctcgggccgcctgccgccgtcatgaggctgcgggtgcggcttctgaagcggacctggccgctggaggtgcccgagacggagccgacgctggggcatttgcgctcgcacctgaggcagtccctgctgtgcacctgggggtacagttctaatacccgatttacaattacattgaactacaaggatcccctcactggagatgaagagaccttggcttcatatgggattgtttctggggacttgatatgtttgattcttcaagatgacattccagcgcctaatataccttcatccacagattcagagcattcttcactccagaataatgagcaaccctctttggccaccagctccaatcagactagcatgcaggatgaacaaccaagtgattcattccaaggacaggcagcccagtctggtgtttggaatgacgacagtatgttagggcctagtcaaaattttgaagctgagtcaattcaagataatgcgcatatggcagagggcacaggtttctatccctcagaacccatgctctgtagtgaatcggtggaagggcaagtgccacattcattagagaccttgtatcaatcagctgactgttctgatgccaatgatgccttgatagtgttgatacatcttctcatgttggagtcaggttacatacctcaggtaagtactgcaagcaaaacacagacatcttatgattgctcatacatgtggatggttcctgctctcaagttgcccgtagtctgagagtggcagagagagacaaaaatataaagcactgtgctatattggtgaagttctgggagaaacatactcatatataggatgccaggaattcatggaggagaacatttagaatattgcttctcaaactttaatgcgctttggaatacctggggaccttattaaaatgcagattctgatttagtaactgtagaatggaccgtgaacttcttcatactcctgcataataccaatgttgctggtctgtgagccatgttataagttacaaagatacagagtagttcggtgatcagtgcacacctgcagcatgccatgcactgacctagaaattaggatataaaaatattgggatatttcttgtcttcaaggagtccatacatagagggagacgatgaataaaaagatactca

SEQ ID NO: 419801 - DNA, 676 bp, Homo sapiens
aacagattgatagctatcaggaaatcttcgtatgtatgaatctctcacaagtcttttctacaactgcagcctatgagctagagaggttgggcacagctctactaatttgatatcatggaatttttagcttttatatctaagattcagtttcatcaagtcttgcactgtacttcttccatgagggaatttggttcatgcttatctttgtgaattatttgtgaatatttattcaccatgttgattgggtttggcagaaatagaggacagttttttcacttgattttgggttttgattttactttaaaaaatattctaggggaaaatgtagccaacatatacaaagatcttcagaaactctctcgcctctttaaagaccagctggtgtatcctcttctggcttttacccgacaaggtaagagatgaaatactgtcacaatttaaatgactgtaaagaatagtaagtatacttaatattcttggtgagtatgacatctgactgccctcttttctgctcctggcgaaatgttcctcttctaagactaagcttaatattccttaagtgctatttactttatctttgtatctccatgccattttgtacatatttttattgtagtctcttttccatggactataattgttgatatgatttctttccacctaaggttgggaatac

SEQ ID NO: 419802 - DNA, 1252 bp, Homo sapiens
cgggcgataggccaagtgcggggacgccgggggggccttcacgggaggcccgggctcttccgggcgtcgcggagccggagggtgcaggcgacgggaagcgcgggtggtcggctggggtccggctcctggagaacatggcccggcctcccgggggctctggtcccctcctcgctacactaaaaatcaacaatgagattagaagtgtgaaaagattgcagctgctaccagaatcttttatttgcaaagagaaactaggggaaaatgtagccaacatatacaaagatcttcagaaactctctcgcctctttaaagaccagctggtgtatcctcttctggcttttacccgacaagcactgaacctaccagatgtatttgggttggtcgtcctcccattggaactgaaactacggatcttccgacttctggatgttcgttccgtcttgtctttgtctgcggtttgtcgtgacctctttactgcttcaaatgacccactcctgtggaggtttttatatctgcgtgattttcgagacaatactgtcagagttcaagacacagattggaaagaactgtacaggaagaggcacatacaaagaaaagaatccccgaaagggcggtttgtgatgctcctgccatcgtcaactcacaccattccattctatcccaaccccttgcaccctaggccatttcctagctcccgccttcctccaggaattatcgggggtgaatatgaccaaagaccaacacttccctatgttggagacccaatcagttcactcattcctggtcctggggagacgcccagccagtttcctccactgagaccacgctttgatccagttggcccacttccaggacctaaccccatcttgccagggcgaggcggccccaatgacagatttccctttagacccagcaggggtcggccaactgatggccggctgtcattcatgtgattgatttgtaatttcatttctggagctccatttgtttttgtttctaaactacagatgtcaactccttggggtgctgatctcgagtgttattttctgattgtggtgttgagagttgcactcccagaaaccttttaagagatacatttatagccctaggggtggtatgacccaaaggttcctctgtgacaaggttggccttgggaatagttggctgccaatctccctgctcttggttctcctctagattgaagtttgttttctgatgctgttcttaccagattaaaaaaaagtgtaaatta

SEQ ID NO: 419803 - DNA, 1698 bp, Homo sapiens
gcgcctaggtacgggctgagtatcaatcggccgaggccgagaggcccggttcctttaggccgcctgcccgcctccagctctcggggtcggctccaggaggcgccctcaggagaggggcgggcgctctattccagagaccgagtggcagggcggccactgtggcggggctctttccccgtttcgcctcagctacccctcagctccggtagtcgccagtccggggtcgtcgccgtttggggcgggagctgctcggccccgccgccgtccccgtcgccgcttccgggtccaggcccctcgggccgcctgccgccgtcatgaggctgcgggtgcggcttctgaagcggacctggccgctggaggtgcccgagacggagccgacgctggggcatttgcgctcgcacctgaggcagtccctgctgtgcacctgggggtacagttctaatacccgatttacaattacattgaactacaaggatcccctcactggagatgaagagaccttggcttcatatgggattgtttctggggacttgatatgtttgattcttcaagatgacattccagcgcctaatataccttcatccacagattcagagcattcttcactccagaataatgagcaaccctctttggccaccagctccaatcagactagcatgcaggatgaacaaccaagtgattcattccaaggacaggcagcccagtctggtgtttggaatgacgacagtatgttagggcctagtcaaaattttgaagctgagtcaattcaagataatgcgcatatggcagagggcacaggtttctatccctcagaacccatgctctgtagtgaatcgggaggcaaatgcacatcataaaactgttcatcaaagatgtgatgcatgatgctgaaggtgtaaccctccaagtgagcggtaatactaagggcacgaacaagctgcggcgcaggacttcggcggaaacgcagcacccgaggacgcaccacgtcacattccagtgaagcaacacacgactgtacaggaagaggcacatacaaagaaaagaatccccgaaagggcggtttgtgatgctcctgccatcgtcaactcacaccattccattctatcccaaccccttgcaccctaggccatttcctagctcccgccttcctccaggaattatcgggggtgaatatgaccaaagaccaacacttccctatgttggagacccaatcagttcactcattcctggtcctggggagacgcccagccagtttcctccactgagaccacgctttgatccagttggcccacttccaggacctaaccccatcttgccagggcgaggcggccccaatgacagatttccctttagacccagcaggggtcggccaactgatggccggctgtcattcatgtgattgatttgtaatttcatttctggagctccatttgtttttgtttctaaactacagatgtcaactccttggggtgctgatctcgagtgttattttctgattgtggtgttgagagttgcactcccagaaaccttttaagagatacatttatagccctaggggtggtatgacccaaaggttcctctgtgacaaggttggccttgggaatagttggctgccaatctccctgctcttggttctcctctagattgaagtttgttttctgatgctgttcttaccagattaaaaaaaagtgtaaatta

SEQ ID NO: 419804 - DNA, 749 bp, Homo sapiens
ccacgcgtccgcggacggcgtgggtcgacccacgcgtcggttcaagacacagattggaaagaactgtacaggaagaggcacatacaaagaaaagaatccccgaaagggcggtttgtgatgctcctgccatcgtcaactcacaccattccattctatcccaaccccttgcaccctaggccatttcctagctcccgccttcctccaggaattatcgggggtgaatatgaccaaagaccaacacttccctatgttggagacccaatcagttcactcattcctggtcctggggagacgcccagccagtttcctccactgagaccacgctttgatccagttggcccacttccaggacctaaccccatcttgccagggcgaggcggccccaatgacagatttccctttagacccagcaggggtcggccaactgatggccggctgtcattcatgtgattgatttgtaatttcatttctggagctccatttgtttttgtttctaaactacagatgtcaactccttggggtgctgatctcgagtgttattttctgattgtggtgttgagagttgcactcccagaaaccttttaagagatacatttatagccctaggggtggtatgacccaaaggttcctctgtgacaaggttggccttgggaatagttggctgccaatctccctgctcttggttctcctctagattgaagtttgttttctgatgctgttcttaccagattaaaaaaaagtgtaaatta

SEQ ID NO: 419805 - DNA, 1679 bp, Homo sapiens
gcgcctaggtacgggctgagtatcaatcggccgaggccgagaggcccggttcctttaggccgcctgcccgcctccagctctcggggtcggctccaggaggcgccctcaggagaggggcgggcgctctattccagagaccgagtggcagggcggccactgtggcggggctctttccccgtttcgcctcagctacccctcagctccggtagtcgccagtccggggtcgtcgccgtttggggcgggagctgctcggccccgccgccgtccccgtcgccgcttccgggtccaggcccctcgggccgcctgccgccgtcatgaggctgcgggtgcggcttctgaagcggacctggccgctggaggtgcccgagacggagccgacgctggggcatttgcgctcgcacctgaggcagtccctgctgtgcacctgggggtacagttctaatacccgatttacaattacattgaactacaaggatcccctcactggagatgaagagaccttggcttcatatgggattgtttctggggacttgatatgtttgattcttcaagatgacattccagcgcctaatataccttcatccacagattcagagcattcttcactccagaataatgagcaaccctctttggccaccagctccaatcagactagcatgcaggatgaacaaccaagtgattcattccaaggacaggcagcccagtctggtgtttggaatgacgacagtatgttagggcctagtcaaaattttgaagctgagtcaattcaagataatgcgcatatggcagagggcacaggtttctatccctcagaacccatgctctgtagtgaatcggtggaagggcaagtgccacattcattagagaccttgtatcaatcagctgactgttctgatgccaatgatgccttgatagtgttgatacatcttctcatgttggagtcaggttacatacctcagggcaccgaagccaaagcactgtccatgccggagaagtggaagttgagcggggtgtataagctgcagtacatgcatcctctctgcgagggcagctccgctactctcacctgtgtgcctttgggaaacctgattgttgtaaatgctacactaaaaatcaacaatgagattagaagtgtgaaaagattgcagctgctaccagaatcttttatttgcaaagagaaactaggggaaaatgtagccaacatatacaaagatcttcagaaactctctcgcctctttaaagaccagctggtgtatcctcttctggcttttacccgacaagacactgaacctaccaggatgtatatagggtaaggaacgaacatcccatatggaaactgaacacctacggatcttccggacttactggactgtaccgttaccgtctatgtcactccgtctcgcgagattagtcgtagagcataatttacgtgattcaaaatgaacccaatcgctgatgagagggtaaataatatacatgggtgatttccgagacaaatagtggtacacaagtacaaagacaacagaattggcacacgcaactgtaccgcgacagacggcacagtacgacagcaacagaaatacccgacaaagggcgaccaggagatggatcctgccaaaatcagcgcagccaccattcccatacataacccaagcgcgttgaacctaagccaatacgag

SEQ ID NO: 419806 - DNA, 2058 bp, Homo sapiens
ggaataagtgacatcatgagtgtgtgccaggtgtctgattacagaaggtgttcaattaatctgcaatcattaattaacccttcagtcgctggtattatttgccatccatcctccgagtgttgccaagttatgggtgcgttctgccagcgtcctagcagtgataaagaacaggaaaaagagaaaaaatcagtgatctgtgtcgagggcaatattgcaagtgggaagacgacatgcctggaattcttctccaacgcgacagacgtcgaggtgttaacggagcctgtgtccaagtggagaaatgtccgtggccacaatcctctgggcctgatgtaccacgatgcctctcgctggggtcttacgctacagacttatgtgcagctcaccatgctggacaggcatactcgtcctcaggtgtcatctgtacggttgatggagaggtcgattcacagcgcaagatacatttttgtagaaaacctgtatagaagtgggaagatgccagaagtggactatgtagttctgtcggaatggtttgactggatcttgaggaacatggacgtgtctgttgatttgatagtttaccttcggaccaatcctgagacttgttaccagaggttaaagaagagatgcagggaagaggagaaggtcattccgctggaatacctggaagcaattcaccatctccatgaggagtggctcatcaaaggcagccttttccccatggcagcccctgttctggtgattgaggctgaccaccacatggagaggatgttagaactctttgaacaaaatcgggatcgaatattaactccagagaatcggaagcattgcccataggaggcaaaaggtctatggctcatgtctgaaaaatgcctgctgctgccaagttagctattgggagcaatctggaaaaacttgctcccaggagggctttgtgtctggccagcttgattttcctaatggtctcatctcctttgctagtgtctttgtcatgcgtctctggccctcgtgggtaaatgacaaacgggaccaatgggtttgccaagccctttgctgttcgcagcctcacattcccccggtgcctctcccatggctttgtgctgctgagtcgctctcatgaagcccttagggagagcacctgttgtgtgcctgacaccacgctggagctgtgtaccaatcgtctcagccttcattaggaggccgaggtaggagtcttatatcccaggtgaggaatttgaagctcagaaaggttgaggggctccccagaggtcacacagcctgtgtgcagtggagctggcaccattcagactttcagccgactcagcaactttcccttgccctgggctgcctcctcctgagagctgttccccaccgccctgcctcttccggttggaggctctcatgtctctttggggagagctggcagtgtgcggagctgataacattttcccaatattgagcagttcccaaggacagtcagcatttctagacttccacaaaattatgctgcatttggctggagcccggtgttcagtggtttccctgcccgaggtcgctgcagccccatctaccacatcttcatgtggacattgagattcacatgctggctcctgaagggtgctcagtctccttggtgattaaggtcctgcttgaactgctgccaactccatgtcagggaagtcgcttttggtgcctggctggtttgcccagagccaagctggggcaaggggcagccagccctggcttccaaggctcccgtactgtctgtgtccttgtataaggagctttgctcttggaattactgaaagtctgtggcccaagagagagacacaagtggccttaagtctttttgaagtgttatttcatccagggaaatgcctcgagccatagagcctgaaatcatctttgttggctcagaaaataccttagcttcactcagctggactgcattgaaggcgaggctgccccttggatcaagcagaaaacaagagaaagaaagaacgttccctttggggatagtctggaaagttgggatttgcaaataaaggctctggaagcatt

SEQ ID NO: 419807 - DNA, 3300 bp, Homo sapiens
ggaataagtgacatcatgagtgtgtgccaggtgtctgattacagaaggtgttcaattaatctgcaatcattaattaacccttcagtcgctggtattatttgccatccatcctccgagtgttgccaagttatgggtgcgttctgccagcgtcctagcagtggtaaggcttctggctgccagcggcgaacctctcccttcgagtatttctcctcttgctgagatgaaatgcgaccgggtctctttaagggccaggcgccgggatccaggcggcgcccaacggctggactagcagtcgtccgcgccgactcgcacaagaaggaaccccgggcctctggatccgctcgcccggctatgctgctgtggccgctgcggggctgggccgcccgggcgctgcgctgctttgggccgggaagtcgcgggagcccggcctcaggccccgggccgcggagggtgcagcgccgggcctggcctcccggtaacgcgcgtcttggtcccgcctcccaggagcccctatgcgcccacctactcccggcccctcggcttccggaacccgcccgagcccgaagcgcctcttccgaggcgcgggatttcctccccggctgcggctgggacgggggcggccatcggccgttacccgggcgcgagaccgcagcgagcgctgggggcgctcggctttggttctgggatggagagagggcctttaaagagcaggacggacacgctctgaacattccggcccaaactcggtcccccgacccatttcctgtcccgattctttcgaccttgggggcgatggggactgggagctgccttaagccgattctgctcacactctggtgccagcgtgggggaggggggttacgccccggcgctctcctgccctccctgggagtggggacccacacagaaacgggtcactgttacacccgggttctggtgtccgccatatggctgttgagagacgcctcagaaccacctgtgggacggatgggcagcgatgcccgccctgggcctagaggaacacctgggtcccaggcccaaaaccacgtccgccgcccactcttccccgtgcaccgcgagtggaggctgttctgcctttccacttgcttaacatccagtctgtgaagatctaaataaataacgtggaaaatgcaaagtataatgtactaagtgaaagaactcgagcacactgggggtccacgaagctgcagctgcagcccagggtggcacatcggcgagacggtggtgcgcgcctccaatctcggagggcgcccaaaatggaaaatgtttttaggccagggagtgagcataaacattagtgtttttgtggtcatgtagcaaattagggcagaggagagttatttaaaagtgagtttaaaaactgatttcctttcttttgtagataaagaacaggaaaaagagaaaaaatcagtgatctgtgtcgagggcaatattgcaagtgggaagacgacatgcctggaattcttctccaacgcgacagacgtcgaggtgttaacggagcctgtgtccaagtggagaaatgtccgtggccacaatcctctgggcctgatgtaccacgatgcctctcgctggggtcttacgctacagacttatgtgcagctcaccatgctggacaggcatactcgtcctcaggtgtcatctgtacggttgatggagaggtcgattcacagcgcaagatacatttttgtagaaaacctgtatagaagtgggaagatgccagaagtggactatgtagttctgtcggaatggtttgactggatcttgaggaacatggacgtgtctgttgatttgatagtttaccttcggaccaatcctgagacttgttaccagaggttaaagaagagatgcagggaagaggagaaggtcattccgctggaatacctggaagcaattcaccatctccatgaggagtggctcatcaaaggcagccttttccccatggcagcccctgttctggtgattgaggctgaccaccacatggagaggatgttagaactctttgaacaaaatcgggatcgaatattaactccagagaatcggaagcattgcccataggaggcaaaaggtctatggctcatgtctgaaaaatgcctgctgctgccaagttagctattgggagcaatctggaaaaacttgctcccaggagggctttgtgtctggccagcttgattttcctaatggtctcatctcctttgctagtgtctttgtcatgcgtctctggccctcgtgggtaaatgacaaacgggaccaatgggtttgccaagccctttgctgttcgcagcctcacattcccccggtgcctctcccatggctttgtgctgctgagtcgctctcatgaagcccttagggagagcacctgttgtgtgcctgacaccacgctggagctgtgtaccaatcgtctcagccttcattaggaggccgaggtaggagtcttatatcccaggtgaggaatttgaagctcagaaaggttgaggggctccccagaggtcacacagcctgtgtgcagtggagctggcaccattcagactttcagccgactcagcaactttcccttgccctgggctgcctcctcctgagagctgttccccaccgccctgcctcttccggttggaggctctcatgtctctttggggagagctggcagtgtgcggagctgataacattttcccaatattgagcagttcccaaggacagtcagcatttctagacttccacaaaattatgctgcatttggctggagcccggtgttcagtggtttccctgcccgaggtcgctgcagccccatctaccacatcttcatgtggacattgagattcacatgctggctcctgaagggtgctcagtctccttggtgattaaggtcctgcttgaactgctgccaactccatgtcagggaagtcgcttttggtgcctggctggtttgcccagagccaagctggggcaaggggcagccagccctggcttccaaggctcccgtactgtctgtgtccttgtataaggagctttgctcttggaattactgaaagtctgtggcccaagagagagacacaagtggccttaagtctttttgaagtgttatttcatccagggaaatgcctcgagccatagagcctgaaatcatctttgttggctcagaaaataccttagcttcactcagctggactgcattgaaggcgaggctgccccttggatcaagcagaaaacaagagaaagaaagaacgttccctttggggatagtctggaaagttgggatttgcaaataaaggctctggaagcatt

SEQ ID NO: 419808 - DNA, 3604 bp, Homo sapiens
ggaataagtgacatcatgagtgtgtgccaggtgtctgattacagaaggtgttcaattaatctgcaatcattaattaacccttcagtcgctggtattatttgccatccatcctccgagtgttgccaagttatgggtgcgttctgccagcgtcctagcagtggtaaggcttctggctgccagcggcgaacctctcccttcgagtatttctcctcttgctgagatgaaatgcgaccgggtctctttaagggccaggcgccgggatccaggcggcgcccaacggctggactagcagtcgtccgcgccgactcgcacaagaaggaaccccgggcctctggatccgctcgcccggctatgctgctgtggccgctgcggggctgggccgcccgggcgctgcgctgctttgggccgggaagtcgcgggagcccggcctcaggccccgggccgcggagggtgcagcgccgggcctggcctcccgataaagaacaggaaaaagagaaaaaatcagtgatctgtgtcgagggcaatattgcaagtgggaagacgacatgcctggaattcttctccaacgcgacagacgtcgaggtgttaacggagcctgtgtccaagtggagaaatgtccgtggccacaatcctctgggcctgatgtaccacgatgcctctcgctggggtcttacgctacagacttatgtgcagctcaccatgctggacaggcatactcgtcctcaggtgtcatctgtacggttgatggagaggtcgattcacagcgcaagatacatttttgtagaaaacctgtatagaagtgggaagatgccagaagtggactatgtagttctgtcggaatggtttgactggatcttgaggaacatggacgtgtctgttgatttgatagtttaccttcggaccaatcctgagacttgttaccagaggttaaagaagagatgcagggaagaggagaaggtcattccgctggaatacctggaagcaattcaccatctccatgaggagtggctcatcaaaggcagccttttccccatggcagcccctgttctggtgattgaggctgaccaccacatggagaggatgttagaactctttgaacaaaatcgggatcgaatattaactccagagaatcggaagcattgcccataggaggcaaaaggtctatggctcatgtctgaaaaatgcctgctgctgccaagttagctattgggagcaatctggaaaaacttgctcccaggagggctttgtgtctggccagcttgattttcctaatggtctcatctcctttgctagtgtctttgtcatgcgtctctggccctcgtgggtaaatgacaaacgggaccaatgggtttgccaagccctttgctgttcgcagcctcacattcccccggtgcctctcccatggctttgtgctgctgagtcgctctcatgaagcccttagggagagcacctgttgtgtgcctgacaccacgctggagctgtgtaccaatcgtctcagccttcattaggaggccgaggtaggagtcttatatcccaggtgaggaatttgaagctcagaaaggttgaggggctccccagaggtcacacagcctgtgtgcagtggagctggcaccattcagactttcagccgactcagcaactttcccttgccctgggctgcctcctcctgagagctgttccccaccgccctgcctcttccggttggaggctctcatgtctctttggggagagctggcagtgtgcggagctgataacattttcccaatattgagcagttcccaaggacagtcagcatttctagacttccacaaaattatgctgcatttggctggagcccggtgttcagtggtttccctgcccgaggtcgctgcagccccatctaccacatcttcatgtggacattgagattcacatgctggctcctgaagggtgctcagtctccttggtgattaaggtcctgctgggcagccagccctggcttccaaggctcccgtactgtctgtgtccttgtataaggagctttgctcttggaattactgaaagtctgtggcccaagagagagacacaagtggccttaagtctttttgaagtgttatttcatccagggaaatgcctcgagccatagagcctgaaatcatctttgttggctcagaaaataccttagcttcactcagctggactgcattgaaggcgaggctgccccttggatcaagcagaaaacaagagaaagaaagaacgttccctttggggatagtctggaaagttgggatttgcaaataaaggctctggaagcattgctggtcctgaagctttggaggtgggcagagagagcttcaagaagactagatgcaaaccctggaaaggattaaggctcaactctggagaaacaggccacagcctctcagagcagctgttggctgtaaatagaggtagcaaggccgctcccaggcccctgtgagtgtgggcacctgtgcatgcaatgctccgactctgcagaggtgccaagtgcccctgctgggccagtcccagagagttaggaagtcaaggcctgcaactcctggttcttcctgtttggaccagttcttgtgccattggcaggatgagaggcagcagccaggcgggagctgtgtctagcagcacctgtagcccacgtgctgctaattagctggaaaactggcgaaggcagaacctttgctaccaggaatcttgacatgtggggtctgtctttgagaatttgtaaatgaacagtccaatatttcctctcggctcattttgcacatccatttttggggaaatgtgatttctctctctttttttttttttttttttgcctaaggcacaatctcaagaggtcctgagaccacgtacccatgatttttttcttgctctgtgatacccaataactccttcacctaagccctgttgttgattttgaagtgcttcctaggccagtgattttagcttctgccagctgcttttgccagtagattaacgtgtttttatttttcaaactccgtgtttcctaacgtggagtgtatgggtctaagagagcctgctgtcctccctgccttccaccttggagaggaggctggacgcatcagcagtggccagggcaggtcgcaaaatctcccagcctagagaccacacctgaaacggctgaagccagcttgcacaagggctgctgtccctctgcggcaggcagagctggtgggggcaggggtcacagagcagtcatagacaccatggaccagggcaggagaagggcagatggcacatgggcacaacagggccttgtccttagagcactggggggtcatggctgggaggggcatggcaggggctggcatccctgtagagccagaggggccacccagggcagtgacattccagatatgttgggctcacctcatccttgctgtgagactggagttccatggggacatgaagtcagtacaccgcagagctgctcagctgctctacctctcgctgacttttttgttgcacatatacattttctttcaattagcatttatttcagcttttatttaagctttttgacagtacatgtaaaatatatgattataaccatttaaaaataaattat

SEQ ID NO: 419809 - DNA, 3627 bp, Homo sapiens
ggaataagtgacatcatgagtgtgtgccaggtgtctgattacagaaggtgttcaattaatctgcaatcattaattaacccttcagtcgctggtattatttgccatccatcctccgagtgttgccaagttatgggtgcgttctgccagcgtcctagcagtggtaaggcttctggctgccagcggcgaacctctcccttcgagtatttctcctcttgctgagatgaaatgcgaccgggtctctttaagggccaggcgccgggatccaggcggcgcccaacggctggactagcagtcgtccgcgccgactcgcacaagaaggaaccccgggcctctggatccgctcgcccggctatgctgctgtggccgctgcggggctgggccgcccgggcgctgcgctgctttgggccgggaagtcgcgggagcccggcctcaggccccgggccgcggagggtgcagcgccgggcctggcctcccgataaagaacaggaaaaagagaaaaaatcagtgatctgtgtcgagggcaatattgcaagtgggaagacgacatgcctggaattcttctccaacgcgacagacgtcgaggtgttaacggagcctgtgtccaagtggagaaatgtccgtggccacaatcctctgggcctgatgtaccacgatgcctctcgctggggtcttacgctacagacttatgtgcagctcaccatgctggacaggcatactcgtcctcaggtgtcatctgtacggttgatggagaggtcgattcacagcgcaagatacatttttgtagaaaacctgtatagaagtgggaagatgccagaagtggactatgtagttctgtcggaatggtttgactggatcttgaggaacatggacgtgtctgttgatttgatagtttaccttcggaccaatcctgagacttgttaccagaggttaaagaagagatgcagggaagaggagaaggtcattccgctggaatacctggaagcaattcaccatctccatgaggagtggctcatcaaaggcagccttttccccatggcagcccctgttctggtgattgaggctgaccaccacatggagaggatgttagaactctttgaacaaaatcgggatcgaatattaactccagagaatcggaagcattgcccataggaggcaaaaggtctatggctcatgtctgaaaaatgcctgctgctgccaagttagctattgggagcaatctggaaaaacttgctcccaggagggctttgtgtctggccagcttgattttcctaatggtctcatctcctttgctagtgtctttgtcatgcgtctctggccctcgtgggtaaatgacaaacgggaccaatgggtttgccaagccctttgctgttcgcagcctcacattcccccggtgcctctcccatggctttgtgctgctgagtcgctctcatgaagcccttagggagagcacctgttgtgtgcctgacaccacgctggagctgtgtaccaatcgtctcagccttcattaggaggccgaggtaggagtcttatatcccaggtgaggaatttgaagctcagaaaggttgaggggctccccagaggtcacacagcctgtgtgcagtggagctggcaccattcagactttcagccgactcagcaactttcccttgccctgggctgcctcctcctgagagctgttccccaccgccctgcctcttccggttggaggctctcatgtctctttggggagagctggcagtgtgcggagctgataacattttcccaatattgagcagttcccaaggacagtcagcatttctagacttccacgtcgctgcagccccatctaccacatcttcatgtggacattgagattcacatgctggctcctgaagggtgctcagtctccttggtgattaaggtcctgcttgaactgctgccaactccatgtcagggaagtcgcttttggtgcctggctggtttgcccagagccaagctggggcaaggggcagccagccctggcttccaaggctcccgtactgtctgtgtccttgtataaggagctttgctcttggaattactgaaagtctgtggcccaagagagagacacaagtggccttaagtctttttgaagtgttatttcatccagggaaatgcctcgagccatagagcctgaaatcatctttgttggctcagaaaataccttagcttcactcagctggactgcattgaaggcgaggctgccccttggatcaagcagaaaacaagagaaagaaagaacgttccctttggggatagtctggaaagttgggatttgcaaataaaggctctggaagcattgctggtcctgaagctttggaggtgggcagagagagcttcaagaagactagatgcaaaccctggaaaggattaaggctcaactctggagaaacaggccacagcctctcagagcagctgttggctgtaaatagaggtagcaaggccgctcccaggcccctgtgagtgtgggcacctgtgcatgcaatgctccgactctgcagaggtgccaagtgcccctgctgggccagtcccagagagttaggaagtcaaggcctgcaactcctggttcttcctgtttggaccagttcttgtgccattggcaggatgagaggcagcagccaggcgggagctgtgtctagcagcacctgtagcccacgtgctgctaattagctggaaaactggcgaaggcagaacctttgctaccaggaatcttgacatgtggggtctgtctttgagaatttgtaaatgaacagtccaatatttcctctcggctcattttgcacatccatttttggggaaatgtgatttctctctctttttttttttttttttttgcctaaggcacaatctcaagaggtcctgagaccacgtacccatgatttttttcttgctctgtgatacccaataactccttcacctaagccctgttgttgattttgaagtgcttcctaggccagtgattttagcttctgccagctgcttttgccagtagattaacgtgtttttatttttcaaactccgtgtttcctaacgtggagtgtatgggtctaagagagcctgctgtcctccctgccttccaccttggagaggaggctggacgcatcagcagtggccagggcaggtcgcaaaatctcccagcctagagaccacacctgaaacggctgaagccagcttgcacaagggctgctgtccctctgcggcaggcagagctggtgggggcaggggtcacagagcagtcatagacaccatggaccagggcaggagaagggcagatggcacatgggcacaacagggccttgtccttagagcactggggggtcatggctgggaggggcatggcaggggctggcatccctgtagagccagaggggccacccagggcagtgacattccagatatgttgggctcacctcatccttgctgtgagactggagttccatggggacatgaagtcagtacaccgcagagctgctcagctgctctacctctcgctgacttttttgttgcacatatacattttctttcaattagcatttatttcagcttttatttaagctttttgacagtacatgtaaaatatatgattataaccatttaaaaataaattat

SEQ ID NO: 419810 - DNA, 3626 bp, Homo sapiens
ggaataagtgacatcatgagtgtgtgccaggtgtctgattacagaaggtgttcaattaatctgcaatcattaattaacccttcagtcgctggtattatttgccatccatcctccgagtgttgccaagttatgggtgcgttctgccagcgtcctagcagtggtaaggcttctggctgccagcggcgaacctctcccttcgagtatttctcctcttgctgagatgaaatgcgaccgggtctctttaagggccaggcgccgggatccaggcggcgcccaacggctggactagcagtcgtccgcgccgactcgcacaagaaggaaccccgggcctctggatccgctcgcccggctatgctgctgtggccgctgcggggctgggccgcccgggcgctgcgctgctttgggccgggaagtcgcgggagcccggcctcaggccccgggccgcggagggtgcagcgccgggcctggcctcccgataaagaacaggaaaaagagaaaaaatcagtgatctgtgtcgagggcaatattgcaagtgggaagacgacatgcctggaattcttctccaacgcgacagacgtcgaggtgttaacggagcctgtgtccaagtggagaaatgtccgtggccacaatcctctgggcctgatgtaccacgatgcctctcgctggggtcttacgctacagacttatgtgcagctcaccatgctggacaggcatactcgtcctcaggtgtcatctgtacggttgatggagaggtcgattcacagcgcaagatacatttttgtagaaaacctgtatagaagtgggaagatgccagaagtggactatgtagttctgtcggaatggtttgactggatcttgaggaacatggacgtgtctgttgatttgatagtttaccttcggaccaatcctgagacttgttaccagaggttaaagaagagatgcagggaagaggagaaggtcattccgctggaatacctggaagcaattcaccatctccatgaggagtggctcatcaaaggcagccttttccccatggcagcccctgttctggtgattgaggctgaccaccacatggagaggatgttagaactctttgaacaaaatcgggatcgaatattaactccagagaatcggaagcattgcccataggaggcaaaaggtctatggctcatgtctgaaaaatgcctgctgctgccaagttagctattgggagcaatctggaaaaacttgctcccaggagggctttgtgtctggccagcttgattttcctaatggtctcatctcctttgctagtgtctttgtcatgcgtctctggccctcgtgggtaaatgacaaacgggaccaatgggtttgccaagccctttgctgttcgcagcctcacattcccccggtgcctctcccatggctttgtgctgctgagtcgctctcatgaagcccttagggagagcacctgttgtgtgcctgacaccacgctggagctgtgtaccaatcgtctcagccttcattaggaggccgaggtaggagtcttatatcccaggtgaggaatttgaagctcagaaaggttgaggggctccccagaggtcacacagcctgtgtgcagtggagctggcaccattcagactttcagccgactcagcaactttcccttgccctgggctgcctcctcctgagagctgttccccaccgccctgcctcttccggttggaggctctcatgtctctttggggagagctggcagtgtgcggagctgataacattttcccaatattgagcagttcccaaggacagtcagcatttctagacttccacaaaattatgctgcatttggctggagcccggtgttcagtggtttccctgcccgaggtcgctgcagccccatctaccacatcttcatgtggacattgagattcacatgctggctcctgaagggtgctcagtctccttggtgattaaggtcctgcttgaactgctgccaactccatgtcagggaagtcgcttttggtgcctggctggtttgcccagagccaagctggggcaaggggcagccagccctggcttccaaggctcccgtactgtctgtgtccttgtataaggagctttgctcttggaattactgaaagtctgtggcccaagagagagacacaagtggccttaagtctttttgaagtgttatttcatccagggaaatgcctcgagccatagagcctgaaatcatctttgttggctcagaaaataccttagcttcactcagctggactgcattgaaggcgaggctgccccttggatcaagcagaaaacaagagaaagaaagaacgttccctttggggatagtctggaaagttgggatttgcaaataaaggctctggaagcattgctggtcctgaagctttggaggtgggcagagagagcttcaagaagactagatgcaaaccctggaaaggattaaggctcaactctggagaaacaggccacagcctctcagagcagctgttggctgtaaatagaggtagcaaggccgctcccaggcccctgtgagtgtgggcacctgtgcatgcaatgctccgactctgcagaggtgccaagtgcccctgctgggccagtcccagagagttaggaagtcaaggcctgcaactcctggttcttcctgtttggaccagttcttgtgccattggcaggatgagaggcagcagccaggcgggagctgtgtctagcagcacctgtagcccacgtgctgctaattagctggaaaactggcgaaggcagaacctttgctaccaggaatcttgacatgtggggtctgtctttgagaatttgtaaatgaacagtccaatatttcctctcggctcattttgcacatccatttttggggaaatgtgatttctctctctttttttttttttttttttgcctaaggcacaatctcaagaggtcctgagaccacgtacccatgatttttttcttgctctgtgatacccaataactccttcacctaagccctgttgttgattttgaagtgcttcctaggccagtgattttagcttctgccagctgcttttgccagtagattaacgtgtttttatttttcaaactccgtgtttcctaacgtggagtgtatgggtctaagagagcctgctgtcctccctgccttccaccttggagaggaggctggacgcatcagcagtggccagggcaggtcgcagctgctgtccctctgcggcaggcagagctggtgggggcaggggtcacagagcagtcatagacaccatggaccagggcaggagaagggcagatggcacatgggcacaacagggccttgtccttagagcactggggggtcatggctgggaggggcatggcaggggctggcatccctgtagagccagaggggccacccagggcagtgacattccagatatgttgggctcacctcatccttgctgtgagactggagttccatggggacatgaagtcagtacaccgcagagctgctcagctgctctacctctcgctgacttttttgttgcacatatacattttctttcaattagcatttatttcagcttttatttaagctttttgacagtacatgtaaaatatatgattataaccatttaaaaataaattat

SEQ ID NO: 419811 - DNA, 2800 bp, Homo sapiens
ggaataagtgacatcatgagtgtgtgccaggtgtctgattacagaaggtgttcaattaatctgcaatcattaattaacccttcagtcgctggtattatttgccatccatcctccgagtgttgccaagttatgggtgcgttctgccagcgtcctagcagtggtaaggcttctggctgccagcggcgaacctctcccttcgagtatttctcctcttgctgagatgaaatgcgaccgggtctctttaagggccaggcgccgggatccaggcggcgcccaacggctggactagcagtcgtccgcgccgactcgcacaagaaggaaccccgggcctctggatccgctcgcccggctatgctgctgtggccgctgcggggctgggccgcccgggcgctgcgctgctttgggccgggaagtcgcgggagcccggcctcaggccccgggccgcggagggtgcagcgccgggcctggcctcccgataaagaacaggaaaaagagaaaaaatcagtgatctgtgtcgagggcaatattgcaagtgggaagacgacatgcctggaattcttctccaacgcgacagacgtcgaggtgttaacggagcctgtgtccaagtggagaaatgtccgtggccacaatcctctgggcctgatgtaccacgatgcctctcgctggggtcttacgctacagacttatgtgcagctcaccatgctggacaggcatactcgtcctcaggtgtcatctgtacggttgatggagaggtcgattcacagcgcaagatacatttttgtagaaaacctgtatagaagtgggaagatgccagaagtggactatgtagttctgtcggaatggtttgactggatcttgaggaacatggacgtgtctgttgatttgatagtttaccttcggaccaatcctgagacttgttaccagaggttaaagaagagatgcagggaagaggagaaggtcattccgctggaatacctggaagcaattcaccatctccatgaggagtggctcatcaaaggcagccttttccccatggcagcccctgttctggtgattgaggctgaccaccacatggagaggatgttagaactctttgaacaaaatcgggatcgaatattaactccagagaatcggaagcattgcccataggaggcaaaaggtctatggctcatgtctgaaaaatgcctgctgctgccaagttagctattgggagcaatctggaaaaacttgctcccaggagggctttgtgtctggccagcttgattttcctaatggtctcatctcctttgctagtgtctttgtcatgcgtctctggccctcgtgggtaaatgacaaacgggaccaatgggtttgccaagccctttgctgttcgcagcctcacattcccccggtgcctctcccatggctttgtgctgctgagtcgctctcatgaagcccttagggagagcacctgttgtgtgcctgacaccacgctggagctgtgtaccaatcgtctcagccttcattaggaggccgaggtaggagtcttatatcccaggtgaggaatttgaagctcagaaaggttgaggggctccccagaggtcacacagcctgtgtgcagtggagctggcaccattcagactttcagccgactcagcaactttcccttgccctgggctgcctcctcctgagagctgttccccaccgccctgcctcttccggttggaggctctcatgtctctttggggagagctggcagtgtgcggagctgataacattttcccaatattgagcagttcccaaggacagtcagcatttctagacttccacaaaattatgctgcatttggctggagcccggtgttcagtggtttccctgcccgaggtcgctgcagccccatctaccacatcttcatgtggacattgagattcacatgctggctcctgaagggtgctcagtctccttggtgattaaggtcctgcttgaactgctgccaactccatgtcagggaagtcgcttttggtgcctggctggtttgcccagagccaagctggggcaaggggcagccagccctggcttccaaggctcccgtactgtctgtgtccttgtataaggagctttgctcttggaattactgaaagtctgtggcccaagagagagacacaagtggccttaagtctttttgaagtgttatttcatccagggaaatgcctcgagccatagagcctgaaatcatctttgttggctcagaaaataccttagcttcactcagctggactgcattgaaggcgaggctgccccttggatcaagcagaaaacaagagaaagaaagaacgttccctttggggatagtctggaaagttgggatttgcaaataaaggctctggaagcattgctggtcctgaagctttggaggtgggcagagagagcttcaagaagactagatgcaaaccctggaaaggattaaggctcaactctggagaaacaggccacagcctctcagagcagctgttggctgtaaatagaggtagcaaggccgctcccaggcccctgtgagtgtgggcacctgtagagccagaggggccacccagggcagtgacattccagatatgttgggctcacctcatccttgctgtgagactggagttccatggggacatgaagtcagtacaccgcagagctgctcagctgctctacctctcgctgacttttttgttgcacatatacattttctttcaattagcatttatttcagcttttatttaagctttttgacagtacatgtaaaatatatgattataaccatttaaaaataaattat

SEQ ID NO: 419812 - DNA, 2296 bp, Homo sapiens
ggaataagtgacatcatgagtgtgtgccaggtgtctgattacagaaggtgttcaattaatctgcaatcattaattaacccttcagtcgctggtattatttgccatccatcctccgagtgttgccaagttatgggtgcgttctgccagcgtcctagcagtggtaaggcttctggctgccagcggcgaacctctcccttcgagtatttctcctcttgctgagatgaaatgcgaccgggtctctttaagggccaggcgccgggatccaggcggcgcccaacggctggactagcagtcgtccgcgccgactcgcacaagaaggaaccccgggcctctggatccgctcgcccggctatgctgctgtggccgctgcggggctgggccgcccgggcgctgcgctgctttgggccgggaagtcgcgggagcccggcctcaggccccgggccgcggagggtgcagcgccgggcctggcctcccgataaagaacaggaaaaagagaaaaaatcagtgatctgtgtcgagggcaatattgcaagtgggaagacgacatgcctggaattcttctccaacgcgacagacgtcgaggtgttaacggagcctgtgtccaagtggagaaatgtccgtggccacaatcctctgggcctgatgtaccacgatgcctctcgctggggtcttacgctacagacttatgtgcagctcaccatgctggacaggcatactcgtcctcaggtgtcatctgtacggttgatggagaggtcgattcacagcgcaagatacatttttgtagaaaacctgtatagaagtgggaagatgccagaagtggactatgtagttctgtcggaatggtttgactggatcttgaggaacatggacgtgtctgttgatttgatagtttaccttcggaccaatcctgagacttgttaccagaggttaaagaagagatgcagggaagaggagaaggtcattccgctggaatacctggaagcaattcaccatctccatgaggagtggctcatcaaaggcagccttttccccatggcagcccctgttctggtgattgaggctgaccaccacatggagaggatgttagaactctttgaacaaaatcgggatcgaatattaactccagagaatcggaagcattgcccataggaggcaaaaggtctatggctcatgtctgaaaaatgcctgctgctgccaagttagctattgggagcaatctggaaaaacttgctcccaggagggctttgtgtctggccagcttgattttcctaatggtctcatctcctttgctagtgtctttgtcatgcgtctctggccctcgtgggtaaatgacaaacgggaccaatgggtttgccaagccctttgctgttcgcagcctcacattcccccggtgcctctcccatggctttgtgctgctgagtcgctctcatgaagcccttagggagagcacctgttgtgtgcctgacaccacgctggagctgtgtaccaatcgtctcagccttcattaggaggccgaggtaggagtcttatatcccaggtgaggaatttgaagctcagaaaggttgaggggctccccagaggtcacacagcctgtgtgcagtggagctggcaccattcagactttcagccgactcagcaactttcccttgccctgggctgcctcctcctgagagctgttccccaccgccctgcctcttccggttggaggctctcatgtctctttggggagagctggcagtgtgcggagctgataacattttcccaatattgagcagttcccaaggacagtcagcatttctagacttccacaaaattatgctgcatttggctggagcccggtgttcagtggtttccctgcccgaggtcgctgcagccccatctaccacatcttcatgtggacattgagattcacatgctggctcctgaagggtgctcagtctccttggtgattaaggtcctgctgggcagccagccctggcttccaaggctcccgtactgtctgtgtccttgtataaggagctttgctcttggaattactgaaagtctgtggcccaagagagagacacaagtggccttaagtctttttgaagtgttatttcatccagggaaatgcctcgagccatagagcctgaaatcatctttgttggctcagaaaataccttagcttcactcagctggactgcattgaaggcgaggctgccccttggatcaagcagaaaacaagagaaagaaagaacgttccctttggggatagtctggaaagttgggatttgcaaataaaggctctggaagcatt

SEQ ID NO: 419813 - DNA, 1923 bp, Homo sapiens
gtacagaggtacgcgtggccccccgataaagaacaggaaaaagagaaaaaatcagtgatctgtgtcgagggcaatattgcaagtgggaagacgacatgcctggaattcttctccaacgcgacagacgtcgaggtgttaacggagcctgtgtccaagtggagaaatgtccgtggccacaatcctctgggcctgatgtaccacgatgcctctcgctggggtcttacgctacagacttatgtgcagctcaccatgctggacaggcatactcgtcctcaggtgtcatctgtacggttgatggagaggtcgattcacagcgcaagatacatttttgtagaaaacctgtatagaagtgggaagatgccagaagtggactatgtagttctgtcggaatggtttgactggatcttgaggaacatggacgtgtctgttgatttgatagtttaccttcggaccaatcctgagacttgttaccagaggttaaagaagagatgcagggaagaggagaaggtcattccgctggaatacctggaagcaattcaccatctccatgaggagtggctcatcaaaggcagccttttccccatggcagcccctgttctggtgattgaggctgaccaccacatggagaggatgttagaactctttgaacaaaatcgggatcgaatattaactccagagaatcggaagcattgcccataggaggcaaaaggtctatggctcatgtctgaaaaatgcctgctgctgccaagttagctattgggagcaatctggaaaaacttgctcccaggagggctttgtgtctggccagcttgattttcctaatggtctcatctcctttgctagtgtctttgtcatgcgtctctggccctcgtgggtaaatgacaaacgggaccaatgggtttgccaagccctttgctgttcgcagcctcacattcccccggtgcctctcccatggctttgtgctgctgagtcgctctcatgaagcccttagggagagcacctgttgtgtgcctgacaccacgctggagctgtgtaccaatcgtctcagccttcattaggaggccgaggtaggagtcttatatcccaggtgaggaatttgaagctcagaaaggttgaggggctccccagaggtcacacagcctgtgtgcagtggagctggcaccattcagactttcagccgactcagcaactttcccttgccctgggctgcctcctcctgagagctgttccccaccgccctgcctcttccggttggaggctctcatgtctctttggggagagctggcagtgtgcggagctgataacattttcccaatattgagcagttcccaaggacagtcagcatttctagacttccacaaaattatgctgcatttggctggagcccggtgttcagtggtttccctgcccgaggtcgctgcagccccatctaccacatcttcatgtggacattgagattcacatgctggctcctgaagggtgctcagtctccttggtgattaaggtcctgcttgaactgctgccaactccatgtcagggaagtcgcttttggtgcctggctggtttgcccagagccaagctggggcaaggggcagccagccctggcttccaaggctcccgtactgtctgtgtccttgtataaggagctttgctcttggaattactgaaagtctgtggcccaagagagagacacaagtggccttaagtctttttgaagtgttatttcatccagggaaatgcctcgagccatagagcctgaaatcatctttgttggctcagaaaataccttagcttcactcagctggactgcattgaaggcgaggctgccccttggatcaagcagaaaacaagagaaagaaagaacgttccctttggggatagtctggaaagttgggatttgcaaataaaggctctggaagcatt

SEQ ID NO: 419814 - DNA, 3681 bp, Homo sapiens
ggaataagtgacatcatgagtgtgtgccaggtgtctgattacagaaggtgttcaattaatctgcaatcattaattaacccttcagtcgctggtattatttgccatccatcctccgagtgttgccaagttatgggtgcgttctgccagcgtcctagcagtggtaaggcttctggctgccagcggcgaacctctcccttcgagtatttctcctcttgctgagatgaaatgcgaccgggtctctttaagggccaggcgccgggatccaggcggcgcccaacggctggactagcagtcgtccgcgccgactcgcacaagaaggaaccccgggcctctggatccgctcgcccggctatgctgctgtggccgctgcggggctgggccgcccgggcgctgcgctgctttgggccgggaagtcgcgggagcccggcctcaggccccgggccgcggagggtgcagcgccgggcctggcctcccgataaagaacaggaaaaagagaaaaaatcagtgatctgtgtcgagggcaatattgcaagtgggaagacgacatgcctggaattcttctccaacgcgacagacgtcgaggtgttaacggagcctgtgtccaagtggagaaatgtccgtggccacaatcctctgggcctgatgtaccacgatgcctctcgctggggtcttacgctacagacttatgtgcagctcaccatgctggacaggcatactcgtcctcaggtgtcatctgtacggttgatggagaggtcgattcacagcgcaagatacatttttgtagaaaacctgtatagaagtgggaagatgccagaagtggactatgtagttctgtcggaatggtttgactggatcttgaggaacatggacgtgtctgttgatttgatagtttaccttcggaccaatcctgagacttgttaccagaggttaaagaagagatgcagggaagaggagaaggtcattccgctggaatacctggaagcaattcaccatctccatgaggagtggctcatcaaaggcagccttttccccatggcagcccctgttctggtgattgaggctgaccaccacatggagaggatgttagaactctttgaacaaaatcgggatcgaatattaactccagagaatcggaagcattgcccataggaggcaaaaggtctatggctcatgtctgaaaaatgcctgctgctgccaagttagctattgggagcaatctggaaaaacttgctcccaggagggctttgtgtctggccagcttgattttcctaatggtctcatctcctttgctagtgtctttgtcatgcgtctctggccctcgtgggtaaatgacaaacgggaccaatgggtttgccaagccctttgctgttcgcagcctcacattcccccggtgcctctcccatggctttgtgctgctgagtcgctctcatgaagcccttagggagagcacctgttgtgtgcctgacaccacgctggagctgtgtaccaatcgtctcagccttcattaggaggccgaggtaggagtcttatatcccaggtgaggaatttgaagctcagaaaggttgaggggctccccagaggtcacacagcctgtgtgcagtggagctggcaccattcagactttcagccgactcagcaactttcccttgccctgggctgcctcctcctgagagctgttccccaccgccctgcctcttccggttggaggctctcatgtctctttggggagagctggcagtgtgcggagctgataacattttcccaatattgagcagttcccaaggacagtcagcatttctagacttccacaaaattatgctgcatttggctggagcccggtgttcagtggtttccctgcccgaggtcgctgcagccccatctaccacatcttcatgtggacattgagattcacatgctggctcctgaagggtgctcagtctccttggtgattaaggtcctgcttgaactgctgccaactccatgtcagggaagtcgcttttggtgcctggctggtttgcccagagccaagctggggcaaggggcagccagccctggcttccaaggctcccgtactgtctgtgtccttgtataaggagctttgctcttggaattactgaaagtctgtggcccaagagagagacacaagtggccttaagtctttttgaagtgttatttcatccagggaaatgcctcgagccatagagcctgaaatcatctttgttggctcagaaaataccttagcttcactcagctggactgcattgaaggcgaggctgccccttggatcaagcagaaaacaagagaaagaaagaacgttccctttggggatagtctggaaagttgggatttgcaaataaaggctctggaagcattgctggtcctgaagctttggaggtgggcagagagagcttcaagaagactagatgcaaaccctggaaaggattaaggctcaactctggagaaacaggccacagcctctcagagcagctgttggctgtaaatagaggtagcaaggccgctcccaggcccctgtgagtgtgggcacctgtgcatgcaatgctccgactctgcagaggtgccaagtgcccctgctgggccagtcccagagagttaggaagtcaaggcctgcaactcctggttcttcctgtttggaccagttcttgtgccattggcaggatgagaggcagcagccaggcgggagctgtgtctagcagcacctgtagcccacgtgctgctaattagctggaaaactggcgaaggcagaacctttgctaccaggaatcttgacatgtggggtctgtctttgagaatttgtaaatgaacagtccaatatttcctctcggctcattttgcacatccatttttggggaaatgtgatttctctctctttttttttttttttttttgcctaaggcacaatctcaagaggtcctgagaccacgtacccatgatttttttcttgctctgtgatacccaataactccttcacctaagccctgttgttgattttgaagtgcttcctaggccagtgattttagcttctgccagctgcttttgccagtagattaacgtgtttttatttttcaaactccgtgtttcctaacgtggagtgtatgggtctaagagagcctgctgtcctccctgccttccaccttggagaggaggctggacgcatcagcagtggccagggcaggtcgcaaaatctcccagcctagagaccacacctgaaacggctgaagccagcttgcacaagggctgctgtccctctgcggcaggcagagctggtgggggcaggggtcacagagcagtcatagacaccatggaccagggcaggagaagggcagatggcacatgggcacaacagggccttgtccttagagcactggggggtcatggctgggaggggcatggcaggggctggcatccctgtagagccagaggggccacccagggcagtgacattccagatatgttgggctcacctcatccttgctgtgagactggagttccatggggacatgaagtcagtacaccgcagagctgctcagctgctctacctctcgctgacttttttgttgcacatatacattttctttcaattagcatttatttcagcttttatttaagctttttgacagtacatgtaaaatatatgattataaccatttaaaaataaattat

SEQ ID NO: 419815 - DNA, 3401 bp, Homo sapiens
cagttacctccaacagcttcatcacaaatcactcacaaaaatggccttaatcctgaagtttatttacggagagcacacttgctaggtgtgtggcagatatacaggaagcacaagatgaggcagcagatctagaggcaaatgacttccttctccctgcctagtggtgactgccagcatcacgccctcccgggagagataaagaacaggaaaaagagaaaaaatcagtgatctgtgtcgagggcaatattgcaagtgggaagacgacatgcctggaattcttctccaacgcgacagacgtcgaggtgttaacggagcctgtgtccaagtggagaaatgtccgtggccacaatcctctgggcctgatgtaccacgatgcctctcgctggggtcttacgctacagacttatgtgcagctcaccatgctggacaggcatactcgtcctcaggtgtcatctgtacggttgatggagaggtcgattcacagcgcaagatacatttttgtagaaaacctgtatagaagtgggaagatgccagaagtggactatgtagttctgtcggaatggtttgactggatcttgaggaacatggacgtgtctgttgatttgatagtttaccttcggaccaatcctgagacttgttaccagaggttaaagaagagatgcagggaagaggagaaggtcattccgctggaatacctggaagcaattcaccatctccatgaggagtggctcatcaaaggcagccttttccccatggcagcccctgttctggtgattgaggctgaccaccacatggagaggatgttagaactctttgaacaaaatcgggatcgaatattaactccagagaatcggaagcattgcccataggaggcaaaaggtctatggctcatgtctgaaaaatgcctgctgctgccaagttagctattgggagcaatctggaaaaacttgctcccaggagggctttgtgtctggccagcttgattttcctaatggtctcatctcctttgctagtgtctttgtcatgcgtctctggccctcgtgggtaaatgacaaacgggaccaatgggtttgccaagccctttgctgttcgcagcctcacattcccccggtgcctctcccatggctttgtgctgctgagtcgctctcatgaagcccttagggagagcacctgttgtgtgcctgacaccacgctggagctgtgtaccaatcgtctcagccttcattaggaggccgaggtaggagtcttatatcccaggtgaggaatttgaagctcagaaaggttgaggggctccccagaggtcacacagcctgtgtgcagtggagctggcaccattcagactttcagccgactcagcaactttcccttgccctgggctgcctcctcctgagagctgttccccaccgccctgcctcttccggttggaggctctcatgtctctttggggagagctggcagtgtgcggagctgataacattttcccaatattgagcagttcccaaggacagtcagcatttctagacttccacaaaattatgctgcatttggctggagcccggtgttcagtggtttccctgcccgaggtcgctgcagccccatctaccacatcttcatgtggacattgagattcacatgctggctcctgaagggtgctcagtctccttggtgattaaggtcctgcttgaactgctgccaactccatgtcagggaagtcgcttttggtgcctggctggtttgcccagagccaagctggggcaaggggcagccagccctggcttccaaggctcccgtactgtctgtgtccttgtataaggagctttgctcttggaattactgaaagtctgtggcccaagagagagacacaagtggccttaagtctttttgaagtgttatttcatccagggaaatgcctcgagccatagagcctgaaatcatctttgttggctcagaaaataccttagcttcactcagctggactgcattgaaggcgaggctgccccttggatcaagcagaaaacaagagaaagaaagaacgttccctttggggatagtctggaaagttgggatttgcaaataaaggctctggaagcattgctggtcctgaagctttggaggtgggcagagagagcttcaagaagactagatgcaaaccctggaaaggattaaggctcaactctggagaaacaggccacagcctctcagagcagctgttggctgtaaatagaggtagcaaggccgctcccaggcccctgtgagtgtgggcacctgtgcatgcaatgctccgactctgcagaggtgccaagtgcccctgctgggccagtcccagagagttaggaagtcaaggcctgcaactcctggttcttcctgtttggaccagttcttgtgccattggcaggatgagaggcagcagccaggcgggagctgtgtctagcagcacctgtagcccacgtgctgctaattagctggaaaactggcgaaggcagaacctttgctaccaggaatcttgacatgtggggtctgtctttgagaatttgtaaatgaacagtccaatatttcctctcggctcattttgcacatccatttttggggaaatgtgatttctctctctttttttttttttttttttgcctaaggcacaatctcaagaggtcctgagaccacgtacccatgatttttttcttgctctgtgatacccaataactccttcacctaagccctgttgttgattttgaagtgcttcctaggccagtgattttagcttctgccagctgcttttgccagtagattaacgtgtttttatttttcaaactccgtgtttcctaacgtggagtgtatgggtctaagagagcctgctgtcctccctgccttccaccttggagaggaggctggacgcatcagcagtggccagggcaggtcgcaaaatctcccagcctagagaccacacctgaaacggctgaagccagcttgcacaagggctgctgtccctctgcggcaggcagagctggtgggggcaggggtcacagagcagtcatagacaccatggaccagggcaggagaagggcagatggcacatgggcacaacagggccttgtccttagagcactggggggtcatggctgggaggggcatggcaggggctggcatccctgtagagccagaggggccacccagggcagtgacattccagatatgttgggctcacctcatccttgctgtgagactggagttccatggggacatgaagtcagtacaccgcagagctgctcagctgctctacctctcgctgacttttttgttgcacatatacattttctttcaattagcatttatttcagcttttatttaagctttttgacagtacatgtaaaatatatgattataaccatttaaaaataaattat

SEQ ID NO: 419816 - DNA, 3584 bp, Homo sapiens
ggaataagtgacatcatgagtgtgtgccaggtgtctgattacagaaggtgttcaattaatctgcaatcattaattaacccttcagtcgctggtattatttgccatccatcctccgagtgttgccaagttatgggtgcgttctgccagcgtcctagcagtggtaaggcttctggctgccagcggcgaacctctcccttcgagtatttctcctcttgctgagatgaaatgcgaccgggtctctttaagggccaggcgccgggatccaggcggcgcccaacggctggactagcagtcgtccgcgccgactcgcacaagaaggaaccccgggcctctggatccgctcgcccggctatgctgctgtggccgctgcggggctgggccgcccgggcgctgcgctgctttgggccgggaagtcgcgggagcccggcctcaggccccgggccgcggagggtgcagcgccgggcctggcctcccgataaagaacaggaaaaagagaaaaaatcagtgatctgtgtcgagggcaatattgcaagtgggaagacgacatgcctggaattcttctccaacgcgacagacgtcgaggtgttaacggagcctgtgtccaagtggagaaatgtccgtggccacaatcctctgggcctgatgtaccacgatgcctctcgctggggtcttacgctacagacttatgtgcagctcaccatgctggacaggcatactcgtcctcaggtgtcatctgtacggttgatggagaggtcgattcacagcgcaagatacatttttgtagaaaacctgtatagaagtgggaagatgccagaagtggactatgtagttctgtcggaatggtttgactggatcttgaggaacatggacgtgtctgttgatttgatagtttaccttcggaccaatcctgagacttgttaccagaggttaaagaagagatgcagggaagaggagaaggtcattccgctggaatacctggaagcaattcaccatctccatgaggagtggctcatcaaaggcagccttttccccatggcagcccctgttctggtgattgaggctgaccaccacatggagaggatgttagaactctttgaacaaaatcgggatcgaatattaactccagagaatcggaagcattgcccataggaggcaaaaggtctatggctcatgtctgaaaaatgcctgctgctgccaagttagctattgggagcaatctggaaaaacttgctcccaggagggctttgtgtctggccagcttgattttcctaatggtctcatctcctttgctagtgtctttgtcatgcgtctctggccctcgtgggtaaatgacaaacgggaccaatgggtttgccaagccctttgctgttcgcagcctcacattcccccggtgcctctcccatggctttgtgctgctgagtcgctctcatgaagcccttagggagagcacctgttgtgtgcctgacaccacgctggagctgtgtaccaatcgtctcagccttcattaggaggccgaggtaggagtcttatatcccaggtgaggaatttgaagctcagaaaggttgaggggctccccagaggtcacacagcctgtgtgcagtggagctggcaccattcagactttcagccgactcagcaactttcccttgccctgggctgcctcctcctgagagctgttccccaccgccctgcctcttccggttggaggctctcatgtctctttggggagagctggcagtgtgcggagctgataacattttcccaatattgagcagttcccaaggacagtcagcatttctagacttccacaaaattatgctgcatttggctggagcccggtgttcagtggtttccctgcccgaggtcgctgcagccccatctaccacatcttcatgtggacattgagattcacatgctggctcctgaagggtgctcagtctccttggtgattaaggtcctgcttgaactgctgccaactccatgtcagggaagtcgcttttggtgcctggctggtttgcccagagccaagctggggcaaggggcagccagccctggcttccaaggctcccgtactgtctgtgtccttgtataaggagctttgctcttggaattactgaaagtctgtggcccaagagagagacacaagtggccttaagtctttttgaagtgttatttcatccagggaaatgcctcgagccatagagcctgaaatcatctttgttggctcagaaaataccttagcttcactcagctggactgcattgaaggcgaggctgccccttggatcaagcagaaaacaagagaaagaaagaacgttccctttggggatagtctggaaagttgggatttgcaaataaaggctctggaagcattgctggtcctgaagctttggaggtgggcagagagagcttcaagaagactagatgcaaaccctggaaaggattaaggctcaactctggagaaacaggccacagcctctcagagcagctgttggctgtaaatagaggtagcaaggccgctcccaggcccctgtgagtgtgggcacctgtgcatgcaatgctccgactctgcagaggtgccaagtgcccctgctgggccagtcccagagagttaggaagtcaaggcctgcaactcctggttcttcctgtttggaccagttcttgtgccattggcaggatgagaggcagcagccaggcgggagctgtgtctagcagcacctgtagcccacgtgctgctaattagctggaaaactggcgaaggcagaacctttgctaccaggaatcttgacatgtggggtctgtctttgagaatttgtaaatgaacagtccaatatttcctctcggctcattttgcacatccatttttggggaaatgtgatttctctctctttttttttttttttttttgcctaaggcacaatctcaagaggtcctgagaccacgtacccatgatttttttcttgctctgtgatacccaataactccttcacctaagccctgttgttgattttgaagtgcttcctaggccagtgattttagcttctgccagctgcttttgccagtagattaacgtgtttttatttttcaaactccgtgtttcctaacgtggagtgtatgggtctaagagagcctgctgtcctccctgccttccaccttggagaggaggctggacgcatcagcagtggccagggcaggtcgcaaaatctcccagcctagagaccacacctgaaacggctgaagccagcttgcacaaggatgggcacaacagggccttgtccttagagcactggggggtcatggctgggaggggcatggcaggggctggcatccctgtagagccagaggggccacccagggcagtgacattccagatatgttgggctcacctcatccttgctgtgagactggagttccatggggacatgaagtcagtacaccgcagagctgctcagctgctctacctctcgctgacttttttgttgcacatatacattttctttcaattagcatttatttcagcttttatttaagctttttgacagtacatgtaaaatatatgattataaccatttaaaaataaattat

SEQ ID NO: 419817 - DNA, 2362 bp, Homo sapiens
  misc_feature (2342)..(2342): n is a, c, g, or t
ggaataagtgacatcatgagtgtgtgccaggtgtctgattacagaaggtgttcaattaatctgcaatcattaattaacccttcagtcgctggtattatttgccatccatcctccgagtgttgccaagttatgggtgcgttctgccagcgtcctagcagtggtaaggcttctggctgccagcggcgaacctctcccttcgagtatttctcctcttgctgagatgaaatgcgaccgggtctctttaagggccaggcgccgggatccaggcggcgcccaacggctggactagcagtcgtccgcgccgactcgcacaagaaggaaccccgggcctctggatccgctcgcccggctatgctgctgtggccgctgcggggctgggccgcccgggcgctgcgctgctttgggccgggaagtcgcgggagcccggcctcaggccccgggccgcggagggtgcagcgccgggcctggcctcccgataaagaacaggaaaaagagaaaaaatcagtgatctgtgtcgagggcaatattgcaagtgggaagacgacatgcctggaattcttctccaacgcgacagacgtcgaggtgttaacggagcctgtgtccaagtggagaaatgtccgtggccacaatcctctgggcctgatgtaccacgatgcctctcgctggggtcttacgctacagacttatgtgcagctcaccatgctggacaggcatactcgtcctcaggtgtcatctgtacggttgatggagaggtcgattcacagcgcaagatacatttttgtagaaaacctgtatagaagtgggaagatgccagaagtggactatgtagttctgtcggaatggtttgactggatcttgaggaacatggacgtgtctgttgatttgatagtttaccttcggaccaatcctgagacttgttaccagaggttaaagaagagatgcagggaagaggagaaggtcattccgctggaatacctggaagcaattcaccatctccatgaggagtggctcatcaaaggcagccttttccccatggcagcccctgttctggtgattgaggctgaccaccacatggagaggatgttagaactctttgaacaaaatcgggatcgaatattaactccagagaatcggaagcattgcccataggaggcaaaaggtctatggctcatgtctgaaaaatgcctgctgctgccaagttagctattgggagcaatctggaaaaacttgctcccaggagggctttgtgtctggccagcttgattttcctaatggtctcatctcctttgctagtgtctttgtcatgcgtctctggccctcgtgggtaaatgacaaacgggaccaatgggtttgccaagccctttgctgttcgcagcctcacattcccccggtgcctctcccatggctttgtgctgctgagtcgctctcatgaagcccttagggagagcacctgttgtgtgcctgacaccacgctggagctgtgtaccaatcgtctcagccttcattaggaggccgaggtaggagtcttatatcccaggtgaggaatttgaagctcagaaaggttgaggggctccccagaggtcacacagcctgtgtgcagtggagctggcaccattcagactttcagccgactcagcaactttcccttgccctgggctgcctcctcctgagagctgttccccaccgccctgcctcttccggttggaggctctcatgtctctttggggagagctggcagtgtgcggagctgataacattttcccaatattgagcagttcccaaggacagtcagcatttctagacttccacaaaattatgctgcatttggctggagcccggtgttcagtggtttccctgcccgaggtcgctgcagccccatctaccacatcttcatgtggacattgagattcacatgctggctcctgaagggtgctcagtctccttggtgattaaggtcctgcttgaactgctgccaactccatgtcagggaagtcgcttttggtgcctggctggtttgcccagagccaagctggggcaaggggcagccagccctggcttccaaggctcccgtactgtctgtgtccttgtataaggagctttgctcttggaattactgaaagtctgtggcccaagagagagacacaagtggccttaagtctttttgaagtgttatttcatccagggaaatgcctcgagccatagagcctgaaatcatctttgttggctcagaaaataccttagcttcactcagctggactgcattgaaggcgaggctgccccttggatcaagcagaaaacaagagaaagaaagaacgttccctttggggatagtctggtggaanaagtcgcttttggtccggct

SEQ ID NO: 419818 - DNA, 2389 bp, Homo sapiens
ggaataagtgacatcatgagtgtgtgccaggtgtctgattacagaaggtgttcaattaatctgcaatcattaattaacccttcagtcgctggtattatttgccatccatcctccgagtgttgccaagttatgggtgcgttctgccagcgtcctagcagtggtaaggcttctggctgccagcggcgaacctctcccttcgagtatttctcctcttgctgagatgaaatgcgaccgggtctctttaagggccaggcgccgggatccaggcggcgcccaacggctggactagcagtcgtccgcgccgactcgcacaagaaggaaccccgggcctctggatccgctcgcccggctatgctgctgtggccgctgcggggctgggccgcccgggcgctgcgctgctttgggccgggaagtcgcgggagcccggcctcaggccccgggccgcggagggtgcagcgccgggcctggcctcccgataaagaacaggaaaaagagaaaaaatcagtgatctgtgtcgagggcaatattgcaagtgggaagacgacatgcctggaattcttctccaacgcgacagacgtcgaggtgttaacggagcctgtgtccaagtggagaaatgtccgtggccacaatcctctgggcctgatgtaccacgatgcctctcgctggggtcttacgctacagacttatgtgcagctcaccatgctggacaggcatactcgtcctcaggtgtcatctgtacggttgatggagaggtcgattcacagcgcaagatacatttttgtagaaaacctgtatagaagtgggaagatgccagaagtggactatgtagttctgtcggaatggtttgactggatcttgaggaacatggacgtgtctgttgatttgatagtttaccttcggaccaatcctgagacttgttaccagaggttaaagaagagatgcagggaagaggagaaggtcattccgctggaatacctggaagcaattcaccatctccatgaggagtggctcatcaaaggcagccttttccccatggcagcccctgttctggtgattgaggctgaccaccacatggagaggatgttagaactctttgaacaaaatcgggatcgaatattaactccagagaatcggaagcattgcccataggaggcaaaaggtctatggctcatgtctgaaaaatgcctgctgctgccaagttagctattgggagcaatctggaaaaacttgctcccaggagggctttgtgtctggccagcttgattttcctaatggtctcatctcctttgctagtgtctttgtcatgcgtctctggccctcgtgggtaaatgacaaacgggaccaatgggtttgccaagccctttgctgttcgcagcctcacattcccccggtgcctctcccatggctttgtgctgctgagtcgctctcatgaagcccttagggagagcacctgttgtgtgcctgacaccacgctggagctgtgtaccaatcgtctcagccttcattaggaggccgaggtaggagtcttatatcccaggtgaggaatttgaagctcagaaaggttgaggggctccccagaggtcacacagcctgtgtgcagtggagctggcaccattcagactttcagccgactcagcaactttcccttgccctgggctgcctcctcctgagagctgttccccaccgccctgcctcttccggttggaggctctcatgtctctttggggagagctggcagtgtgcggagctgataacattttcccaatattgagcagttcccaaggacagtcagcatttctagacttccacaaaattatgctgcatttggctggagcccggtgttcagtggtttccctgcccgaggtcgctgcagccccatctaccacatcttcatgtggacattgagattcacatgctggctcctgaagggtgctcagtctccttggtgattaaggtcctgctgctgctgtccctctgcggcaggcagagctggtgggggcaggggtcacagagcagtcatagacaccatggaccagggcaggagaagggcagatggcacatgggcacaacagggccttgtccttagagcactggggggtcatggctgggaggggcatggcaggggctggcatccctgtagagccagaggggccacccagggcagtgacattccagatatgttgggctcacctcatccttgctgtgagactggagttccatggggacatgaagtcagtacaccgcagagctgctcagctgctctacctctcgctgacttttttgttgcacatatacattttctttcaattagcatttatttcagcttttatttaagctttttgacagtacatgtaaaatatatgattataaccatttaaaaataaattat

SEQ ID NO: 419819 - DNA, 8924 bp, Homo sapiens
ccatggactcaatgtcaatgcttctcatgtgatacacaagaatactcaattaaaaaatgctaagggataagttttttttcagatagagttgagctttaaagggccacaaaccattgaaataggtaagatttgttcctgctcccaagaattaacttattgttcctttgagagcaatatcatacccaatgagactacacaattgagaaaaaatcagttggattaaaaaaatttgtacattaaaattcaaatttccaaagaacctgcaaaggttccaatactagttgattcttatctaactaaatgaaacaatttttgtcctaaatgttcatgatgggaggtaaatgtgataacatatatggggtgtacaattgttttacatgccatgccagacaccagagatatttgtttctaattttcattttcattgaaaacaaaagttgttacttttgcatcctaaagaatggagacaagaagaaaacaaacgtgtatctaaatgtgattaaaatgttaaaaggaaaaaatatcttaatggaaaaaaaataatgatgaaatagaatttacctacattaattccagtcacgatggaaattaaaggagggaagagcagaagcaaaattgtggaagagatgtagactaaaggagcaaatgagcatggctggaagatagtaatcattcctggtcagggtgtgttttcagctttgctgaatccagccttcacagagagtcatggacacacaccaaccacaagagtttatacataaaaaaggcaaaaatttgagagtacaatatactctctgcataataggtaagtgatgatgtaccaagttctcccttagtgtataaataaactcaagagatcaatatttttcttatcacatctcttacaagaaacaagggaattgataatgtcaaaggacactttctgcaacctagtaaagttcgataataaaaatagtgattaaaaggaaccaaatacctaaattgttgaatgtgtttatttttagtcagacattgttcttagcacttacaaaattgatgctccctttagcaataatgaatactcttatttttcatattaactgaacacctaccatgtgtctacccccattaattcactggagatatcagtgaccaaagaagactgataggttctactgttattcctatttacaaaataaaaaatagaagtataaggaactatcaaattatgaagccattgtttgaacccaaaatctgactgagccctcagttcttacatgctcccaggaatatttctggtcataagaactagagcgatttctagattgatcaatattttcccagtagagtcctgcctaggtaatgacagagtctttctcttcagctgtttactagtcttcttcactgaaattccccatttgaccatgccaacatgaatgccaatgcggcagcggggctggcccctgagcacatccccaccccgggggctgccctgtcgtggcaggcggccatcgacgcagcccggcaggctaagctgatgggcagcgctggcaatgcgaccatctccacagtcagctccacgcagcggaagcggcagcaatatgggaaacccaagaagcagggcagcaccacggccacacgcccgccccgagccctgctctgcctgaccctgaagaaccccatccggagggcctgcatcagcattgtcgaatggaaaccatttgaaataattattttactgactatttttgccaattgtgtggccttagcgatctatattccctttccagaagatgattccaacgccaccaattccaacctggaacgagtggaatatctctttctcataatttttacggtggaagcgtttttaaaagtaatcgcctatggactcctctttcaccccaatgcctacctccgcaacggctggaacctactagattttataattgtggttgtggggctttttagtgcaattttagaacaagcaaccaaagcagatggggcaaacgctctcggagggaaaggggccggatttgatgtgaaggcgctgagggccttccgcgtgctgcgccccctgcggctggtgtccggagtcccaagtctccaggtggtcctgaattccatcatcaaggccatggtccccctgctgcacatcgccctgcttgtgctgtttgtcatcatcatctacgccatcatcggcttggagctcttcatggggaagatgcacaagacctgctacaaccaggagggcatagcagatgttccagcagaagatgacccttccccttgtgcgctggaaacgggccacgggcggcagtgccagaacggcacggtgtgcaagcccggctgggatggtcccaagcacggcatcaccaactttgacaactttgccttcgccatgctcacggtgttccagtgcatcaccatggagggctggacggacgtgctgtactggatgcaggacgctatgggctatgagttaccctgggtgtattttgtcagtctggtcatctttggatcctttttcgttctaaatctggttctcggtgtgttgagcggagagttttccaaagagagggagaaggccaaggcccggggagatttccagaagctgcgggagaagcagcagctagaagaggatctcaaaggctacctggattggatcactcaggccgaagacatcgatcctgagaatgaggacgaaggcatggatgaggagaagccccgaaacatgagcatgcccaccagtgagaccgagtccgtcaacaccgaaaacgtggctggaggtgacatcgagggagaaaactgcggggccaggctggcccaccggatctccaagtcaaagttcagccgctactggcgccggtggaatcggttctgcagaaggaagtgccgcgccgcagtcaagtctaatgtcttctactggctggtgattttcctggtgttcctcaacacgctcaccattgcctctgagcactacaaccagcccaactggctcacagaagtccaagacacggcaaacaaggccctgctggccctgttcacggcagagatgctcctgaagatgtacagcctgggcctgcaggcctacttcgtgtccctcttcaaccgctttgactgcttcgtcgtgtgtggcggcatcctggagaccatcctggtggagaccaagatcatgtccccactgggcatctccgtgctcagatgcgtccggctgctgaggattttcaagatcacgaggtactggaactccttgagcaacctggtggcatccttgctgaactctgtgcgctccatcgcctccctgctccttctcctcttcctcttcatcatcatcttctccctcctggggatgcagctctttggaggaaagttcaactttgatgagatgcagacccggaggagcacattcgataacttcccccagtccctcctcactgtgtttcagatcctgaccggggaggactggaattcggtgatgtatgatgggatcatggcttatggcggcccctcttttccagggatgttagtctgtatttacttcatcatcctcttcatctgtggaaactatatcctactgaatgtgttcttggccattgctgtggacaacctggctgatgctgagagcctcacatctgcccaaaaggaggaggaagaggagaaggagagaaagaagctggccaggactgccagcccagagaagaaacaagagttggtggagaagccggcagtgggggaatccaaggaggagaagattgagctgaaatccatcacggctgacggagagtctccacccgccaccaagatcaacatggatgacctccagcccaatgaaaatgaggataagagcccctaccccaacccagaaactacaggagaagaggatgaggaggagccagagatgcctgtcggccctcgcccacgaccactctctgagcttcaccttaaggaaaaggcagtgcccatgccagaagccagcgcgtttttcatcttcagctctaacaacaggtttcgcctccagtgccaccgcattgtcaatgacacgatcttcaccaacctgatcctcttcttcattctgctcagcagcatttccctggctgctgaggacccggtccagcacacctccttcaggaaccatattctgttttattttgatattgtttttaccaccattttcaccattgaaattgctctgaagatgactgcttatggggctttcttgcacaagggttctttctgccggaactacttcaacatcctggacctgctggtggtcagcgtgtccctcatctcctttggcatccagtccagtgcaatcaatgtcgtgaagatcttgcgagtcctgcgagtactcaggcccctgagggccatcaacagggccaaggggctaaagcatgtggttcagtgtgtgtttgtcgccatccggaccatcgggaacatcgtgattgtcaccaccctgctgcagttcatgtttgcctgcatcggggtccagctcttcaagggaaagctgtacacctgttcagacagttccaagcagacagaggcggaatgcaagggcaactacatcacgtacaaagacggggaggttgaccaccccatcatccaaccccgcagctgggagaacagcaagtttgactttgacaatgttctggcagccatgatggccctcttcaccgtctccaccttcgaagggtggccagagctgctgtaccgctccatcgactcccacacggaagacaagggccccatctacaactaccgtgtggagatctccatcttcttcatcatctacatcatcatcatcgccttcttcatgatgaacatcttcgtgggcttcgtcatcgtcacctttcaggagcagggggagcaggagtacaagaactgtgagctggacaagaaccagcgacagtgcgtggaatacgccctcaaggcccggcccctgcggaggtacatccccaagaaccagcaccagtacaaagtgtggtacgtggtcaactccacctacttcgagtacctgatgttcgtcctcatcctgctcaacaccatctgcctggccatgcagcactacggccagagctgcctgttcaaaatcgccatgaacatcctcaacatgctcttcactggcctcttcaccgtggagatgatcctgaagctcattgccttcaaacccaagggttactttagtgatccctggaatgtttttgacttcctcatcgtaattggcagcataattgacgtcattctcagtgagactaatccagctgaacatacccaatgctctccctctatgaacgcagaggaaaactcccgcatctccatcaccttcttccgcctgttccgggtcatgcgtctggtgaagctgctgagccgtggggagggcatccggacgctgctgtggaccttcatcaagtccttccaggccctgccctatgtggccctcctgatcgtgatgctgttcttcatctacgcggtgatcgggatgcaggtgtttgggaaaattgccctgaatgataccacagagatcaaccggaacaacaactttcagaccttcccccaggccgtgctgctcctcttcaggtgtgccaccggggaggcctggcaggacatcatgctggcctgcatgccaggcaagaagtgtgccccagagtccgagcccagcaacagcacggagggtgaaacaccctgtggtagcagctttgctgtcttctacttcatcagcttctacatgctctgtgccttcctgatcatcaacctctttgtagctgtcatcatggacaactttgactacctgacaagggactggtccatccttggtccccaccacctggatgagtttaaaagaatctgggcagagtatgaccctgaagccaagggtcgtatcaaacacctggatgtggtgaccctcctccggcggattcagccgccactaggttttgggaagctgtgccctcaccgcgtggcttgcaaacgcctggtctccatgaacatgcctctgaacagcgacgggacagtcatgttcaatgccaccctgtttgccctggtcaggacggccctgaggatcaaaacagaagggaacctagaacaagccaatgaggagctgcgggcgatcatcaagaagatctggaagcggaccagcatgaagctgctggaccaggtggtgccccctgcaggtgatgatgaggtcaccgttggcaagttctacgccacgttcctgatccaggagtacttccggaagttcaagaagcgcaaagagcagggccttgtgggcaagccctcccagaggaacgcgctgtctctgcaggctggcttgcgcacactgcatgacatcgggcctgagatccgacgggccatctctggagatctcaccgctgaggaggagctggacaaggccatgaaggaggctgtgtccgctgcttctgaagatgacatcttcaggagggccggtggcctgttcggcaaccacgtcagctactaccaaagcgacggccggagcgccttcccccagaccttcaccactcagcgcccgctgcacatcaacaaggcgggcagcagccagggcgacactgagtcgccatcccacgagaagctggtggactccaccttcaccccgagcagctactcgtccaccggctccaacgccaacatcaacaacgccaacaacaccgccctgggtcgcctccctcgccccgccggctaccccagcacggtcagcactgtggagggccacgggccccccttgtcccctgccatccgggtgcaggaggtggcgtggaagctcagctccaacaggatgcactgctgtgacatgctggatggtgggaccttccctcccgccctgggcccccgcagggctcctccctgtctgcatcagcagctccagggttccctggcggggctgagagaggacacaccctgcatcgtgcctggccacgcttcactgtgctgctcttccagagtaggagagtggctcccagcaggctgcacagccccccagcatgccaggtgccactcccgggagagccaggcagccatggcgggtcaggaggagacgtctcaggatgagacctatgaagtgaagatgaaccatgacacggaggcctgcagtgagcccagcctgctctccacagagatgctctcctaccaggatgacgaaaatcggcaactgacgctcccagaggaggacaagagggacatccggcaatctccgaagaggggtttcctccgctctgcctcactaggtcgaagggcctccttccacctggaatgtctgaagcgacagaaggaccgagggggagacatctctcagaagacagtcctgcccttgcatctggttcatcatcaggcattggcagtggcaggcctgagccccctcctccagagaagccattcccctgcctcattccctaggccttttgccaccccaccagccacacctggcagccgaggctggcccccacagcccgtccccaccctgcggcttgagggggtcgagtccagtgagaaactcaacagcagcttcccatccatccactgcggctcctgggctgagaccacccccggtggcgggggcagcagcgccgcccggagagtccggcccgtctccctcatggtgcccagccaggctggggccccagggaggcagttccacggcagtgccagcagcctggtggaagcggtcttgatttcagaaggactggggcagtttgctcaagatcccaagttcatcgaggtcaccacccaggagctggccgacgcctgcgacatgaccatagaggagatggagagcgcggccgacaacatcctcagcgggggcgccccacagagccccaatggcgccctcttaccctttgtgaactgcagggacgcggggcaggaccgagccgggggcgaggaggacgcgggctgtgtgcgcgcgcggggtgcaccgagtgaggaggagctccaggacagcagggtctacgtcagcagcctgtagtgggcgctgccagatgcgggcttttttttttttatttgtttcaatgttcctaatgggttcgtttcagaagtgcctcactgttctcgtgacctggagttaaccggaacagcgtcttcattcatttctgttgggaccagacgcggagcctgggtgcgcgagccgccctccgggaggaaggcgcccggctgcgtctgcagaggcggggagaggaggcggcgagggtcccggggcgcgaggaaggcgctgccctctcccagctcgcaggccccgggccggccgcgcctctgcgggagagcaccccggcttcccgcgcgccctcaccaaaaggaccctacagcaaacggggtctttcgactctgcttgtagaaaccatttgcacatattctgtacgagcctgctgtctccctagagccagggccctgcggatttggagaagggagcggggcaggacttccaggaggaccccaacccggcccggagagggaggaggaggcctccaggggcgcggagctctggggatgggcgtcgggccggcagtggtgcggctcactccgtccctgcccacctgcgacgggatcccccgaccggcacggccacgccgagctcccggccagccgccggcccgcaggcagcgcgagggaggagctgcgccgccgggccggggccgccggctccgcccaaccaggtggtgctgagcttccgctgagcgctcttttgttttgtggtttgacacttttcttgacagcatgttgcagtttcttttcggttttggttttttttaaatgttttattttgctttcccagcgggaggggaggaagaagagtgtttacaaagtcctgtagccccctcacctttctgttttcacttttgccaatgtacatcgggtttggttttcttgtattatttaaacggttgtggtttcctttttccacggaggttcaatagaagccgctgcaggagagttttacc

SEQ ID NO: 419820 - DNA, 8382 bp, Homo sapiens
atggtcaatgagaatacgaggatgtacattccagaggaaaaccaccaaggttccaactatgggagcccacgccccgcccatgccaacatgaatgccaatgcggcagcggggctggcccctgagcacatccccaccccgggggctgccctgtcgtggcaggcggccatcgacgcagcccggcaggctaagctgatgggcagcgctggcaatgcgaccatctccacagtcagctccacgcagcggaagcggcagcaatatgggaaacccaagaagcagggcagcaccacggccacacgcccgccccgagccctgctctgcctgaccctgaagaaccccatccggagggcctgcatcagcattgtcgaatggaaaccatttgaaataattattttactgactatttttgccaattgtgtggccttagcgatctatattccctttccagaagatgattccaacgccaccaattccaacctggaacgagtggaatatctctttctcataatttttacggtggaagcgtttttaaaagtaatcgcctatggactcctctttcaccccaatgcctacctccgcaacggctggaacctactagattttataattgtggttgtggggctttttagtgcaattttagaacaagcaaccaaagcagatggggcaaacgctctcggagggaaaggggccggatttgatgtgaaggcgctgagggccttccgcgtgctgcgccccctgcggctggtgtccggagtcccaagtctccaggtggtcctgaattccatcatcaaggccatggtccccctgctgcacatcgccctgcttgtgctgtttgtcatcatcatctacgccatcatcggcttggagctcttcatggggaagatgcacaagacctgctacaaccaggagggcatagcagatgttccagcagaagatgacccttccccttgtgcgctggaaacgggccacgggcggcagtgccagaacggcacggtgtgcaagcccggctgggatggtcccaagcacggcatcaccaactttgacaactttgccttcgccatgctcacggtgttccagtgcatcaccatggagggctggacggacgtgctgtactgggtcaatgatgccgtaggaagggactggccctggatctattttgttacactaatcatcatagggtcattttttgtacttaacttggttctcggtgtgcttagcggagagttttccaaagagagggagaaggccaaggcccggggagatttccagaagctgcgggagaagcagcagctagaagaggatctcaaaggctacctggattggatcactcaggccgaagacatcgatcctgagaatgaggacgaaggcatggatgaggagaagccccgaaacatgagcatgcccaccagtgagaccgagtccgtcaacaccgaaaacgtggctggaggtgacatcgagggagaaaactgcggggccaggctggcccaccggatctccaagtcaaagttcagccgctactggcgccggtggaatcggttctgcagaaggaagtgccgcgccgcagtcaagtctaatgtcttctactggctggtgattttcctggtgttcctcaacacgctcaccattgcctctgagcactacaaccagcccaactggctcacagaagtccaagacacggcaaacaaggccctgctggccctgttcacggcagagatgctcctgaagatgtacagcctgggcctgcaggcctacttcgtgtccctcttcaaccgctttgactgcttcgtcgtgtgtggcggcatcctggagaccatcctggtggagaccaagatcatgtccccactgggcatctccgtgctcagatgcgtccggctgctgaggattttcaagatcacgaggtactggaactccttgagcaacctggtggcatccttgctgaactctgtgcgctccatcgcctccctgctccttctcctcttcctcttcatcatcatcttctccctcctggggatgcagctctttggaggaaagttcaactttgatgagatgcagacccggaggagcacattcgataacttcccccagtccctcctcactgtgtttcagatcctgaccggggaggactggaattcggtgatgtatgatgggatcatggcttatggcggcccctcttttccagggatgttagtctgtatttacttcatcatcctcttcatctgtggaaactatatcctactgaatgtgttcttggccattgctgtggacaacctggctgatgctgagagcctcacatctgcccaaaaggaggaggaagaggagaaggagagaaagaagctggccaggactgccagcccagagaagaaacaagagttggtggagaagccggcagtgggggaatccaaggaggagaagattgagctgaaatccatcacggctgacggagagtctccacccgccaccaagatcaacatggatgacctccagcccaatgaaaatgaggataagagcccctaccccaacccagaaactacaggagaagaggatgaggaggagccagagatgcctgtcggccctcgcccacgaccactctctgagcttcaccttaaggaaaaggcagtgcccatgccagaagccagcgcgtttttcatcttcagctctaacaacaggtttcgcctccagtgccaccgcattgtcaatgacacgatcttcaccaacctgatcctcttcttcattctgctcagcagcatttccctggctgctgaggacccggtccagcacacctccttcaggaaccatatcctaggcaatgcagactatgtcttcactagtatctttacattagaaattatccttaagatgactgcttatggggctttcttgcacaagggttctttctgccggaactacttcaacatcctggacctgctggtggtcagcgtgtccctcatctcctttggcatccagtccagtgcaatcaatgtcgtgaagatcttgcgagtcctgcgagtactcaggcccctgagggccatcaacagggccaaggggctaaagcatgtggttcagtgtgtgtttgtcgccatccggaccatcgggaacatcgtgattgtcaccaccctgctgcagttcatgtttgcctgcatcggggtccagctcttcaagggaaagctgtacacctgttcagacagttccaagcagacagaggcggaatgcaagggcaactacatcacgtacaaagacggggaggttgaccaccccatcatccaaccccgcagctgggagaacagcaagtttgactttgacaatgttctggcagccatgatggccctcttcaccgtctccaccttcgaagggtggccagagctgctgtaccgctccatcgactcccacacggaagacaagggccccatctacaactaccgtgtggagatctccatcttcttcatcatctacatcatcatcatcgccttcttcatgatgaacatcttcgtgggcttcgtcatcgtcacctttcaggagcagggggagcaggagtacaagaactgtgagctggacaagaaccagcgacagtgcgtggaatacgccctcaaggcccggcccctgcggaggtacatccccaagaaccagcaccagtacaaagtgtggtacgtggtcaactccacctacttcgagtacctgatgttcgtcctcatcctgctcaacaccatctgcctggccatgcagcactacggccagagctgcctgttcaaaatcgccatgaacatcctcaacatgctcttcactggcctcttcaccgtggagatgatcctgaagctcattgccttcaaacccaagggttactttagtgatccctggaatgtttttgacttcctcatcgtaattggcagcataattgacgtcattctcagtgagactaatccagctgaacatacccaatgctctccctctatgaacgcagaggaaaactcccgcatctccatcaccttcttccgcctgttccgggtcatgcgtctggtgaagctgctgagccgtggggagggcatccggacgctgctgtggaccttcatcaagtccttccaggccctgccctatgtggccctcctgatcgtgatgctgttcttcatctacgcggtgatcgggatgcaggtgtttgggaaaattgccctgaatgataccacagagatcaaccggaacaacaactttcagaccttcccccaggccgtgctgctcctcttcaggtgtgccaccggggaggcctggcaggacatcatgctggcctgcatgccaggcaagaagtgtgccccagagtccgagcccagcaacagcacggagggtgaaacaccctgtggtagcagctttgctgtcttctacttcatcagcttctacatgctctgtgccttcctgatcatcaacctctttgtagctgtcatcatggacaactttgactacctgacaagggactggtccatccttggtccccaccacctggatgagtttaaaagaatctgggcagagtatgaccctgaagccaagggtcgtatcaaacacctggatgtggtgaccctcctccggcggattcagccgccactaggttttgggaagctgtgccctcaccgcgtggcttgcaaacgcctggtctccatgaacatgcctctgaacagcgacgggacagtcatgttcaatgccaccctgtttgccctggtcaggacggccctgaggatcaaaacagaagggaacctagaacaagccaatgaggagctgcgggcgatcatcaagaagatctggaagcggaccagcatgaagctgctggaccaggtggtgccccctgcaggtgatgatgaggtcaccgttggcaagttctacgccacgttcctgatccaggagtacttccggaagttcaagaagcgcaaagagcagggccttgtgggcaagccctcccagaggaacgcgctgtctctgcaggctggcttgcgcacactgcatgacatcgggcctgagatccgacgggccatctctggagatctcaccgctgaggaggagctggacaaggccatgaaggaggctgtgtccgctgcttctgaagatgacatcttcaggagggccggtggcctgttcggcaaccacgtcagctactaccaaagcgacggccggagcgccttcccccagaccttcaccactcagcgcccgctgcacatcaacaaggcgggcagcagccagggcgacactgagtcgccatcccacgagaagctggtggactccaccttcaccccgagcagctactcgtccaccggctccaacgccaacatcaacaacgccaacaacaccgccctgggtcgcctccctcgccccgccggctaccccagcacggtcagcactgtggagggccacgggccccccttgtcccctgccatccgggtgcaggaggtggcgtggaagctcagctccaacaggtgccactcccgggagagccaggcagccatggcgggtcaggaggagacgtctcaggatgagacctatgaagtgaagatgaaccatgacacggaggcctgcagtgagcccagcctgctctccacagagatgctctcctaccaggatgacgaaaatcggcaactgacgctcccagaggaggacaagagggacatccggcaatctccgaagaggggtttcctccgctctgcctcactaggtcgaagggcctccttccacctggaatgtctgaagcgacagaaggaccgagggggagacatctctcagaagacagtcctgcccttgcatctggttcatcatcaggcattggcagtggcaggcctgagccccctcctccagagaagccattcccctgcctcattccctaggccttttgccaccccaccagccacacctggcagccgaggctggcccccacagcccgtccccaccctgcggcttgagggggtcgagtccagtgagaaactcaacagcagcttcccatccatccactgcggctcctgggctgagaccacccccggtggcgggggcagcagcgccgcccggagagtccggcccgtctccctcatggtgcccagccaggctggggccccagggaggcagttccacggcagtgccagcagcctggtggaagcggtcttgatttcagaaggactggggcagtttgctcaagatcccaagttcatcgaggtcaccacccaggagctggccgacgcctgcgacatgaccatagaggagatggagagcgcggccgacaacatcctcagcgggggcgccccacagagccccaatggcgccctcttaccctttgtgaactgcagggacgcggggcaggaccgagccgggggcgaggaggacgcgggctgtgtgcgcgcgcggggtgcaccgagtgaggaggagctccaggacagcagggtctacgtcagcagcctgtagtgggcgctgccagatgcgggcttttttttttttatttgtttcaatgttcctaatgggttcgtttcagaagtgcctcactgttctcgtgacctggagttaaccggaacagcgtcttcattcatttctgttgggaccagacgcggagcctgggtgcgcgagccgccctccgggaggaaggcgcccggctgcgtctgcagaggcggggagaggaggcggcgagggtcccggggcgcgaggaaggcgctgccctctcccagctcgcaggccccgggccggccgcgcctctgcgggagagcaccccggcttcccgcgcgccctcaccaaaaggaccctacagcaaacggggtctttcgactctgcttgtagaaaccatttgcacatattctgtacgagcctgctgtctccctagagccagggccctgcggatttggagaagggagcggggcaggacttccaggaggaccccaacccggcccggagagggaggaggaggcctccaggggcgcggagctctggggatgggcgtcgggccggcagtggtgcggctcactccgtccctgcccacctgcgacgggatcccccgaccggcacggccacgccgagctcccggccagccgccggcccgcaggcagcgcgagggaggagctgcgccgccgggccggggccgccggctccgcccaaccaggtggtgctgagcttccgctgagcgctcttttgttttgtggtttgacacttttcttgacagcatgttgcagtttcttttcggttttggttttttttaaatgttttattttgctttcccagcgggaggggaggaagaagagtgtttacaaagtcctgtagccccctcacctttctgttttcacttttgccaatgtacatcgggtttggttttcttgtattatttaaacggttgtggtttcctttttccacggaggttcaatagaagccgctgcaggagagttttaccaaccattgtgtatgcccaataatttgttatcatttccttaggtagtaacctatttttgttctggtttggttcggttatctaatggaaaggtaactggcaatgcacttgatgtggtcttgcacatgtgggtgatagagttgggttcctttttatgctgggtgtacaggtgggtttgggagagaggagcatgcgcgagagagtctccgagtgtgtgcgacgcgtgtgtgtgtggtgggttgtctgtgtgcatatgtcctgcccgtgtatatgcacccacaccatgtgcccgtgcacaccagtgactacgcagtcccccctttctggtttagctgtgggaagatctgaatctggggccgtttgaaagcaaaaacaaaccactgtctctgcttctgaaacgggaatcagtaactctttgcattttctgtcccacaagatatgcaaaaacaatgcaataatattcatttaaaaatacaattgtgagttgtgttggcattaaaactgtattttaaaaaaagacagaaatttaagggaaaaacacaagaaggcattttgcttcaatatattccgtgtaatgttttattgcattgataatgtttctgttgaagaaaccgttatacttgaattcaggtcagtttcagtatttttcaaatatttttttaaaactgaattgcaattgtgccaagcgaatataatgaattgaattaagttggttttcggattcacttcttgtatattttgctgcatgtaaagtaaatcattttgtatttggagtgtgacaagctttacctttgaactcaagtgcttttctatatgtggttgggggaaagggaacaagttttctttagtttgcacaatgagcaaaggtatcaccagtgtagtcattattctgctctccacaaacaggtttggacattactgttttgcatatcttgtgtttgcttacatttccctcaatttttccaaaatcgtttgctgggtatgtttgtaccgcctct

SEQ ID NO: 419821 - DNA, 8228 bp, Homo sapiens
atggtcaatgagaatacgaggatgtacattccagaggaaaaccaccaaggttccaactatgggagcccacgccccgcccatgccaacatgaatgccaatgcggcagcggggctggcccctgagcacatccccaccccgggggctgccctgtcgtggcaggcggccatcgacgcagcccggcaggctaagctgatgggcagcgctggcaatgcgaccatctccacagtcagctccacgcagcggaagcggcagcaatatgggaaacccaagaagcagggcagcaccacggccacacgcccgccccgagccctgctctgcctgaccctgaagaaccccatccggagggcctgcatcagcattgtcgaatggaaaccatttgaaataattattttactgactatttttgccaattgtgtggccttagcgatctatattccctttccagaagatgattccaacgccaccaattccaacctggaacgagtggaatatctctttctcataatttttacggtggaagcgtttttaaaagtaatcgcctatggactcctctttcaccccaatgcctacctccgcaacggctggaacctactagattttataattgtggttgtggggctttttagtgcaattttagaacaagcaaccaaagcagatggggcaaacgctctcggagggaaaggggccggatttgatgtgaaggcgctgagggccttccgcgtgctgcgccccctgcggctggtgtccggagtcccaagtctccaggtggtcctgaattccatcatcaaggccatggtccccctgctgcacatcgccctgcttgtgctgtttgtcatcatcatctacgccatcatcggcttggagctcttcatggggaagatgcacaagacctgctacaaccaggagggcatagcagatgttccagcagaagatgacccttccccttgtgcgctggaaacgggccacgggcggcagtgccagaacggcacggtgtgcaagcccggctgggatggtcccaagcacggcatcaccaactttgacaactttgccttcgccatgctcacggtgttccagtgcatcaccatggagggctggacggacgtgctgtactgggtcaatgatgccgtaggaagggactggccctggatctattttgttacactaatcatcatagggtcattttttgtacttaacttggttctcggtgtgcttagcggagagttttccaaagagagggagaaggccaaggcccggggagatttccagaagctgcgggagaagcagcagctagaagaggatctcaaaggctacctggattggatcactcaggccgaagacatcgatcctgagaatgaggacgaaggcatggatgaggagaagccccgaaacatgagcatgcccaccagtgagaccgagtccgtcaacaccgaaaacgtggctggaggtgacatcgagggagaaaactgcggggccaggctggcccaccggatctccaagtcaaagttcagccgctactggcgccggtggaatcggttctgcagaaggaagtgccgcgccgcagtcaagtctaatgtcttctactggctggtgattttcctggtgttcctcaacacgctcaccattgcctctgagcactacaaccagcccaactggctcacagaagtccaagacacggcaaacaaggccctgctggccctgttcacggcagagatgctcctgaagatgtacagcctgggcctgcaggcctacttcgtgtccctcttcaaccgctttgactgcttcgtcgtgtgtggcggcatcctggagaccatcctggtggagaccaagatcatgtccccactgggcatctccgtgctcagatgcgtccggctgctgaggattttcaagatcacgaggtactggaactccttgagcaacctggtggcatccttgctgaactctgtgcgctccatcgcctccctgctccttctcctcttcctcttcatcatcatcttctccctcctggggatgcagctctttggaggaaagttcaactttgatgagatgcagacccggaggagcacattcgataacttcccccagtccctcctcactgtgtttcagatcctgaccggggaggactggaattcggtgatgtatgatgggatcatggcttatggcggcccctcttttccagggatgttagtctgtatttacttcatcatcctcttcatctgtggaaactatatcctactgaatgtgttcttggccattgctgtggacaacctggctgatgctgagagcctcacatctgcccaaaaggaggaggaagaggagaaggagagaaagaagctggccaggactgccagcccagagaagaaacaagagttggtggagaagccggcagtgggggaatccaaggaggagaagattgagctgaaatccatcacggctgacggagagtctccacccgccaccaagatcaacatggatgacctccagcccaatgaaaatgaggataagagcccctaccccaacccagaaactacaggagaagaggatgaggaggagccagagatgcctgtcggccctcgcccacgaccactctctgagcttcaccttaaggaaaaggcagtgcccatgccagaagccagcgcgtttttcatcttcagctctaacaacaggtttcgcctccagtgccaccgcattgtcaatgacacgatcttcaccaacctgatcctcttcttcattctgctcagcagcatttccctggctgctgaggacccggtccagcacacctccttcaggaaccatatcctaggcaatgcagactatgtcttcactagtatctttacattagaaattatccttaagatgactgcttatggggctttcttgcacaagggttctttctgccggaactacttcaacatcctggacctgctggtggtcagcgtgtccctcatctcctttggcatccagtccagtgcaatcaatgtcgtgaagatcttgcgagtcctgcgagtactcaggcccctgagggccatcaacagggccaaggggctaaagcatgtggttcagtgtgtgtttgtcgccatccggaccatcgggaacatcgtgattgtcaccaccctgctgcagttcatgtttgcctgcatcggggtccagctcttcaagggaaagctgtacacctgttcagacagttccaagcagacagaggcggaatgcaagggcaactacatcacgtacaaagacggggaggttgaccaccccatcatccaaccccgcagctgggagaacagcaagtttgactttgacaatgttctggcagccatgatggccctcttcaccgtctccaccttcgaagggtggccagagctgctgtaccgctccatcgactcccacacggaagacaagggccccatctacaactaccgtgtggagatctccatcttcttcatcatctacatcatcatcatcgccttcttcatgatgaacatcttcgtgggcttcgtcatcgtcacctttcaggagcagggggagcaggagtacaagaactgtgagctggacaagaaccagcgacagtgcgtggaatacgccctcaaggcccggcccctgcggaggtacatccccaagaaccagcaccagtacaaagtgtggtacgtggtcaactccacctacttcgagtacctgatgttcgtcctcatcctgctcaacaccatctgcctggccatgcagcactacggccagagctgcctgttcaaaatcgccatgaacatcctcaacatgctcttcactggcctcttcaccgtggagatgatcctgaagctcattgccttcaaacccaagcactatttctgtgatgcatggaatacatttgacgccttgattgttgtgggtagcattgttgatatagcaatcaccgaggtaaacccagctgaacatacccaatgctctccctctatgaacgcagaggaaaactcccgcatctccatcaccttcttccgcctgttccgggtcatgcgtctggtgaagctgctgagccgtggggagggcatccggacgctgctgtggaccttcatcaagtccttccaggccctgccctatgtggccctcctgatcgtgatgctgttcttcatctacgcggtgatcgggatgcaggtgtttgggaaaattgccctgaatgataccacagagatcaaccggaacaacaactttcagaccttcccccaggccgtgctgctcctcttcaggtgtgccaccggggaggcctggcaggacatcatgctggcctgcatgccaggcaagaagtgtgccccagagtccgagcccagcaacagcacggagggtgaaacaccctgtggtagcagctttgctgtcttctacttcatcagcttctacatgctctgtgccttcctgatcatcaacctctttgtagctgtcatcatggacaactttgactacctgacaagggactggtccatccttggtccccaccacctggatgagtttaaaagaatctgggcagagtatgaccctgaagccaagggtcgtatcaaacacctggatgtggtgaccctcctccggcggattcagccgccactaggttttgggaagctgtgccctcaccgcgtggcttgcaaacgcctggtctccatgaacatgcctctgaacagcgacgggacagtcatgttcaatgccaccctgtttgccctggtcaggacggccctgaggatcaaaacagaagagggacccagcccatcagaggcccaccaaggggctgaggatcctttccgccctgcagggaacctagaacaagccaatgaggagctgcgggcgatcatcaagaagatctggaagcggaccagcatgaagctgctggaccaggtggtgccccctgcaggtgatgatgaggtcaccgttggcaagttctacgccacgttcctgatccaggagtacttccggaagttcaagaagcgcaaagagcagggccttgtgggcaagccctcccagaggaacgcgctgtctctgcaggctggcttgcgcacactgcatgacatcgggcctgagatccgacgggccatctctggagatctcaccgctgaggaggagctggacaaggccatgaaggaggctgtgtccgctgcttctgaagatgacatcttcaggagggccggtggcctgttcggcaaccacgtcagctactaccaaagcgacggccggagcgccttcccccagaccttcaccactcagcgcccgctgcacatcaacaaggcgggcagcagccagggcgacactgagtcgccatcccacgagaagctggtggactccaccttcaccccgagcagctactcgtccaccggctccaacgccaacatcaacaacgccaacaacaccgccctgggtcgcctccctcgccccgccggctaccccagcacggtcagcactgtggagggccacgggccccccttgtcccctgccatccgggtgcaggaggtggcgtggaagctcagctccaacaggtgccactcccgggagagccaggcagccatggcgggtcaggaggagacgtctcaggatgagacctatgaagtgaagatgaaccatgacacggaggcctgcagtgagcccagcctgctctccacagagatgctctcctaccaggatgacgaaaatcggcaactgacgctcccagaggaggacaagagggacatccggcaatctccgaagaggggtttcctccgctctgcctcactaggtcgaagggcctccttccacctggaatgtctgaagcgacagaaggaccgagggggagacatctctcagaagacagtcctgcccttgcatctggttcatcatcaggcattggcagtggcaggcctgagccccctcctccagagaagccattcccctgcctcattccctaggccttttgccaccccaccagccacacctggcagccgaggctggcccccacagcccgtccccaccctgcggcttgagggggtcgagtccagtgagaaactcaacagcagcttcccatccatccactgcggctcctgggctgagaccacccccggtggcgggggcagcagcgccgcccggagagtccggcccgtctccctcatggtgcccagccaggctggggccccagggaggcagttccacggcagtgccagcagcctggtggaagcggtcttgatttcagaaggactggggcagtttgctcaagatcccaagttcatcgaggtcaccacccaggagctggccgacgcctgcgacatgaccatagaggagatggagagcgcggccgacaacatcctcagcgggggcgccccacagagccccaatggcgccctcttaccctttgtgaactgcagggacgcggggcaggaccgagccgggggcgaggaggacgcgggctgtgtgcgcgcgcggggtgcaccgagtgaggaggagctccaggacagcagggtctacgtcagcagcctgtagtgggcgctgccagatgcgggcttttttttttttatttgtttcaatgttcctaatgggttcgtttcagaagtgcctcactgttctcgtgacctggagttaaccggaacagcgtcttcattcatttctgttgggaccagacgcggagcctgggtgcgcgagccgccctccgggaggaaggcgcccggctgcgtctgcagaggcggggagaggaggcggcgagggtcccggggcgcgaggaaggcgctgccctctcccagctcgcaggccccgggccggccgcgcctctgcgggagagcaccccggcttcccgcgcgccctcaccaaaaggaccctacagcaaacggggtctttcgactctgcttgtagaaaccatttgcacatattctgtacgagcctgctgtctccctagagccagggccctgcggatttggagaagggagcggggcaggacttccaggaggaccccaacccggcccggagagggaggaggaggcctccaggggcgcggagctctggggatgggcgtcgggccggcagtggtgcggctcactccgtccctgcccacctgcgacgggatcccccgaccggcacggccacgccgagctcccggccagccgccggcccgcaggcagcgcgagggaggagctgcgccgccgggccggggccgccggctccgcccaaccaggtggtgctgagcttccgctgagcgctcttttgttttgtggtttgacacttttcttgacagcatgttgcagtttcttttcggttttggttttttttaaatgttttattttgctttcccagcgggaggggaggaagaagagtgtttacaaagtcctgtagccccctcacctttctgttttcacttttgccaatgtacatcgggtttggttttcttgtattatttaaacggttgtggtttcctttttccacggaggttcaatagaagccgctgcaggagagttttaccaaccattgtgtatgcccaataatttgttatcatttccttaggtagtaacctatttttgttctggtttggttcggttatctaatggaaaggtaactggcaatgcacttgatgtggtcttgcacatgtgggtgatagagttgggttcctttttatgctgggtgtacaggtgggtttgggagagaggagcatgcgcgagagagtctccgagtgtgtgcgacgcgtgtgtgtgtggtgggttgtctgtgtgcatatgtcctgcccgtgtatatgcacccacaccatgtgcccgtgcacaccagtgactacgcagtcccccctttctggtttagctgtgggaagatctgaatctggggccgtttgaaagcaaaaacaaaccactgtctctgcttctgaaacgggaatcagtaactctttgcattttctgtcccacaagatatgcaaaaacaatgcaataatattcatttaaaaatacaattgtgagttgtgttggcattaaaactgtattttaaaaaaagacagaaatttaagggaaaaacacaagaaggcattttgcttcaatatattccgtgtaatgttttattgcattgataatgtttctgttgaagaaaccgttatacttgaattcaggtcagtttcagtatttttcaaatatttttttaaaactgaattgcaattgtgccaagcgaatataatgaattgaattaagttggttttcggattcacttcttgtatattttgctgcatgtaaagtaaatcattttgtatttggagtgtgacaagcttt

SEQ ID NO: 419822 - DNA, 8195 bp, Homo sapiens
atggtcaatgagaatacgaggatgtacattccagaggaaaaccaccaaggttccaactatgggagcccacgccccgcccatgccaacatgaatgccaatgcggcagcggggctggcccctgagcacatccccaccccgggggctgccctgtcgtggcaggcggccatcgacgcagcccggcaggctaagctgatgggcagcgctggcaatgcgaccatctccacagtcagctccacgcagcggaagcggcagcaatatgggaaacccaagaagcagggcagcaccacggccacacgcccgccccgagccctgctctgcctgaccctgaagaaccccatccggagggcctgcatcagcattgtcgaatggaaaccatttgaaataattattttactgactatttttgccaattgtgtggccttagcgatctatattccctttccagaagatgattccaacgccaccaattccaacctggaacgagtggaatatctctttctcataatttttacggtggaagcgtttttaaaagtaatcgcctatggactcctctttcaccccaatgcctacctccgcaacggctggaacctactagattttataattgtggttgtggggctttttagtgcaattttagaacaagcaaccaaagcagatggggcaaacgctctcggagggaaaggggccggatttgatgtgaaggcgctgagggccttccgcgtgctgcgccccctgcggctggtgtccggagtcccaagtctccaggtggtcctgaattccatcatcaaggccatggtccccctgctgcacatcgccctgcttgtgctgtttgtcatcatcatctacgccatcatcggcttggagctcttcatggggaagatgcacaagacctgctacaaccaggagggcatagcagatgttccagcagaagatgacccttccccttgtgcgctggaaacgggccacgggcggcagtgccagaacggcacggtgtgcaagcccggctgggatggtcccaagcacggcatcaccaactttgacaactttgccttcgccatgctcacggtgttccagtgcatcaccatggagggctggacggacgtgctgtactgggtcaatgatgccgtaggaagggactggccctggatctattttgttacactaatcatcatagggtcattttttgtacttaacttggttctcggtgtgcttagcggagagttttccaaagagagggagaaggccaaggcccggggagatttccagaagctgcgggagaagcagcagctagaagaggatctcaaaggctacctggattggatcactcaggccgaagacatcgatcctgagaatgaggacgaaggcatggatgaggagaagccccgaaacatgagcatgcccaccagtgagaccgagtccgtcaacaccgaaaacgtggctggaggtgacatcgagggagaaaactgcggggccaggctggcccaccggatctccaagtcaaagttcagccgctactggcgccggtggaatcggttctgcagaaggaagtgccgcgccgcagtcaagtctaatgtcttctactggctggtgattttcctggtgttcctcaacacgctcaccattgcctctgagcactacaaccagcccaactggctcacagaagtccaagacacggcaaacaaggccctgctggccctgttcacggcagagatgctcctgaagatgtacagcctgggcctgcaggcctacttcgtgtccctcttcaaccgctttgactgcttcgtcgtgtgtggcggcatcctggagaccatcctggtggagaccaagatcatgtccccactgggcatctccgtgctcagatgcgtccggctgctgaggattttcaagatcacgaggtactggaactccttgagcaacctggtggcatccttgctgaactctgtgcgctccatcgcctccctgctccttctcctcttcctcttcatcatcatcttctccctcctggggatgcagctctttggaggaaagttcaactttgatgagatgcagacccggaggagcacattcgataacttcccccagtccctcctcactgtgtttcagatcctgaccggggaggactggaattcggtgatgtatgatgggatcatggcttatggcggcccctcttttccagggatgttagtctgtatttacttcatcatcctcttcatctgtggaaactatatcctactgaatgtgttcttggccattgctgtggacaacctggctgatgctgagagcctcacatctgcccaaaaggaggaggaagaggagaaggagagaaagaagctggccaggactgccagcccagagaagaaacaagagttggtggagaagccggcagtgggggaatccaaggaggagaagattgagctgaaatccatcacggctgacggagagtctccacccgccaccaagatcaacatggatgacctccagcccaatgaaaatgaggataagagcccctaccccaacccagaaactacaggagaagaggatgaggaggagccagagatgcctgtcggccctcgcccacgaccactctctgagcttcaccttaaggaaaaggcagtgcccatgccagaagccagcgcgtttttcatcttcagctctaacaacaggtttcgcctccagtgccaccgcattgtcaatgacacgatcttcaccaacctgatcctcttcttcattctgctcagcagcatttccctggctgctgaggacccggtccagcacacctccttcaggaaccatatcctaggcaatgcagactatgtcttcactagtatctttacattagaaattatccttaagatgactgcttatggggctttcttgcacaagggttctttctgccggaactacttcaacatcctggacctgctggtggtcagcgtgtccctcatctcctttggcatccagtccagtgcaatcaatgtcgtgaagatcttgcgagtcctgcgagtactcaggcccctgagggccatcaacagggccaaggggctaaagcatgtggttcagtgtgtgtttgtcgccatccggaccatcgggaacatcgtgattgtcaccaccctgctgcagttcatgtttgcctgcatcggggtccagctcttcaagggaaagctgtacacctgttcagacagttccaagcagacagaggcggaatgcaagggcaactacatcacgtacaaagacggggaggttgaccaccccatcatccaaccccgcagctgggagaacagcaagtttgactttgacaatgttctggcagccatgatggccctcttcaccgtctccaccttcgaagggtggccagagctgctgtaccgctccatcgactcccacacggaagacaagggccccatctacaactaccgtgtggagatctccatcttcttcatcatctacatcatcatcatcgccttcttcatgatgaacatcttcgtgggcttcgtcatcgtcacctttcaggagcagggggagcaggagtacaagaactgtgagctggacaagaaccagcgacagtgcgtggaatacgccctcaaggcccggcccctgcggaggtacatccccaagaaccagcaccagtacaaagtgtggtacgtggtcaactccacctacttcgagtacctgatgttcgtcctcatcctgctcaacaccatctgcctggccatgcagcactacggccagagctgcctgttcaaaatcgccatgaacatcctcaacatgctcttcactggcctcttcaccgtggagatgatcctgaagctcattgccttcaaacccaagcactatttctgtgatgcatggaatacatttgacgccttgattgttgtgggtagcattgttgatatagcaatcaccgaggtaaacaacgcagaggaaaactcccgcatctccatcaccttcttccgcctgttccgggtcatgcgtctggtgaagctgctgagccgtggggagggcatccggacgctgctgtggaccttcatcaagtccttccaggccctgccctatgtggccctcctgatcgtgatgctgttcttcatctacgcggtgatcgggatgcaggtgtttgggaaaattgccctgaatgataccacagagatcaaccggaacaacaactttcagaccttcccccaggccgtgctgctcctcttcaggtgtgccaccggggaggcctggcaggacatcatgctggcctgcatgccaggcaagaagtgtgccccagagtccgagcccagcaacagcacggagggtgaaacaccctgtggtagcagctttgctgtcttctacttcatcagcttctacatgctctgtgccttcctgatcatcaacctctttgtagctgtcatcatggacaactttgactacctgacaagggactggtccatccttggtccccaccacctggatgagtttaaaagaatctgggcagagtatgaccctgaagccaagggtcgtatcaaacacctggatgtggtgaccctcctccggcggattcagccgccactaggttttgggaagctgtgccctcaccgcgtggcttgcaaacgcctggtctccatgaacatgcctctgaacagcgacgggacagtcatgttcaatgccaccctgtttgccctggtcaggacggccctgaggatcaaaacagaagagggacccagcccatcagaggcccaccaaggggctgaggatcctttccgccctgcagggaacctagaacaagccaatgaggagctgcgggcgatcatcaagaagatctggaagcggaccagcatgaagctgctggaccaggtggtgccccctgcaggtgatgatgaggtcaccgttggcaagttctacgccacgttcctgatccaggagtacttccggaagttcaagaagcgcaaagagcagggccttgtgggcaagccctcccagaggaacgcgctgtctctgcaggctggcttgcgcacactgcatgacatcgggcctgagatccgacgggccatctctggagatctcaccgctgaggaggagctggacaaggccatgaaggaggctgtgtccgctgcttctgaagatgacatcttcaggagggccggtggcctgttcggcaaccacgtcagctactaccaaagcgacggccggagcgccttcccccagaccttcaccactcagcgcccgctgcacatcaacaaggcgggcagcagccagggcgacactgagtcgccatcccacgagaagctggtggactccaccttcaccccgagcagctactcgtccaccggctccaacgccaacatcaacaacgccaacaacaccgccctgggtcgcctccctcgccccgccggctaccccagcacggtcagcactgtggagggccacgggccccccttgtcccctgccatccgggtgcaggaggtggcgtggaagctcagctccaacaggtgccactcccgggagagccaggcagccatggcgggtcaggaggagacgtctcaggatgagacctatgaagtgaagatgaaccatgacacggaggcctgcagtgagcccagcctgctctccacagagatgctctcctaccaggatgacgaaaatcggcaactgacgctcccagaggaggacaagagggacatccggcaatctccgaagaggggtttcctccgctctgcctcactaggtcgaagggcctccttccacctggaatgtctgaagcgacagaaggaccgagggggagacatctctcagaagacagtcctgcccttgcatctggttcatcatcaggcattggcagtggcaggcctgagccccctcctccagagaagccattcccctgcctcattccctaggccttttgccaccccaccagccacacctggcagccgaggctggcccccacagcccgtccccaccctgcggcttgagggggtcgagtccagtgagaaactcaacagcagcttcccatccatccactgcggctcctgggctgagaccacccccggtggcgggggcagcagcgccgcccggagagtccggcccgtctccctcatggtgcccagccaggctggggccccagggaggcagttccacggcagtgccagcagcctggtggaagcggtcttgatttcagaaggactggggcagtttgctcaagatcccaagttcatcgaggtcaccacccaggagctggccgacgcctgcgacatgaccatagaggagatggagagcgcggccgacaacatcctcagcgggggcgccccacagagccccaatggcgccctcttaccctttgtgaactgcagggacgcggggcaggaccgagccgggggcgaggaggacgcgggctgtgtgcgcgcgcggggtgcaccgagtgaggaggagctccaggacagcagggtctacgtcagcagcctgtagtgggcgctgccagatgcgggcttttttttttttatttgtttcaatgttcctaatgggttcgtttcagaagtgcctcactgttctcgtgacctggagttaaccggaacagcgtcttcattcatttctgttgggaccagacgcggagcctgggtgcgcgagccgccctccgggaggaaggcgcccggctgcgtctgcagaggcggggagaggaggcggcgagggtcccggggcgcgaggaaggcgctgccctctcccagctcgcaggccccgggccggccgcgcctctgcgggagagcaccccggcttcccgcgcgccctcaccaaaaggaccctacagcaaacggggtctttcgactctgcttgtagaaaccatttgcacatattctgtacgagcctgctgtctccctagagccagggccctgcggatttggagaagggagcggggcaggacttccaggaggaccccaacccggcccggagagggaggaggaggcctccaggggcgcggagctctggggatgggcgtcgggccggcagtggtgcggctcactccgtccctgcccacctgcgacgggatcccccgaccggcacggccacgccgagctcccggccagccgccggcccgcaggcagcgcgagggaggagctgcgccgccgggccggggccgccggctccgcccaaccaggtggtgctgagcttccgctgagcgctcttttgttttgtggtttgacacttttcttgacagcatgttgcagtttcttttcggttttggttttttttaaatgttttattttgctttcccagcgggaggggaggaagaagagtgtttacaaagtcctgtagccccctcacctttctgttttcacttttgccaatgtacatcgggtttggttttcttgtattatttaaacggttgtggtttcctttttccacggaggttcaatagaagccgctgcaggagagttttaccaaccattgtgtatgcccaataatttgttatcatttccttaggtagtaacctatttttgttctggtttggttcggttatctaatggaaaggtaactggcaatgcacttgatgtggtcttgcacatgtgggtgatagagttgggttcctttttatgctgggtgtacaggtgggtttgggagagaggagcatgcgcgagagagtctccgagtgtgtgcgacgcgtgtgtgtgtggtgggttgtctgtgtgcatatgtcctgcccgtgtatatgcacccacaccatgtgcccgtgcacaccagtgactacgcagtcccccctttctggtttagctgtgggaagatctgaatctggggccgtttgaaagcaaaaacaaaccactgtctctgcttctgaaacgggaatcagtaactctttgcattttctgtcccacaagatatgcaaaaacaatgcaataatattcatttaaaaatacaattgtgagttgtgttggcattaaaactgtattttaaaaaaagacagaaatttaagggaaaaacacaagaaggcattttgcttcaatatattccgtgtaatgttttattgcattgataatgtttctgttgaagaaaccgttatacttgaattcaggtcagtttcagtatttttcaaatatttttttaaaactgaattgcaattgtgccaagcgaatataatgaattgaattaagttggttttcggattcacttcttgtatattttgctgcatgtaaagtaaatcattttgtatttggagtgtgacaagcttt

SEQ ID NO: 419823 - DNA, 8315 bp, Homo sapiens
atggtcaatgagaatacgaggatgtacattccagaggaaaaccaccaaggttccaactatgggagcccacgccccgcccatgccaacatgaatgccaatgcggcagcggggctggcccctgagcacatccccaccccgggggctgccctgtcgtggcaggcggccatcgacgcagcccggcaggctaagctgatgggcagcgctggcaatgcgaccatctccacagtcagctccacgcagcggaagcggcagcaatatgggaaacccaagaagcagggcagcaccacggccacacgcccgccccgagccctgctctgcctgaccctgaagaaccccatccggagggcctgcatcagcattgtcgaatggaaaccatttgaaataattattttactgactatttttgccaattgtgtggccttagcgatctatattccctttccagaagatgattccaacgccaccaattccaacctggaacgagtggaatatctctttctcataatttttacggtggaagcgtttttaaaagtaatcgcctatggactcctctttcaccccaatgcctacctccgcaacggctggaacctactagattttataattgtggttgtggggctttttagtgcaattttagaacaagcaaccaaagcagatggggcaaacgctctcggagggaaaggggccggatttgatgtgaaggcgctgagggccttccgcgtgctgcgccccctgcggctggtgtccggagtcccaagtctccaggtggtcctgaattccatcatcaaggccatggtccccctgctgcacatcgccctgcttgtgctgtttgtcatcatcatctacgccatcatcggcttggagctcttcatggggaagatgcacaagacctgctacaaccaggagggcatagcagatgttccagcagaagatgacccttccccttgtgcgctggaaacgggccacgggcggcagtgccagaacggcacggtgtgcaagcccggctgggatggtcccaagcacggcatcaccaactttgacaactttgccttcgccatgctcacggtgttccagtgcatcaccatggagggctggacggacgtgctgtactgggtcaatgatgccgtaggaagggactggccctggatctattttgttacactaatcatcatagggtcattttttgtacttaacttggttctcggtgtgcttagcggagagttttccaaagagagggagaaggccaaggcccggggagatttccagaagctgcgggagaagcagcagctagaagaggatctcaaaggctacctggattggatcactcaggccgaagacatcgatcctgagaatgaggacgaaggcatggatgaggagaagccccgaaacatgagcatgcccaccagtgagaccgagtccgtcaacaccgaaaacgtggctggaggtgacatcgagggagaaaactgcggggccaggctggcccaccggatctccaagtcaaagttcagccgctactggcgccggtggaatcggttctgcagaaggaagtgccgcgccgcagtcaagtctaatgtcttctactggctggtgattttcctggtgttcctcaacacgctcaccattgcctctgagcactacaaccagcccaactggctcacagaagtccaagacacggcaaacaaggccctgctggccctgttcacggcagagatgctcctgaagatgtacagcctgggcctgcaggcctacttcgtgtccctcttcaaccgctttgactgcttcgtcgtgtgtggcggcatcctggagaccatcctggtggagaccaagatcatgtccccactgggcatctccgtgctcagatgcgtccggctgctgaggattttcaagatcacgaggtactggaactccttgagcaacctggtggcatccttgctgaactctgtgcgctccatcgcctccctgctccttctcctcttcctcttcatcatcatcttctccctcctggggatgcagctctttggaggaaagttcaactttgatgagatgcagacccggaggagcacattcgataacttcccccagtccctcctcactgtgtttcagatcctgaccggggaggactggaattcggtgatgtatgatgggatcatggcttatggcggcccctcttttccagggatgttagtctgtatttacttcatcatcctcttcatctgtggaaactatatcctactgaatgtgttcttggccattgctgtggacaacctggctgatgctgagagcctcacatctgcccaaaaggaggaggaagaggagaaggagagaaagaagctggccaggactgccagcccagagaagaaacaagagttggtggagaagccggcagtgggggaatccaaggaggagaagattgagctgaaatccatcacggctgacggagagtctccacccgccaccaagatcaacatggatgacctccagcccaatgaaaatgaggataagagcccctaccccaacccagaaactacaggagaagaggatgaggaggagccagagatgcctgtcggccctcgcccacgaccactctctgagcttcaccttaaggaaaaggcagtgcccatgccagaagccagcgcgtttttcatcttcagctctaacaacaggtttcgcctccagtgccaccgcattgtcaatgacacgatcttcaccaacctgatcctcttcttcattctgctcagcagcatttccctggctgctgaggacccggtccagcacacctccttcaggaaccatattctgttttattttgatattgtttttaccaccattttcaccattgaaattgctctgaagatcctaggcaatgcagactatgtcttcactagtatctttacattagaaattatccttaagatgactgcttatggggctttcttgcacaagggttctttctgccggaactacttcaacatcctggacctgctggtggtcagcgtgtccctcatctcctttggcatccagtccagtgcaatcaatgtcgtgaagatcttgcgagtcctgcgagtactcaggcccctgagggccatcaacagggccaaggggctaaagcatgtggttcagtgtgtgtttgtcgccatccggaccatcgggaacatcgtgattgtcaccaccctgctgcagttcatgtttgcctgcatcggggtccagctcttcaagggaaagctgtacacctgttcagacagttccaagcagacagaggcggaatgcaagggcaactacatcacgtacaaagacggggaggttgaccaccccatcatccaaccccgcagctgggagaacagcaagtttgactttgacaatgttctggcagccatgatggccctcttcaccgtctccaccttcgaagggtggccagagctgctgtaccgctccatcgactcccacacggaagacaagggccccatctacaactaccgtgtggagatctccatcttcttcatcatctacatcatcatcatcgccttcttcatgatgaacatcttcgtgggcttcgtcatcgtcacctttcaggagcagggggagcaggagtacaagaactgtgagctggacaagaaccagcgacagtgcgtggaatacgccctcaaggcccggcccctgcggaggtacatccccaagaaccagcaccagtacaaagtgtggtacgtggtcaactccacctacttcgagtacctgatgttcgtcctcatcctgctcaacaccatctgcctggccatgcagcactacggccagagctgcctgttcaaaatcgccatgaacatcctcaacatgctcttcactggcctcttcaccgtggagatgatcctgaagctcattgccttcaaacccaagggttactttagtgatccctggaatgtttttgacttcctcatcgtaattggcagcataattgacgtcattctcagtgagactaatcactatttctgtgatgcatggaatacatttgacgccttgattgttgtgggtagcattgttgatatagcaatcaccgaggtaaacccagctgaacatacccaatgctctccctctatgaacgcagaggaaaactcccgcatctccatcaccttcttccgcctgttccgggtcatgcgtctggtgaagctgctgagccgtggggagggcatccggacgctgctgtggaccttcatcaagtccttccaggccctgccctatgtggccctcctgatcgtgatgctgttcttcatctacgcggtgatcgggatgcaggtgtttgggaaaattgccctgaatgataccacagagatcaaccggaacaacaactttcagaccttcccccaggccgtgctgctcctcttcaggtgtgccaccggggaggcctggcaggacatcatgctggcctgcatgccaggcaagaagtgtgccccagagtccgagcccagcaacagcacggagggtgaaacaccctgtggtagcagctttgctgtcttctacttcatcagcttctacatgctctgtgccttcctgatcatcaacctctttgtagctgtcatcatggacaactttgactacctgacaagggactggtccatccttggtccccaccacctggatgagtttaaaagaatctgggcagagtatgaccctgaagccaagggtcgtatcaaacacctggatgtggtgaccctcctccggcggattcagccgccactaggttttgggaagctgtgccctcaccgcgtggcttgcaaacgcctggtctccatgaacatgcctctgaacagcgacgggacagtcatgttcaatgccaccctgtttgccctggtcaggacggccctgaggatcaaaacagaagggaacctagaacaagccaatgaggagctgcgggcgatcatcaagaagatctggaagcggaccagcatgaagctgctggaccaggtggtgccccctgcaggtgatgatgaggtcaccgttggcaagttctacgccacgttcctgatccaggagtacttccggaagttcaagaagcgcaaagagcagggccttgtgggcaagccctcccagaggaacgcgctgtctctgcaggctggcttgcgcacactgcatgacatcgggcctgagatccgacgggccatctctggagatctcaccgctgaggaggagctggacaaggccatgaaggaggctgtgtccgctgcttctgaagatgacatcttcaggagggccggtggcctgttcggcaaccacgtcagctactaccaaagcgacggccggagcgccttcccccagaccttcaccactcagcgcccgctgcacatcaacaaggcgggcagcagccagggcgacactgagtcgccatcccacgagaagctggtggactccaccttcaccccgagcagctactcgtccaccggctccaacgccaacatcaacaacgccaacaacaccgccctgggtcgcctccctcgccccgccggctaccccagcacggtcagcactgtggagggccacgggccccccttgtcccctgccatccgggtgcaggaggtggcgtggaagctcagctccaacaggtgccactcccgggagagccaggcagccatggcgggtcaggaggagacgtctcaggatgagacctatgaagtgaagatgaaccatgacacggaggcctgcagtgagcccagcctgctctccacagagatgctctcctaccaggatgacgaaaatcggcaactgacgctcccagaggaggacaagagggacatccggcaatctccgaagaggggtttcctccgctctgcctcactaggtcgaagggcctccttccacctggaatgtctgaagcgacagaaggaccgagggggagacatctctcagaagacagtcctgcccttgcatctggttcatcatcaggcattggcagtggcaggcctgagccccctcctccagagaagccattcccctgcctcattccctaggccttttgccaccccaccagccacacctggcagccgaggctggcccccacagcccgtccccaccctgcggcttgagggggtcgagtccagtgagaaactcaacagcagcttcccatccatccactgcggctcctgggctgagaccacccccggtggcgggggcagcagcgccgcccggagagtccggcccgtctccctcatggtgcccagccaggctggggccccagggaggcagttccacggcagtgccagcagcctggtggaagcggtcttgatttcagaaggactggggcagtttgctcaagatcccaagttcatcgaggtcaccacccaggagctggccgacgcctgcgacatgaccatagaggagatggagagcgcggccgacaacatcctcagcgggggcgccccacagagccccaatggcgccctcttaccctttgtgaactgcagggacgcggggcaggaccgagccgggggcgaggaggacgcgggctgtgtgcgcgcgcggggtgcaccgagtgaggaggagctccaggacagcagggtctacgtcagcagcctgtagtgggcgctgccagatgcgggcttttttttttttatttgtttcaatgttcctaatgggttcgtttcagaagtgcctcactgttctcgtgacctggagttaaccggaacagcgtcttcattcatttctgttgggaccagacgcggagcctgggtgcgcgagccgccctccgggaggaaggcgcccggctgcgtctgcagaggcggggagaggaggcggcgagggtcccggggcgcgaggaaggcgctgccctctcccagctcgcaggccccgggccggccgcgcctctgcgggagagcaccccggcttcccgcgcgccctcaccaaaaggaccctacagcaaacggggtctttcgactctgcttgtagaaaccatttgcacatattctgtacgagcctgctgtctccctagagccagggccctgcggatttggagaagggagcggggcaggacttccaggaggaccccaacccggcccggagagggaggaggaggcctccaggggcgcggagctctggggatgggcgtcgggccggcagtggtgcggctcactccgtccctgcccacctgcgacgggatcccccgaccggcacggccacgccgagctcccggccagccgccggcccgcaggcagcgcgagggaggagctgcgccgccgggccggggccgccggctccgcccaaccaggtggtgctgagcttccgctgagcgctcttttgttttgtggtttgacacttttcttgacagcatgttgcagtttcttttcggttttggttttttttaaatgttttattttgctttcccagcgggaggggaggaagaagagtgtttacaaagtcctgtagccccctcacctttctgttttcacttttgccaatgtacatcgggtttggttttcttgtattatttaaacggttgtggtttcctttttccacggaggttcaatagaagccgctgcaggagagttttaccaaccattgtgtatgcccaataatttgttatcatttccttaggtagtaacctatttttgttctggtttggttcggttatctaatggaaaggtaactggcaatgcacttgatgtggtcttgcacatgtgggtgatagagttgggttcctttttatgctgggtgtacaggtgggtttgggagagaggagcatgcgcgagagagtctccgagtgtgtgcgacgcgtgtgtgtgtggtgggttgtctgtgtgcatatgtcctgcccgtgtatatgcacccacaccatgtgcccgtgcacaccagtgactacgcagtcccccctttctggtttagctgtgggaagatctgaatctggggccgtttgaaagcaaaaacaaaccactgtctctgcttctgaaacgggaatcagtaactctttgcattttctgtcccacaagatatgcaaaaacaatgcaataatattcatttaaaaatacaattgtgagttgtgttggcattaaaactgtattttaaaaaaagacagaaatttaagggaaaaacacaagaaggcattttgcttcaatatattccgtgtaatgttttattgcattgataatgtttctgttgaagaaaccgttatacttgaattcaggtcagtttcagtatttttcaaatatttttttaaaactgaattgcaattgtgccaagcgaatataatgaattgaattaagttggttttcggattcacttcttgtatattttgctgcatgtaaagtaaatcattttgtatttggagtgtgacaagcttt

SEQ ID NO: 419824 - DNA, 8231 bp, Homo sapiens
atggtcaatgagaatacgaggatgtacattccagaggaaaaccaccaaggttccaactatgggagcccacgccccgcccatgccaacatgaatgccaatgcggcagcggggctggcccctgagcacatccccaccccgggggctgccctgtcgtggcaggcggccatcgacgcagcccggcaggctaagctgatgggcagcgctggcaatgcgaccatctccacagtcagctccacgcagcggaagcggcagcaatatgggaaacccaagaagcagggcagcaccacggccacacgcccgccccgagccctgctctgcctgaccctgaagaaccccatccggagggcctgcatcagcattgtcgaatggaaaccatttgaaataattattttactgactatttttgccaattgtgtggccttagcgatctatattccctttccagaagatgattccaacgccaccaattccaacctggaacgagtggaatatctctttctcataatttttacggtggaagcgtttttaaaagtaatcgcctatggactcctctttcaccccaatgcctacctccgcaacggctggaacctactagattttataattgtggttgtggggctttttagtgcaattttagaacaagcaaccaaagcagatggggcaaacgctctcggagggaaaggggccggatttgatgtgaaggcgctgagggccttccgcgtgctgcgccccctgcggctggtgtccggagtcccaagtctccaggtggtcctgaattccatcatcaaggccatggtccccctgctgcacatcgccctgcttgtgctgtttgtcatcatcatctacgccatcatcggcttggagctcttcatggggaagatgcacaagacctgctacaaccaggagggcatagcagatgttccagcagaagatgacccttccccttgtgcgctggaaacgggccacgggcggcagtgccagaacggcacggtgtgcaagcccggctgggatggtcccaagcacggcatcaccaactttgacaactttgccttcgccatgctcacggtgttccagtgcatcaccatggagggctggacggacgtgctgtactgggtcaatgatgccgtaggaagggactggccctggatctattttgttacactaatcatcatagggtcattttttgtacttaacttggttctcggtgtgcttagcggagagttttccaaagagagggagaaggccaaggcccggggagatttccagaagctgcgggagaagcagcagctagaagaggatctcaaaggctacctggattggatcactcaggccgaagacatcgatcctgagaatgaggacgaaggcatggatgaggagaagccccgaaacatgagcatgcccaccagtgagaccgagtccgtcaacaccgaaaacgtggctggaggtgacatcgagggagaaaactgcggggccaggctggcccaccggatctccaagtcaaagttcagccgctactggcgccggtggaatcggttctgcagaaggaagtgccgcgccgcagtcaagtctaatgtcttctactggctggtgattttcctggtgttcctcaacacgctcaccattgcctctgagcactacaaccagcccaactggctcacagaagtccaagacacggcaaacaaggccctgctggccctgttcacggcagagatgctcctgaagatgtacagcctgggcctgcaggcctacttcgtgtccctcttcaaccgctttgactgcttcgtcgtgtgtggcggcatcctggagaccatcctggtggagaccaagatcatgtccccactgggcatctccgtgctcagatgcgtccggctgctgaggattttcaagatcacgaggtactggaactccttgagcaacctggtggcatccttgctgaactctgtgcgctccatcgcctccctgctccttctcctcttcctcttcatcatcatcttctccctcctggggatgcagctctttggaggaaagttcaactttgatgagatgcagacccggaggagcacattcgataacttcccccagtccctcctcactgtgtttcagatcctgaccggggaggactggaattcggtgatgtatgatgggatcatggcttatggcggcccctcttttccagggatgttagtctgtatttacttcatcatcctcttcatctgtggaaactatatcctactgaatgtgttcttggccattgctgtggacaacctggctgatgctgagagcctcacatctgcccaaaaggaggaggaagaggagaaggagagaaagaagctggccaggactgccagcccagagaagaaacaagagttggtggagaagccggcagtgggggaatccaaggaggagaagattgagctgaaatccatcacggctgacggagagtctccacccgccaccaagatcaacatggatgacctccagcccaatgaaaatgaggataagagcccctaccccaacccagaaactacaggagaagaggatgaggaggagccagagatgcctgtcggccctcgcccacgaccactctctgagcttcaccttaaggaaaaggcagtgcccatgccagaagccagcgcgtttttcatcttcagctctaacaacaggtttcgcctccagtgccaccgcattgtcaatgacacgatcttcaccaacctgatcctcttcttcattctgctcagcagcatttccctggctgctgaggacccggtccagcacacctccttcaggaaccatattctgttttattttgatattgtttttaccaccattttcaccattgaaattgctctgaagatcctaggcaatgcagactatgtcttcactagtatctttacattagaaattatccttaagatgactgcttatggggctttcttgcacaagggttctttctgccggaactacttcaacatcctggacctgctggtggtcagcgtgtccctcatctcctttggcatccagtccagtgcaatcaatgtcgtgaagatcttgcgagtcctgcgagtactcaggcccctgagggccatcaacagggccaaggggctaaagcatgtggttcagtgtgtgtttgtcgccatccggaccatcgggaacatcgtgattgtcaccaccctgctgcagttcatgtttgcctgcatcggggtccagctcttcaagggaaagctgtacacctgttcagacagttccaagcagacagaggcggaatgcaagggcaactacatcacgtacaaagacggggaggttgaccaccccatcatccaaccccgcagctgggagaacagcaagtttgactttgacaatgttctggcagccatgatggccctcttcaccgtctccaccttcgaagggtggccagagctgctgtaccgctccatcgactcccacacggaagacaagggccccatctacaactaccgtgtggagatctccatcttcttcatcatctacatcatcatcatcgccttcttcatgatgaacatcttcgtgggcttcgtcatcgtcacctttcaggagcagggggagcaggagtacaagaactgtgagctggacaagaaccagcgacagtgcgtggaatacgccctcaaggcccggcccctgcggaggtacatccccaagaaccagcaccagtacaaagtgtggtacgtggtcaactccacctacttcgagtacctgatgttcgtcctcatcctgctcaacaccatctgcctggccatgcagcactacggccagagctgcctgttcaaaatcgccatgaacatcctcaacatgctcttcactggcctcttcaccgtggagatgatcctgaagctcattgccttcaaacccaagcactatttctgtgatgcatggaatacatttgacgccttgattgttgtgggtagcattgttgatatagcaatcaccgaggtaaacccagctgaacatacccaatgctctccctctatgaacgcagaggaaaactcccgcatctccatcaccttcttccgcctgttccgggtcatgcgtctggtgaagctgctgagccgtggggagggcatccggacgctgctgtggaccttcatcaagtccttccaggccctgccctatgtggccctcctgatcgtgatgctgttcttcatctacgcggtgatcgggatgcaggtgtttgggaaaattgccctgaatgataccacagagatcaaccggaacaacaactttcagaccttcccccaggccgtgctgctcctcttcaggtgtgccaccggggaggcctggcaggacatcatgctggcctgcatgccaggcaagaagtgtgccccagagtccgagcccagcaacagcacggagggtgaaacaccctgtggtagcagctttgctgtcttctacttcatcagcttctacatgctctgtgccttcctgatcatcaacctctttgtagctgtcatcatggacaactttgactacctgacaagggactggtccatccttggtccccaccacctggatgagtttaaaagaatctgggcagagtatgaccctgaagccaagggtcgtatcaaacacctggatgtggtgaccctcctccggcggattcagccgccactaggttttgggaagctgtgccctcaccgcgtggcttgcaaacgcctggtctccatgaacatgcctctgaacagcgacgggacagtcatgttcaatgccaccctgtttgccctggtcaggacggccctgaggatcaaaacagaagggaacctagaacaagccaatgaggagctgcgggcgatcatcaagaagatctggaagcggaccagcatgaagctgctggaccaggtggtgccccctgcaggtgatgatgaggtcaccgttggcaagttctacgccacgttcctgatccaggagtacttccggaagttcaagaagcgcaaagagcagggccttgtgggcaagccctcccagaggaacgcgctgtctctgcaggctggcttgcgcacactgcatgacatcgggcctgagatccgacgggccatctctggagatctcaccgctgaggaggagctggacaaggccatgaaggaggctgtgtccgctgcttctgaagatgacatcttcaggagggccggtggcctgttcggcaaccacgtcagctactaccaaagcgacggccggagcgccttcccccagaccttcaccactcagcgcccgctgcacatcaacaaggcgggcagcagccagggcgacactgagtcgccatcccacgagaagctggtggactccaccttcaccccgagcagctactcgtccaccggctccaacgccaacatcaacaacgccaacaacaccgccctgggtcgcctccctcgccccgccggctaccccagcacggtcagcactgtggagggccacgggccccccttgtcccctgccatccgggtgcaggaggtggcgtggaagctcagctccaacaggtgccactcccgggagagccaggcagccatggcgggtcaggaggagacgtctcaggatgagacctatgaagtgaagatgaaccatgacacggaggcctgcagtgagcccagcctgctctccacagagatgctctcctaccaggatgacgaaaatcggcaactgacgctcccagaggaggacaagagggacatccggcaatctccgaagaggggtttcctccgctctgcctcactaggtcgaagggcctccttccacctggaatgtctgaagcgacagaaggaccgagggggagacatctctcagaagacagtcctgcccttgcatctggttcatcatcaggcattggcagtggcaggcctgagccccctcctccagagaagccattcccctgcctcattccctaggccttttgccaccccaccagccacacctggcagccgaggctggcccccacagcccgtccccaccctgcggcttgagggggtcgagtccagtgagaaactcaacagcagcttcccatccatccactgcggctcctgggctgagaccacccccggtggcgggggcagcagcgccgcccggagagtccggcccgtctccctcatggtgcccagccaggctggggccccagggaggcagttccacggcagtgccagcagcctggtggaagcggtcttgatttcagaaggactggggcagtttgctcaagatcccaagttcatcgaggtcaccacccaggagctggccgacgcctgcgacatgaccatagaggagatggagagcgcggccgacaacatcctcagcgggggcgccccacagagccccaatggcgccctcttaccctttgtgaactgcagggacgcggggcaggaccgagccgggggcgaggaggacgcgggctgtgtgcgcgcgcggggtgcaccgagtgaggaggagctccaggacagcagggtctacgtcagcagcctgtagtgggcgctgccagatgcgggcttttttttttttatttgtttcaatgttcctaatgggttcgtttcagaagtgcctcactgttctcgtgacctggagttaaccggaacagcgtcttcattcatttctgttgggaccagacgcggagcctgggtgcgcgagccgccctccgggaggaaggcgcccggctgcgtctgcagaggcggggagaggaggcggcgagggtcccggggcgcgaggaaggcgctgccctctcccagctcgcaggccccgggccggccgcgcctctgcgggagagcaccccggcttcccgcgcgccctcaccaaaaggaccctacagcaaacggggtctttcgactctgcttgtagaaaccatttgcacatattctgtacgagcctgctgtctccctagagccagggccctgcggatttggagaagggagcggggcaggacttccaggaggaccccaacccggcccggagagggaggaggaggcctccaggggcgcggagctctggggatgggcgtcgggccggcagtggtgcggctcactccgtccctgcccacctgcgacgggatcccccgaccggcacggccacgccgagctcccggccagccgccggcccgcaggcagcgcgagggaggagctgcgccgccgggccggggccgccggctccgcccaaccaggtggtgctgagcttccgctgagcgctcttttgttttgtggtttgacacttttcttgacagcatgttgcagtttcttttcggttttggttttttttaaatgttttattttgctttcccagcgggaggggaggaagaagagtgtttacaaagtcctgtagccccctcacctttctgttttcacttttgccaatgtacatcgggtttggttttcttgtattatttaaacggttgtggtttcctttttccacggaggttcaatagaagccgctgcaggagagttttaccaaccattgtgtatgcccaataatttgttatcatttccttaggtagtaacctatttttgttctggtttggttcggttatctaatggaaaggtaactggcaatgcacttgatgtggtcttgcacatgtgggtgatagagttgggttcctttttatgctgggtgtacaggtgggtttgggagagaggagcatgcgcgagagagtctccgagtgtgtgcgacgcgtgtgtgtgtggtgggttgtctgtgtgcatatgtcctgcccgtgtatatgcacccacaccatgtgcccgtgcacaccagtgactacgcagtcccccctttctggtttagctgtgggaagatctgaatctggggccgtttgaaagcaaaaacaaaccactgtctctgcttctgaaacgggaatcagtaactctttgcattttctgtcccacaagatatgcaaaaacaatgcaataatattcatttaaaaatacaattgtgagttgtgttggcattaaaactgtattttaaaaaaagacagaaatttaagggaaaaacacaagaaggcattttgcttcaatatattccgtgtaatgttttattgcattgataatgtttctgttgaagaaaccgttatacttgaattcaggtcagtttcagtatttttcaaatatttttttaaaactgaattgcaattgtgccaagcgaatataatgaattgaattaagttggttttcggattcacttcttgtatattttgctgcatgtaaagtaaatcattttgtatttggagtgtgacaagcttt

SEQ ID NO: 419825 - DNA, 8138 bp, Homo sapiens
atggtcaatgagaatacgaggatgtacattccagaggaaaaccaccaaggttccaactatgggagcccacgccccgcccatgccaacatgaatgccaatgcggcagcggggctggcccctgagcacatccccaccccgggggctgccctgtcgtggcaggcggccatcgacgcagcccggcaggctaagctgatgggcagcgctggcaatgcgaccatctccacagtcagctccacgcagcggaagcggcagcaatatgggaaacccaagaagcagggcagcaccacggccacacgcccgccccgagccctgctctgcctgaccctgaagaaccccatccggagggcctgcatcagcattgtcgaatggaaaccatttgaaataattattttactgactatttttgccaattgtgtggccttagcgatctatattccctttccagaagatgattccaacgccaccaattccaacctggaacgagtggaatatctctttctcataatttttacggtggaagcgtttttaaaagtaatcgcctatggactcctctttcaccccaatgcctacctccgcaacggctggaacctactagattttataattgtggttgtggggctttttagtgcaattttagaacaagcaaccaaagcagatggggcaaacgctctcggagggaaaggggccggatttgatgtgaaggcgctgagggccttccgcgtgctgcgccccctgcggctggtgtccggagtcccaagtctccaggtggtcctgaattccatcatcaaggccatggtccccctgctgcacatcgccctgcttgtgctgtttgtcatcatcatctacgccatcatcggcttggagctcttcatggggaagatgcacaagacctgctacaaccaggagggcatagcagatgttccagcagaagatgacccttccccttgtgcgctggaaacgggccacgggcggcagtgccagaacggcacggtgtgcaagcccggctgggatggtcccaagcacggcatcaccaactttgacaactttgccttcgccatgctcacggtgttccagtgcatcaccatggagggctggacggacgtgctgtactgggtcaatgatgccgtaggaagggactggccctggatctattttgttacactaatcatcatagggtcattttttgtacttaacttggttctcggtgtgcttagcggagagttttccaaagagagggagaaggccaaggcccggggagatttccagaagctgcgggagaagcagcagctagaagaggatctcaaaggctacctggattggatcactcaggccgaagacatcgatcctgagaatgaggacgaaggcatggatgaggagaagccccgaaacatgagcatgcccaccagtgagaccgagtccgtcaacaccgaaaacgtggctggaggtgacatcgagggagaaaactgcggggccaggctggcccaccggatctccaagtcaaagttcagccgctactggcgccggtggaatcggttctgcagaaggaagtgccgcgccgcagtcaagtctaatgtcttctactggctggtgattttcctggtgttcctcaacacgctcaccattgcctctgagcactacaaccagcccaactggctcacagaagtccaagacacggcaaacaaggccctgctggccctgttcacggcagagatgctcctgaagatgtacagcctgggcctgcaggcctacttcgtgtccctcttcaaccgctttgactgcttcgtcgtgtgtggcggcatcctggagaccatcctggtggagaccaagatcatgtccccactgggcatctccgtgctcagatgcgtccggctgctgaggattttcaagatcacgaggtactggaactccttgagcaacctggtggcatccttgctgaactctgtgcgctccatcgcctccctgctccttctcctcttcctcttcatcatcatcttctccctcctggggatgcagctctttggaggaaagttcaactttgatgagatgcagacccggaggagcacattcgataacttcccccagtccctcctcactgtgtttcagatcctgaccggggaggactggaattcggtgatgtatgatgggatcatggcttatggcggcccctcttttccagggatgttagtctgtatttacttcatcatcctcttcatctgtggaaactatatcctactgaatgtgttcttggccattgctgtggacaacctggctgatgctgagagcctcacatctgcccaaaaggaggaggaagaggagaaggagagaaagaagctggccaggactgccagcccagagaagaaacaagagttggtggagaagccggcagtgggggaatccaaggaggagaagattgagctgaaatccatcacggctgacggagagtctccacccgccaccaagatcaacatggatgacctccagcccaatgaaaatgaggataagagcccctaccccaacccagaaactacaggagaagaggatgaggaggagccagagatgcctgtcggccctcgcccacgaccactctctgagcttcaccttaaggaaaaggcagtgcccatgccagaagccagcgcgtttttcatcttcagctctaacaacaggtttcgcctccagtgccaccgcattgtcaatgacacgatcttcaccaacctgatcctcttcttcattctgctcagcagcatttccctggctgctgaggacccggtccagcacacctccttcaggaaccatatcctaggcaatgcagactatgtcttcactagtatctttacattagaaattatccttaagatgactgcttatggggctttcttgcacaagggttctttctgccggaactacttcaacatcctggacctgctggtggtcagcgtgtccctcatctcctttggcatccagtccagtgcaatcaatgtcgtgaagatcttgcgagtcctgcgagtactcaggcccctgagggccatcaacagggccaaggggctaaagcatgtggttcagtgtgtgtttgtcgccatccggaccatcgggaacatcgtgattgtcaccaccctgctgcagttcatgtttgcctgcatcggggtccagctcttcaagggaaagctgtacacctgttcagacagttccaagcagacagaggcggaatgcaagggcaactacatcacgtacaaagacggggaggttgaccaccccatcatccaaccccgcagctgggagaacagcaagtttgactttgacaatgttctggcagccatgatggccctcttcaccgtctccaccttcgaagggtggccagagctgctgtaccgctccatcgactcccacacggaagacaagggccccatctacaactaccgtgtggagatctccatcttcttcatcatctacatcatcatcatcgccttcttcatgatgaacatcttcgtgggcttcgtcatcgtcacctttcaggagcagggggagcaggagtacaagaactgtgagctggacaagaaccagcgacagtgcgtggaatacgccctcaaggcccggcccctgcggaggtacatccccaagaaccagcaccagtacaaagtgtggtacgtggtcaactccacctacttcgagtacctgatgttcgtcctcatcctgctcaacaccatctgcctggccatgcagcactacggccagagctgcctgttcaaaatcgccatgaacatcctcaacatgctcttcactggcctcttcaccgtggagatgatcctgaagctcattgccttcaaacccaagcactatttctgtgatgcatggaatacatttgacgccttgattgttgtgggtagcattgttgatatagcaatcaccgaggtaaacaacgcagaggaaaactcccgcatctccatcaccttcttccgcctgttccgggtcatgcgtctggtgaagctgctgagccgtggggagggcatccggacgctgctgtggaccttcatcaagtccttccaggccctgccctatgtggccctcctgatcgtgatgctgttcttcatctacgcggtgatcgggatgcaggtgtttgggaaaattgccctgaatgataccacagagatcaaccggaacaacaactttcagaccttcccccaggccgtgctgctcctcttcaggtgtgccaccggggaggcctggcaggacatcatgctggcctgcatgccaggcaagaagtgtgccccagagtccgagcccagcaacagcacggagggtgaaacaccctgtggtagcagctttgctgtcttctacttcatcagcttctacatgctctgtgccttcctgatcatcaacctctttgtagctgtcatcatggacaactttgactacctgacaagggactggtccatccttggtccccaccacctggatgagtttaaaagaatctgggcagagtatgaccctgaagccaagggtcgtatcaaacacctggatgtggtgaccctcctccggcggattcagccgccactaggttttgggaagctgtgccctcaccgcgtggcttgcaaacgcctggtctccatgaacatgcctctgaacagcgacgggacagtcatgttcaatgccaccctgtttgccctggtcaggacggccctgaggatcaaaacagaagggaacctagaacaagccaatgaggagctgcgggcgatcatcaagaagatctggaagcggaccagcatgaagctgctggaccaggtggtgccccctgcaggtgatgatgaggtcaccgttggcaagttctacgccacgttcctgatccaggagtacttccggaagttcaagaagcgcaaagagcagggccttgtgggcaagccctcccagaggaacgcgctgtctctgcaggctggcttgcgcacactgcatgacatcgggcctgagatccgacgggccatctctggagatctcaccgctgaggaggagctggacaaggccatgaaggaggctgtgtccgctgcttctgaagatgacatcttcaggagggccggtggcctgttcggcaaccacgtcagctactaccaaagcgacggccggagcgccttcccccagaccttcaccactcagcgcccgctgcacatcaacaaggcgggcagcagccagggcgacactgagtcgccatcccacgagaagctggtggactccaccttcaccccgagcagctactcgtccaccggctccaacgccaacatcaacaacgccaacaacaccgccctgggtcgcctccctcgccccgccggctaccccagcacggtcagcactgtggagggccacgggccccccttgtcccctgccatccgggtgcaggaggtggcgtggaagctcagctccaacaggtgccactcccgggagagccaggcagccatggcgggtcaggaggagacgtctcaggatgagacctatgaagtgaagatgaaccatgacacggaggcctgcagtgagcccagcctgctctccacagagatgctctcctaccaggatgacgaaaatcggcaactgacgctcccagaggaggacaagagggacatccggcaatctccgaagaggggtttcctccgctctgcctcactaggtcgaagggcctccttccacctggaatgtctgaagcgacagaaggaccgagggggagacatctctcagaagacagtcctgcccttgcatctggttcatcatcaggcattggcagtggcaggcctgagccccctcctccagagaagccattcccctgcctcattccctaggccttttgccaccccaccagccacacctggcagccgaggctggcccccacagcccgtccccaccctgcggcttgagggggtcgagtccagtgagaaactcaacagcagcttcccatccatccactgcggctcctgggctgagaccacccccggtggcgggggcagcagcgccgcccggagagtccggcccgtctccctcatggtgcccagccaggctggggccccagggaggcagttccacggcagtgccagcagcctggtggaagcggtcttgatttcagaaggactggggcagtttgctcaagatcccaagttcatcgaggtcaccacccaggagctggccgacgcctgcgacatgaccatagaggagatggagagcgcggccgacaacatcctcagcgggggcgccccacagagccccaatggcgccctcttaccctttgtgaactgcagggacgcggggcaggaccgagccgggggcgaggaggacgcgggctgtgtgcgcgcgcggggtgcaccgagtgaggaggagctccaggacagcagggtctacgtcagcagcctgtagtgggcgctgccagatgcgggcttttttttttttatttgtttcaatgttcctaatgggttcgtttcagaagtgcctcactgttctcgtgacctggagttaaccggaacagcgtcttcattcatttctgttgggaccagacgcggagcctgggtgcgcgagccgccctccgggaggaaggcgcccggctgcgtctgcagaggcggggagaggaggcggcgagggtcccggggcgcgaggaaggcgctgccctctcccagctcgcaggccccgggccggccgcgcctctgcgggagagcaccccggcttcccgcgcgccctcaccaaaaggaccctacagcaaacggggtctttcgactctgcttgtagaaaccatttgcacatattctgtacgagcctgctgtctccctagagccagggccctgcggatttggagaagggagcggggcaggacttccaggaggaccccaacccggcccggagagggaggaggaggcctccaggggcgcggagctctggggatgggcgtcgggccggcagtggtgcggctcactccgtccctgcccacctgcgacgggatcccccgaccggcacggccacgccgagctcccggccagccgccggcccgcaggcagcgcgagggaggagctgcgccgccgggccggggccgccggctccgcccaaccaggtggtgctgagcttccgctgagcgctcttttgttttgtggtttgacacttttcttgacagcatgttgcagtttcttttcggttttggttttttttaaatgttttattttgctttcccagcgggaggggaggaagaagagtgtttacaaagtcctgtagccccctcacctttctgttttcacttttgccaatgtacatcgggtttggttttcttgtattatttaaacggttgtggtttcctttttccacggaggttcaatagaagccgctgcaggagagttttaccaaccattgtgtatgcccaataatttgttatcatttccttaggtagtaacctatttttgttctggtttggttcggttatctaatggaaaggtaactggcaatgcacttgatgtggtcttgcacatgtgggtgatagagttgggttcctttttatgctgggtgtacaggtgggtttgggagagaggagcatgcgcgagagagtctccgagtgtgtgcgacgcgtgtgtgtgtggtgggttgtctgtgtgcatatgtcctgcccgtgtatatgcacccacaccatgtgcccgtgcacaccagtgactacgcagtcccccctttctggtttagctgtgggaagatctgaatctggggccgtttgaaagcaaaaacaaaccactgtctctgcttctgaaacgggaatcagtaactctttgcattttctgtcccacaagatatgcaaaaacaatgcaataatattcatttaaaaatacaattgtgagttgtgttggcattaaaactgtattttaaaaaaagacagaaatttaagggaaaaacacaagaaggcattttgcttcaatatattccgtgtaatgttttattgcattgataatgtttctgttgaagaaaccgttatacttgaattcaggtcagtttcagtatttttcaaatatttttttaaaactgaattgcaattgtgccaagcgaatataatgaattgaattaagttggttttcggattcacttcttgtatattttgctgcatgtaaagtaaatcattttgtatttggagtgtgacaagcttt

SEQ ID NO: 419826 - DNA, 8174 bp, Homo sapiens
  misc_feature (4717)..(4717): n is a, c, g, or t
atggtcaatgagaatacgaggatgtacattccagaggaaaaccaccaaggttccaactatgggagcccacgccccgcccatgccaacatgaatgccaatgcggcagcggggctggcccctgagcacatccccaccccgggggctgccctgtcgtggcaggcggccatcgacgcagcccggcaggctaagctgatgggcagcgctggcaatgcgaccatctccacagtcagctccacgcagcggaagcggcagcaatatgggaaacccaagaagcagggcagcaccacggccacacgcccgccccgagccctgctctgcctgaccctgaagaaccccatccggagggcctgcatcagcattgtcgaatggaaaccatttgaaataattattttactgactatttttgccaattgtgtggccttagcgatctatattccctttccagaagatgattccaacgccaccaattccaacctggaacgagtggaatatctctttctcataatttttacggtggaagcgtttttaaaagtaatcgcctatggactcctctttcaccccaatgcctacctccgcaacggctggaacctactagattttataattgtggttgtggggctttttagtgcaattttagaacaagcaaccaaagcagatggggcaaacgctctcggagggaaaggggccggatttgatgtgaaggcgctgagggccttccgcgtgctgcgccccctgcggctggtgtccggagtcccaagtctccaggtggtcctgaattccatcatcaaggccatggtccccctgctgcacatcgccctgcttgtgctgtttgtcatcatcatctacgccatcatcggcttggagctcttcatggggaagatgcacaagacctgctacaaccaggagggcatagcagatgttccagcagaagatgacccttccccttgtgcgctggaaacgggccacgggcggcagtgccagaacggcacggtgtgcaagcccggctgggatggtcccaagcacggcatcaccaactttgacaactttgccttcgccatgctcacggtgttccagtgcatcaccatggagggctggacggacgtgctgtactgggtcaatgatgccgtaggaagggactggccctggatctattttgttacactaatcatcatagggtcattttttgtacttaacttggttctcggtgtgcttagcggagagttttccaaagagagggagaaggccaaggcccggggagatttccagaagctgcgggagaagcagcagctagaagaggatctcaaaggctacctggattggatcactcaggccgaagacatcgatcctgagaatgaggacgaaggcatggatgaggagaagccccgaaacatgagcatgcccaccagtgagaccgagtccgtcaacaccgaaaacgtggctggaggtgacatcgagggagaaaactgcggggccaggctggcccaccggatctccaagtcaaagttcagccgctactggcgccggtggaatcggttctgcagaaggaagtgccgcgccgcagtcaagtctaatgtcttctactggctggtgattttcctggtgttcctcaacacgctcaccattgcctctgagcactacaaccagcccaactggctcacagaagtccaagacacggcaaacaaggccctgctggccctgttcacggcagagatgctcctgaagatgtacagcctgggcctgcaggcctacttcgtgtccctcttcaaccgctttgactgcttcgtcgtgtgtggcggcatcctggagaccatcctggtggagaccaagatcatgtccccactgggcatctccgtgctcagatgcgtccggctgctgaggattttcaagatcacgaggtactggaactccttgagcaacctggtggcatccttgctgaactctgtgcgctccatcgcctccctgctccttctcctcttcctcttcatcatcatcttctccctcctggggatgcagctctttggaggaaagttcaactttgatgagatgcagacccggaggagcacattcgataacttcccccagtccctcctcactgtgtttcagatcctgaccggggaggactggaattcggtgatgtatgatgggatcatggcttatggcggcccctcttttccagggatgttagtctgtatttacttcatcatcctcttcatctgtggaaactatatcctactgaatgtgttcttggccattgctgtggacaacctggctgatgctgagagcctcacatctgcccaaaaggaggaggaagaggagaaggagagaaagaagctggccaggactgccagcccagagaagaaacaagagttggtggagaagccggcagtgggggaatccaaggaggagaagattgagctgaaatccatcacggctgacggagagtctccacccgccaccaagatcaacatggatgacctccagcccaatgaaaatgaggataagagcccctaccccaacccagaaactacaggagaagaggatgaggaggagccagagatgcctgtcggccctcgcccacgaccactctctgagcttcaccttaaggaaaaggcagtgcccatgccagaagccagcgcgtttttcatcttcagctctaacaacaggtttcgcctccagtgccaccgcattgtcaatgacacgatcttcaccaacctgatcctcttcttcattctgctcagcagcatttccctggctgctgaggacccggtccagcacacctccttcaggaaccatatcctaggcaatgcagactatgtcttcactagtatctttacattagaaattatccttaagatgactgcttatggggctttcttgcacaagggttctttctgccggaactacttcaacatcctggacctgctggtggtcagcgtgtccctcatctcctttggcatccagtccagtgcaatcaatgtcgtgaagatcttgcgagtcctgcgagtactcaggcccctgagggccatcaacagggccaaggggctaaagcatgtggttcagtgtgtgtttgtcgccatccggaccatcgggaacatcgtgattgtcaccaccctgctgcagttcatgtttgcctgcatcggggtccagctcttcaagggaaagctgtacacctgttcagacagttccaagcagacagaggcggaatgcaagggcaactacatcacgtacaaagacggggaggttgaccaccccatcatccaaccccgcagctgggagaacagcaagtttgactttgacaatgttctggcagccatgatggccctcttcaccgtctccaccttcgaagggtggccagagctgctgtaccgctccatcgactcccacacggaagacaagggccccatctacaactaccgtgtggagatctccatcttcttcatcatctacatcatcatcatcgccttcttcatgatgaacatcttcgtgggcttcgtcatcgtcacctttcaggagcagggggagcaggagtacaagaactgtgagctggacaagaaccagcgacagtgcgtggaatacgccctcaaggcccggcccctgcggaggtacatccccaagaaccagcaccagtacaaagtgtggtacgtggtcaactccacctacttcgagtacctgatgttcgtcctcatcctgctcaacaccatctgcctggccatgcagcactacggccagagctgcctgttcaaaatcgccatgaacatcctcaacatgctcttcactggcctcttcaccgtggagatgatcctgaagctcattgccttcaaacccaagcactatttctgtgatgcatggaatacatttgacgccttgattgttgtgggtagcattgttgatatagcaatcaccgaggtaaacccagctgaacatacccaatgctctccctctatgaacgcagaggaaaactcccgcatctccatcaccttcttccgcctgttccgggtcatgcgtctggtgaagctgctgagccgtggggagggcatccggacgctgctgtggaccttcatcaagtccttccaggccctgccctatgtggccctcctgatcgtgatgctgttcttcatctacgcggtgatcgggatgcaggtgtttgggaaaattgccctgaatgataccacagagatcaaccggaacaacaactttcagaccttcccccaggccgtgctgctcctcttcaggtgtgccaccggggaggcctggcaggacatcatgctggcctgcatgccaggcaagaagtgtgccccagagtccgagcccagcaacagcacggagggtgaaacaccctgtggtagcagctttgctgtcttctacttcatcagcttctacatgctctgtgccttcctgatcatcaacctctttgtagctgtcatcatggacaactttgactacctgacaagggactggtccatccttggtccccaccacctggatgagtttaaaagaatctgggcagagtatgaccctgaagccaagggtcgtatcaaacacctggatgtggtgaccctcctccggcggattcagccgccactaggttttgggaagctgtgccctcaccgcgtggcttgcaaacgcctggtctccatgaacatgcctctgaacagcgacgggacagtcatgttcaatgccaccctgtttgccctggtcaggacggccctcagagaancagagctgtcatcccaagtccagtaccaagccaaagaagcttctctcttggaacgtagaaggaagagctctcatcccaagtccagtaccaagccaaacaagcttctctcttccggagggtcgactggctgggtggaggatgccagggccctggagggacaggtcttggcccgaggctgtggctggctggggagcttggaggaaagggagcgtggtcctcaccatcctccccttggattccaggctggcttgcgcacactgcatgacatcgggcctgagatccgacgggccatctctggagatctcaccgctgaggaggagctggacaaggccatgaaggaggctgtgtccgctgcttctgaagatgacatcttcaggagggccggtggcctgttcggcaaccacgtcagctactaccaaagcgacggccggagcgccttcccccagaccttcaccactcagcgcccgctgcacatcaacaaggcgggcagcagccagggcgacactgagtcgccatcccacgagaagctggtggactccaccttcaccccgagcagctactcgtccaccggctccaacgccaacatcaacaacgccaacaacaccgccctgggtcgcctccctcgccccgccggctaccccagcacggtcagcactgtggagggccacgggccccccttgtcccctgccatccgggtgcaggaggtggcgtggaagctcagctccaacaggtgccactcccgggagagccaggcagccatggcgggtcaggaggagacgtctcaggatgagacctatgaagtgaagatgaaccatgacacggaggcctgcagtgagcccagcctgctctccacagagatgctctcctaccaggatgacgaaaatcggcaactgacgctcccagaggaggacaagagggacatccggcaatctccgaagaggggtttcctccgctctgcctcactaggtcgaagggcctccttccacctggaatgtctgaagcgacagaaggaccgagggggagacatctctcagaagacagtcctgcccttgcatctggttcatcatcaggcattggcagtggcaggcctgagccccctcctccagagaagccattcccctgcctcattccctaggccttttgccaccccaccagccacacctggcagccgaggctggcccccacagcccgtccccaccctgcggcttgagggggtcgagtccagtgagaaactcaacagcagcttcccatccatccactgcggctcctgggctgagaccacccccggtggcgggggcagcagcgccgcccggagagtccggcccgtctccctcatggtgcccagccaggctggggccccagggaggcagttccacggcagtgccagcagcctggtggaagcggtcttgatttcagaaggactggggcagtttgctcaagatcccaagttcatcgaggtcaccacccaggagctggccgacgcctgcgacatgaccatagaggagatggagagcgcggccgacaacatcctcagcgggggcgccccacagagccccaatggcgccctcttaccctttgtgaactgcagggacgcggggcaggaccgagccgggggcgaggaggacgcgggctgtgtgcgcgcgcggggtgcaccgagtgaggaggagctccaggacagcagggtctacgtcagcagcctgtagtgggcgctgccagatgcgggcttttttttttttatttgtttcaatgttcctaatgggttcgtttcagaagtgcctcactgttctcgtgacctggagttaaccggaacagcgtcttcattcatttctgttgggaccagacgcggagcctgggtgcgcgagccgccctccgggaggaaggcgcccggctgcgtctgcagaggcggggagaggaggcggcgagggtcccggggcgcgaggaaggcgctgccctctcccagctcgcaggccccgggccggccgcgcctctgcgggagagcaccccggcttcccgcgcgccctcaccaaaaggaccctacagcaaacggggtctttcgactctgcttgtagaaaccatttgcacatattctgtacgagcctgctgtctccctagagccagggccctgcggatttggagaagggagcggggcaggacttccaggaggaccccaacccggcccggagagggaggaggaggcctccaggggcgcggagctctggggatgggcgtcgggccggcagtggtgcggctcactccgtccctgcccacctgcgacgggatcccccgaccggcacggccacgccgagctcccggccagccgccggcccgcaggcagcgcgagggaggagctgcgccgccgggccggggccgccggctccgcccaaccaggtggtgctgagcttccgctgagcgctcttttgttttgtggtttgacacttttcttgacagcatgttgcagtttcttttcggttttggttttttttaaatgttttattttgctttcccagcgggaggggaggaagaagagtgtttacaaagtcctgtagccccctcacctttctgttttcacttttgccaatgtacatcgggtttggttttcttgtattatttaaacggttgtggtttcctttttccacggaggttcaatagaagccgctgcaggagagttttaccaaccattgtgtatgcccaataatttgttatcatttccttaggtagtaacctatttttgttctggtttggttcggttatctaatggaaaggtaactggcaatgcacttgatgtggtcttgcacatgtgggtgatagagttgggttcctttttatgctgggtgtacaggtgggtttgggagagaggagcatgcgcgagagagtctccgagtgtgtgcgacgcgtgtgtgtgtggtgggttgtctgtgtgcatatgtcctgcccgtgtatatgcacccacaccatgtgcccgtgcacaccagtgactacgcagtcccccctttctggtttagctgtgggaagatctgaatctggggccgtttgaaagcaaaaacaaaccactgtctctgcttctgaaacgggaatcagtaactctttgcattttctgtcccacaagatatgcaaaaacaatgcaataatattcatttaaaaatacaattgtgagttgtgttggcattaaaactgtattttaaaaaaagacagaaatttaagggaaaaacacaagaaggcattttgcttcaatatattccgtgtaatgttttattgcattgataatgtttctgttgaagaaaccgttatacttgaattcaggtcagtttcagtatttttcaaatatttttttaaaactgaattgcaattgtgccaagcgaatataatgaattgaattaagttggttttcggattcacttcttgtatattttgctgcatgtaaagtaaatcattttgtatttggagtgtgacaagcttt

SEQ ID NO: 419827 - DNA, 4976 bp, Homo sapiens
ctgtgcagggctacagaggaaggggaagagataatccctgtccatgaaaaataacaagcttcatggggcacacagcccaggctcaaatgaatggcatatgtatgtaaactgcttatgtctaaaaccaggccattggtgatgatcggagtagcatgggtcatgctgctgtaccgctccatcgactcccacacggaagacaagggccccatctacaactaccgtgtggagatctccatcttcttcatcatctacatcatcatcatcgccttcttcatgatgaacatcttcgtgggcttcgtcatcgtcacctttcaggagcagggggagcaggagtacaagaactgtgagctggacaagaaccagcgacagtgcgtggaatacgccctcaaggcccggcccctgcggaggtacatccccaagaaccagcaccagtacaaagtgtggtacgtggtcaactccacctacttcgagtacctgatgttcgtcctcatcctgctcaacaccatctgcctggccatgcagcactacggccagagctgcctgttcaaaatcgccatgaacatcctcaacatgctcttcactggcctcttcaccgtggagatgatcctgaagctcattgccttcaaacccaagggttactttagtgatccctggaatgtttttgacttcctcatcgtaattggcagcataattgacgtcattctcagtgagactaatccagctgaacatacccaatgctctccctctatgaacgcagaggaaaactcccgcatctccatcaccttcttccgcctgttccgggtcatgcgtctggtgaagctgctgagccgtggggagggcatccggacgctgctgtggaccttcatcaagtccttccaggccctgccctatgtggccctcctgatcgtgatgctgttcttcatctacgcggtgatcgggatgcaggtgtttgggaaaattgccctgaatgataccacagagatcaaccggaacaacaactttcagaccttcccccaggccgtgctgctcctcttcaggtgtgccaccggggaggcctggcaggacatcatgctggcctgcatgccaggcaagaagtgtgccccagagtccgagcccagcaacagcacggagggtgaaacaccctgtggtagcagctttgctgtcttctacttcatcagcttctacatgctctgtgccttcctgatcatcaacctctttgtagctgtcatcatggacaactttgactacctgacaagggactggtccatccttggtccccaccacctggatgagtttaaaagaatctgggcagagtatgaccctgaagccaagggtcgtatcaaacacctggatgtggtgaccctcctccggcggattcagccgccactaggttttgggaagctgtgccctcaccgcgtggcttgcaaacgcctggtctccatgaacatgcctctgaacagcgacgggacagtcatgttcaatgccaccctgtttgccctggtcaggacggccctgaggatcaaaacagaagggaacctagaacaagccaatgaggagctgcgggcgatcatcaagaagatctggaagcggaccagcatgaagctgctggaccaggtggtgccccctgcaggtgatgatgaggtcaccgttggcaagttctacgccacgttcctgatccaggagtacttccggaagttcaagaagcgcaaagagcagggccttgtgggcaagccctcccagaggaacgcgctgtctctgcaggctggcttgcgcacactgcatgacatcgggcctgagatccgacgggccatctctggagatctcaccgctgaggaggagctggacaaggccatgaaggaggctgtgtccgctgcttctgaagatgacatcttcaggagggccggtggcctgttcggcaaccacgtcagctactaccaaagcgacggccggagcgccttcccccagaccttcaccactcagcgcccgctgcacatcaacaaggcgggcagcagccagggcgacactgagtcgccatcccacgagaagctggtggactccaccttcaccccgagcagctactcgtccaccggctccaacgccaacatcaacaacgccaacaacaccgccctgggtcgcctccctcgccccgccggctaccccagcacggtcagcactgtggagggccacgggccccccttgtcccctgccatccgggtgcaggaggtggcgtggaagctcagctccaacaggtgccactcccgggagagccaggcagccatggcgggtcaggaggagacgtctcaggatgagacctatgaagtgaagatgaaccatgacacggaggcctgcagtgagcccagcctgctctccacagagatgctctcctaccaggatgacgaaaatcggcaactgacgctcccagaggaggacaagagggacatccggcaatctccgaagaggggtttcctccgctctgcctcactaggtcgaagggcctccttccacctggaatgtctgaagcgacagaaggaccgagggggagacatctctcagaagacagtcctgcccttgcatctggttcatcatcaggcattggcagtggcaggcctgagccccctcctccagagaagccattcccctgcctcattccctaggccttttgccaccccaccagccacacctggcagccgaggctggcccccacagcccgtccccaccctgcggcttgagggggtcgagtccagtgagaaactcaacagcagcttcccatccatccactgcggctcctgggctgagaccacccccggtggcgggggcagcagcgccgcccggagagtccggcccgtctccctcatggtgcccagccaggctggggccccagggaggcagttccacggcagtgccagcagcctggtggaagcggtcttgatttcagaaggactggggcagtttgctcaagatcccaagttcatcgaggtcaccacccaggagctggccgacgcctgcgacatgaccatagaggagatggagagcgcggccgacaacatcctcagcgggggcgccccacagagccccaatggcgccctcttaccctttgtgaactgcagggacgcggggcaggaccgagccgggggcgaggaggacgcgggctgtgtgcgcgcgcggggtgcaccgagtgaggaggagctccaggacagcagggtctacgtcagcagcctgtagtgggcgctgccagatgcgggcttttttttttttatttgtttcaatgttcctaatgggttcgtttcagaagtgcctcactgttctcgtgacctggagttaaccggaacagcgtcttcattcatttctgttgggaccagacgcggagcctgggtgcgcgagccgccctccgggaggaaggcgcccggctgcgtctgcagaggcggggagaggaggcggcgagggtcccggggcgcgaggaaggcgctgccctctcccagctcgcaggccccgggccggccgcgcctctgcgggagagcaccccggcttcccgcgcgccctcaccaaaaggaccctacagcaaacggggtctttcgactctgcttgtagaaaccatttgcacatattctgtacgagcctgctgtctccctagagccagggccctgcggatttggagaagggagcggggcaggacttccaggaggaccccaacccggcccggagagggaggaggaggcctccaggggcgcggagctctggggatgggcgtcgggccggcagtggtgcggctcactccgtccctgcccacctgcgacgggatcccccgaccggcacggccacgccgagctcccggccagccgccggcccgcaggcagcgcgagggaggagctgcgccgccgggccggggccgccggctccgcccaaccaggtggtgctgagcttccgctgagcgctcttttgttttgtggtttgacacttttcttgacagcatgttgcagtttcttttcggttttggttttttttaaatgttttattttgctttcccagcgggaggggaggaagaagagtgtttacaaagtcctgtagccccctcacctttctgttttcacttttgccaatgtacatcgggtttggttttcttgtattatttaaacggttgtggtttcctttttccacggaggttcaatagaagccgctgcaggagagttttaccaaccattgtgtatgcccaataatttgttatcatttccttaggtagtaacctatttttgttctggtttggttcggttatctaatggaaaggtaactggcaatgcacttgatgtggtcttgcacatgtgggtgatagagttgggttcctttttatgctgggtgtacaggtgggtttgggagagaggagcatgcgcgagagagtctccgagtgtgtgcgacgcgtgtgtgtgtggtgggttgtctgtgtgcatatgtcctgcccgtgtatatgcacccacaccatgtgcccgtgcacaccagtgactacgcagtcccccctttctggtttagctgtgggaagatctgaatctggggccgtttgaaagcaaaaacaaaccactgtctctgcttctgaaacgggaatcagtaactctttgcattttctgtcccacaagatatgcaaaaacaatgcaataatattcatttaaaaatacaattgtgagttgtgttggcattaaaactgtattttaaaaaaagacagaaatttaagggaaaaacacaagaaggcattttgcttcaatatattccgtgtaatgttttattgcattgataatgtttctgttgaagaaaccgttatacttgaattcaggtcagtttcagtatttttcaaatatttttttaaaactgaattgcaattgtgccaagcgaatataatgaattgaattaagttggttttcggattcacttcttgtatattttgctgcatgtaaagtaaatcattttgtatttggagtgtgacaagcttt

SEQ ID NO: 419828 - DNA, 4381 bp, Homo sapiens
cggccgccctcccatcggagggggaagtctagtgcagcaaaccctggcctgccttccgccactgccactgaggtctgtatttctcggaggggccctcctgttctcacccccctcttgctgtgctaactgcacctcctgttgccgacgggttccagaacgcagaggaaaactcccgcatctccatcaccttcttccgcctgttccgggtcatgcgtctggtgaagctgctgagccgtggggagggcatccggacgctgctgtggaccttcatcaagtccttccaggccctgccctatgtggccctcctgatcgtgatgctgttcttcatctacgcggtgatcgggatgcaggtgtttgggaaaattgccctgaatgataccacagagatcaaccggaacaacaactttcagaccttcccccaggccgtgctgctcctcttcaggtgtgccaccggggaggcctggcaggacatcatgctggcctgcatgccaggcaagaagtgtgccccagagtccgagcccagcaacagcacggagggtgaaacaccctgtggtagcagctttgctgtcttctacttcatcagcttctacatgctctgtgccttcctgatcatcaacctctttgtagctgtcatcatggacaactttgactacctgacaagggactggtccatccttggtccccaccacctggatgagtttaaaagaatctgggcagagtatgaccctgaagccaagggtcgtatcaaacacctggatgtggtgaccctcctccggcggattcagccgccactaggttttgggaagctgtgccctcaccgcgtggcttgcaaacgcctggtctccatgaacatgcctctgaacagcgacgggacagtcatgttcaatgccaccctgtttgccctggtcaggacggccctgaggatcaaaacagaagggaacctagaacaagccaatgaggagctgcgggcgatcatcaagaagatctggaagcggaccagcatgaagctgctggaccaggtggtgccccctgcaggtgatgatgaggtcaccgttggcaagttctacgccacgttcctgatccaggagtacttccggaagttcaagaagcgcaaagagcagggccttgtgggcaagccctcccagaggaacgcgctgtctctgcaggctggcttgcgcacactgcatgacatcgggcctgagatccgacgggccatctctggagatctcaccgctgaggaggagctggacaaggccatgaaggaggctgtgtccgctgcttctgaagatgacatcttcaggagggccggtggcctgttcggcaaccacgtcagctactaccaaagcgacggccggagcgccttcccccagaccttcaccactcagcgcccgctgcacatcaacaaggcgggcagcagccagggcgacactgagtcgccatcccacgagaagctggtggactccaccttcaccccgagcagctactcgtccaccggctccaacgccaacatcaacaacgccaacaacaccgccctgggtcgcctccctcgccccgccggctaccccagcacggtcagcactgtggagggccacgggccccccttgtcccctgccatccgggtgcaggaggtggcgtggaagctcagctccaacaggtgccactcccgggagagccaggcagccatggcgggtcaggaggagacgtctcaggatgagacctatgaagtgaagatgaaccatgacacggaggcctgcagtgagcccagcctgctctccacagagatgctctcctaccaggatgacgaaaatcggcaactgacgctcccagaggaggacaagagggacatccggcaatctccgaagaggggtttcctccgctctgcctcactaggtcgaagggcctccttccacctggaatgtctgaagcgacagaaggaccgagggggagacatctctcagaagacagtcctgcccttgcatctggttcatcatcaggcattggcagtggcaggcctgagccccctcctccagagaagccattcccctgcctcattccctaggccttttgccaccccaccagccacacctggcagccgaggctggcccccacagcccgtccccaccctgcggcttgagggggtcgagtccagtgagaaactcaacagcagcttcccatccatccactgcggctcctgggctgagaccacccccggtggcgggggcagcagcgccgcccggagagtccggcccgtctccctcatggtgcccagccaggctggggccccagggaggcagttccacggcagtgccagcagcctggtggaagcggtcttgatttcagaaggactggggcagtttgctcaagatcccaagttcatcgaggtcaccacccaggagctggccgacgcctgcgacatgaccatagaggagatggagagcgcggccgacaacatcctcagcgggggcgccccacagagccccaatggcgccctcttaccctttgtgaactgcagggacgcggggcaggaccgagccgggggcgaggaggacgcgggctgtgtgcgcgcgcggggtgcaccgagtgaggaggagctccaggacagcagggtctacgtcagcagcctgtagtgggcgctgccagatgcgggcttttttttttttatttgtttcaatgttcctaatgggttcgtttcagaagtgcctcactgttctcgtgacctggagttaaccggaacagcgtcttcattcatttctgttgggaccagacgcggagcctgggtgcgcgagccgccctccgggaggaaggcgcccggctgcgtctgcagaggcggggagaggaggcggcgagggtcccggggcgcgaggaaggcgctgccctctcccagctcgcaggccccgggccggccgcgcctctgcgggagagcaccccggcttcccgcgcgccctcaccaaaaggaccctacagcaaacggggtctttcgactctgcttgtagaaaccatttgcacatattctgtacgagcctgctgtctccctagagccagggccctgcggatttggagaagggagcggggcaggacttccaggaggaccccaacccggcccggagagggaggaggaggcctccaggggcgcggagctctggggatgggcgtcgggccggcagtggtgcggctcactccgtccctgcccacctgcgacgggatcccccgaccggcacggccacgccgagctcccggccagccgccggcccgcaggcagcgcgagggaggagctgcgccgccgggccggggccgccggctccgcccaaccaggtggtgctgagcttccgctgagcgctcttttgttttgtggtttgacacttttcttgacagcatgttgcagtttcttttcggttttggttttttttaaatgttttattttgctttcccagcgggaggggaggaagaagagtgtttacaaagtcctgtagccccctcacctttctgttttcacttttgccaatgtacatcgggtttggttttcttgtattatttaaacggttgtggtttcctttttccacggaggttcaatagaagccgctgcaggagagttttaccaaccattgtgtatgcccaataatttgttatcatttccttaggtagtaacctatttttgttctggtttggttcggttatctaatggaaaggtaactggcaatgcacttgatgtggtcttgcacatgtgggtgatagagttgggttcctttttatgctgggtgtacaggtgggtttgggagagaggagcatgcgcgagagagtctccgagtgtgtgcgacgcgtgtgtgtgtggtgggttgtctgtgtgcatatgtcctgcccgtgtatatgcacccacaccatgtgcccgtgcacaccagtgactacgcagtcccccctttctggtttagctgtgggaagatctgaatctggggccgtttgaaagcaaaaacaaaccactgtctctgcttctgaaacgggaatcagtaactctttgcattttctgtcccacaagatatgcaaaaacaatgcaataatattcatttaaaaatacaattgtgagttgtgttggcattaaaactgtattttaaaaaaagacagaaatttaagggaaaaacacaagaaggcattttgcttcaatatattccgtgtaatgttttattgcattgataatgtttctgttgaagaaaccgttatacttgaattcaggtcagtttcagtatttttcaaatatttttttaaaactgaattgcaattgtgccaagcgaatataatgaattgaattaagttggttttcggattcacttcttgtatattttgctgcatgtaaagtaaatcattttgtatttggagtgtgacaagcttt

SEQ ID NO: 419829 - DNA, 2325 bp, Homo sapiens
cttttacaacagtgagtggaaaggactgaccttctaaattaacagcagcctaaatggaaagcctactttcttatgttgcttaattcacatctggggacctgatttaaacatgtcttgcgctgttgttgccatggttgctttgcccatcccatccctcatcctgtcacttttctctctgacttctttctctgcccacatgtctccctccctgctgctcccgtctcctgtcttcttctggccatttgagatgttccagcagaagatgacccttccccttgtgcgctggaaacgggccacgggcggcagtgccagaacggcacggtgtgcaagcccggctgggatggtcccaagcacggcatcaccaactttgacaactttgccttcgccatgctcacggtgttccagtgcatcaccatggagggctggacggacgtgctgtactggatgcaggacgctatgggctatgagttaccctgggtgtattttgtcagtctggtcatctttggatcctttttcgttctaaatctggttctcggtgtgttgagcggagagttttccaaagagagggagaaggccaaggcccggggagatttccagaagctgcgggagaagcagcagctagaagaggatctcaaaggctacctggattggatcactcaggccgaagacatcgatcctgagaatgaggacgaaggcatggatgaggagaagccccgaaacatgagcatgcccaccagtgagaccgagtccgtcaacaccgaaaacgtggctggaggtgacatcgagggagaaaactgcggggccaggctggcccaccggatctccaagtcaaagttcagccgctactggcgccggtggaatcggttctgcagaaggaagtgccgcgccgcagtcaagtctaatgtcttctactggctggtgattttcctggtgttcctcaacacgctcaccattgcctctgagcactacaaccagcccaactggctcacagaagtccaagacacggcaaacaaggccctgctggccctgttcacggcagagatgctcctgaagatgtacagcctgggcctgcaggcctacttcgtgtccctcttcaaccgctttgactgcttcgtcgtgtgtggcggcatcctggagaccatcctggtggagaccaagatcatgtccccactgggcatctccgtgctcagatgcgtccggctgctgaggattttcaagatcacgaggtactggaactccttgagcaacctggtggcatccttgctgaactctgtgcgctccatcgcctccctgctccttctcctcttcctcttcatcatcatcttctccctcctggggatgcagctctttggaggaaagttcaactttgatgagatgcagacccggaggagcacattcgataacttcccccagtccctcctcactgtgtttcagatcctgaccggggaggactggaattcggtgatgtatgatgggatcatggcttatggcggcccctcttttccagggatgttagtctgtatttacttcatcatcctcttcatctgtggaaactatatcctactgaatgtgttcttggccattgctgtggacaacctggctgatgctgagagcctcacatctgcccaaaaggaggaggaagaggagaaggagagaaagaagctggccaggactgccagcccagagaagaaacaagagttggtggagaagccggcagtgggggaatccaaggaggagaagattgagctgaaatccatcacggctgacggagagtctccacccgccaccaagatcaacatggatgacctccagcccaatgaaaatgaggataagagcccctaccccaacccagaaactacaggagaagaggatgaggaggagccagagatgcctgtcggccctcgcccacgaccactctctgagcttcaccttaaggaaaaggcagtgcccatgccagaagccagcgcgtttttcatcttcagctctaacaacaggtttcgcctccagtgccaccgcattgtcaatgacacgatcttcaccaacctgatcctcttcttcattctgctcagcagcatttccctggctgctgaggacccggtccagcacacctccttcaggaaccatgtatgcatcgcctgtgtcttctgcactccttccccctggggctgtgccaggcccacagcttctgttgctgacatcattgttcaatcaggagcccaattctaggtgtcataattagatccacaactaacatttcattaagagagtagggctttgatagaaaaccaccctaggaccacaagcaaataaaagagcatgtaccca

SEQ ID NO: 419830 - DNA, 423 bp, Homo sapiens
agtgaggggcgagaagagccatggtgctgcatcttgggttggaggaaacctgaattcacagccaaccccacccttctctccctgtcccctttccagccgctactggcgccggtggaatcggttctgcagaaggaagtgccgcgccgcagtcaagtctaatgtcttctactggctggtgattttcctggtgttcctcaacacgctcaccattgcctctgagcactacaaccagcccaactggctcacagaagtccaaggtgagcggcggccccagctctgctctggtttcctcctggtaactcagccccaaggcccaggggagggcataaccacaggcagaaggtggaggggaaagcagccaatggtcggggctcttggcaggtgctgtgctggagacaccaagggcctggcagttccaaagcc

SEQ ID NO: 419831 - DNA, 8171 bp, Homo sapiens
atggtcaatgagaatacgaggatgtacattccagaggaaaaccaccaaggttccaactatgggagcccacgccccgcccatgccaacatgaatgccaatgcggcagcggggctggcccctgagcacatccccaccccgggggctgccctgtcgtggcaggcggccatcgacgcagcccggcaggctaagctgatgggcagcgctggcaatgcgaccatctccacagtcagctccacgcagcggaagcggcagcaatatgggaaacccaagaagcagggcagcaccacggccacacgcccgccccgagccctgctctgcctgaccctgaagaaccccatccggagggcctgcatcagcattgtcgaatggaaaccatttgaaataattattttactgactatttttgccaattgtgtggccttagcgatctatattccctttccagaagatgattccaacgccaccaattccaacctggaacgagtggaatatctctttctcataatttttacggtggaagcgtttttaaaagtaatcgcctatggactcctctttcaccccaatgcctacctccgcaacggctggaacctactagattttataattgtggttgtggggctttttagtgcaattttagaacaagcaaccaaagcagatggggcaaacgctctcggagggaaaggggccggatttgatgtgaaggcgctgagggccttccgcgtgctgcgccccctgcggctggtgtccggagtcccaagtctccaggtggtcctgaattccatcatcaaggccatggtccccctgctgcacatcgccctgcttgtgctgtttgtcatcatcatctacgccatcatcggcttggagctcttcatggggaagatgcacaagacctgctacaaccaggagggcatagcagatgttccagcagaagatgacccttccccttgtgcgctggaaacgggccacgggcggcagtgccagaacggcacggtgtgcaagcccggctgggatggtcccaagcacggcatcaccaactttgacaactttgccttcgccatgctcacggtgttccagtgcatcaccatggagggctggacggacgtgctgtactgggtcaatgatgccgtaggaagggactggccctggatctattttgttacactaatcatcatagggtcattttttgtacttaacttggttctcggtgtgcttagcggagagttttccaaagagagggagaaggccaaggcccggggagatttccagaagctgcgggagaagcagcagctagaagaggatctcaaaggctacctggattggatcactcaggccgaagacatcgatcctgagaatgaggacgaaggcatggatgaggagaagccccgaaacatgagcatgcccaccagtgagaccgagtccgtcaacaccgaaaacgtggctggaggtgacatcgagggagaaaactgcggggccaggctggcccaccggatctccaagtcaaagttcagccgctactggcgccggtggaatcggttctgcagaaggaagtgccgcgccgcagtcaagtctaatgtcttctactggctggtgattttcctggtgttcctcaacacgctcaccattgcctctgagcactacaaccagcccaactggctcacagaagtccaagacacggcaaacaaggccctgctggccctgttcacggcagagatgctcctgaagatgtacagcctgggcctgcaggcctacttcgtgtccctcttcaaccgctttgactgcttcgtcgtgtgtggcggcatcctggagaccatcctggtggagaccaagatcatgtccccactgggcatctccgtgctcagatgcgtccggctgctgaggattttcaagatcacgaggtactggaactccttgagcaacctggtggcatccttgctgaactctgtgcgctccatcgcctccctgctccttctcctcttcctcttcatcatcatcttctccctcctggggatgcagctctttggaggaaagttcaactttgatgagatgcagacccggaggagcacattcgataacttcccccagtccctcctcactgtgtttcagatcctgaccggggaggactggaattcggtgatgtatgatgggatcatggcttatggcggcccctcttttccagggatgttagtctgtatttacttcatcatcctcttcatctgtggaaactatatcctactgaatgtgttcttggccattgctgtggacaacctggctgatgctgagagcctcacatctgcccaaaaggaggaggaagaggagaaggagagaaagaagctggccaggactgccagcccagagaagaaacaagagttggtggagaagccggcagtgggggaatccaaggaggagaagattgagctgaaatccatcacggctgacggagagtctccacccgccaccaagatcaacatggatgacctccagcccaatgaaaatgaggataagagcccctaccccaacccagaaactacaggagaagaggatgaggaggagccagagatgcctgtcggccctcgcccacgaccactctctgagcttcaccttaaggaaaaggcagtgcccatgccagaagccagcgcgtttttcatcttcagctctaacaacaggtttcgcctccagtgccaccgcattgtcaatgacacgatcttcaccaacctgatcctcttcttcattctgctcagcagcatttccctggctgctgaggacccggtccagcacacctccttcaggaaccatatcctaggcaatgcagactatgtcttcactagtatctttacattagaaattatccttaagatgactgcttatggggctttcttgcacaagggttctttctgccggaactacttcaacatcctggacctgctggtggtcagcgtgtccctcatctcctttggcatccagtccagtgcaatcaatgtcgtgaagatcttgcgagtcctgcgagtactcaggcccctgagggccatcaacagggccaaggggctaaagcatgtggttcagtgtgtgtttgtcgccatccggaccatcgggaacatcgtgattgtcaccaccctgctgcagttcatgtttgcctgcatcggggtccagctcttcaagggaaagctgtacacctgttcagacagttccaagcagacagaggcggaatgcaagggcaactacatcacgtacaaagacggggaggttgaccaccccatcatccaaccccgcagctgggagaacagcaagtttgactttgacaatgttctggcagccatgatggccctcttcaccgtctccaccttcgaagggtggccagagctgctgtaccgctccatcgactcccacacggaagacaagggccccatctacaactaccgtgtggagatctccatcttcttcatcatctacatcatcatcatcgccttcttcatgatgaacatcttcgtgggcttcgtcatcgtcacctttcaggagcagggggagcaggagtacaagaactgtgagctggacaagaaccagcgacagtgcgtggaatacgccctcaaggcccggcccctgcggaggtacatccccaagaaccagcaccagtacaaagtgtggtacgtggtcaactccacctacttcgagtacctgatgttcgtcctcatcctgctcaacaccatctgcctggccatgcagcactacggccagagctgcctgttcaaaatcgccatgaacatcctcaacatgctcttcactggcctcttcaccgtggagatgatcctgaagctcattgccttcaaacccaagggttactttagtgatccctggaatgtttttgacttcctcatcgtaattggcagcataattgacgtcattctcagtgagactaatccagctgaacatacccaatgctctccctctatgaacgcagaggaaaactcccgcatctccatcaccttcttccgcctgttccgggtcatgcgtctggtgaagctgctgagccgtggggagggcatccggacgctgctgtggaccttcatcaagtccttccaggccctgccctatgtggccctcctgatcgtgatgctgttcttcatctacgcggtgatcgggatgcaggtgtttgggaaaattgccctgaatgataccacagagatcaaccggaacaacaactttcagaccttcccccaggccgtgctgctcctcttcaggtgtgccaccggggaggcctggcaggacatcatgctggcctgcatgccaggcaagaagtgtgccccagagtccgagcccagcaacagcacggagggtgaaacaccctgtggtagcagctttgctgtcttctacttcatcagcttctacatgctctgtgccttcctgatcatcaacctctttgtagctgtcatcatggacaactttgactacctgacaagggactggtccatccttggtccccaccacctggatgagtttaaaagaatctgggcagagtatgaccctgaagccaagggtcgtatcaaacacctggatgtggtgaccctcctccggcggattcagccgccactaggttttgggaagctgtgccctcaccgcgtggcttgcaaacgcctggtctccatgaacatgcctctgaacagcgacgggacagtcatgttcaatgccaccctgtttgccctggtcaggacggccctgaggatcaaaacagaagggaacctagaacaagccaatgaggagctgcgggcgatcatcaagaagatctggaagcggaccagcatgaagctgctggaccaggtggtgccccctgcaggtgatgatgaggtcaccgttggcaagttctacgccacgttcctgatccaggagtacttccggaagttcaagaagcgcaaagagcagggccttgtgggcaagccctcccagaggaacgcgctgtctctgcaggctggcttgcgcacactgcatgacatcgggcctgagatccgacgggccatctctggagatctcaccgctgaggaggagctggacaaggccatgaaggaggctgtgtccgctgcttctgaagatgacatcttcaggagggccggtggcctgttcggcaaccacgtcagctactaccaaagcgacggccggagcgccttcccccagaccttcaccactcagcgcccgctgcacatcaacaaggcgggcagcagccagggcgacactgagtcgccatcccacgagaagctggtggactccaccttcaccccgagcagctactcgtccaccggctccaacgccaacatcaacaacgccaacaacaccgccctgggtcgcctccctcgccccgccggctaccccagcacggtcagcactgtggagggccacgggccccccttgtcccctgccatccgggtgcaggaggtggcgtggaagctcagctccaacaggtgccactcccgggagagccaggcagccatggcgggtcaggaggagacgtctcaggatgagacctatgaagtgaagatgaaccatgacacggaggcctgcagtgagcccagcctgctctccacagagatgctctcctaccaggatgacgaaaatcggcaactgacgctcccagaggaggacaagagggacatccggcaatctccgaagaggggtttcctccgctctgcctcactaggtcgaagggcctccttccacctggaatgtctgaagcgacagaaggaccgagggggagacatctctcagaagacagtcctgcccttgcatctggttcatcatcaggcattggcagtggcaggcctgagccccctcctccagagaagccattcccctgcctcattccctaggccttttgccaccccaccagccacacctggcagccgaggctggcccccacagcccgtccccaccctgcggcttgagggggtcgagtccagtgagaaactcaacagcagcttcccatccatccactgcggctcctgggctgagaccacccccggtggcgggggcagcagcgccgcccggagagtccggcccgtctccctcatggtgcccagccaggctggggccccagggaggcagttccacggcagtgccagcagcctggtggaagcggtcttgatttcagaaggactggggcagtttgctcaagatcccaagttcatcgaggtcaccacccaggagctggccgacgcctgcgacatgaccatagaggagatggagagcgcggccgacaacatcctcagcgggggcgccccacagagccccaatggcgccctcttaccctttgtgaactgcagggacgcggggcaggaccgagccgggggcgaggaggacgcgggctgtgtgcgcgcgcggggtgcaccgagtgaggaggagctccaggacagcagggtctacgtcagcagcctgtagtgggcgctgccagatgcgggcttttttttttttatttgtttcaatgttcctaatgggttcgtttcagaagtgcctcactgttctcgtgacctggagttaaccggaacagcgtcttcattcatttctgttgggaccagacgcggagcctgggtgcgcgagccgccctccgggaggaaggcgcccggctgcgtctgcagaggcggggagaggaggcggcgagggtcccggggcgcgaggaaggcgctgccctctcccagctcgcaggccccgggccggccgcgcctctgcgggagagcaccccggcttcccgcgcgccctcaccaaaaggaccctacagcaaacggggtctttcgactctgcttgtagaaaccatttgcacatattctgtacgagcctgctgtctccctagagccagggccctgcggatttggagaagggagcggggcaggacttccaggaggaccccaacccggcccggagagggaggaggaggcctccaggggcgcggagctctggggatgggcgtcgggccggcagtggtgcggctcactccgtccctgcccacctgcgacgggatcccccgaccggcacggccacgccgagctcccggccagccgccggcccgcaggcagcgcgagggaggagctgcgccgccgggccggggccgccggctccgcccaaccaggtggtgctgagcttccgctgagcgctcttttgttttgtggtttgacacttttcttgacagcatgttgcagtttcttttcggttttggttttttttaaatgttttattttgctttcccagcgggaggggaggaagaagagtgtttacaaagtcctgtagccccctcacctttctgttttcacttttgccaatgtacatcgggtttggttttcttgtattatttaaacggttgtggtttcctttttccacggaggttcaatagaagccgctgcaggagagttttaccaaccattgtgtatgcccaataatttgttatcatttccttaggtagtaacctatttttgttctggtttggttcggttatctaatggaaaggtaactggcaatgcacttgatgtggtcttgcacatgtgggtgatagagttgggttcctttttatgctgggtgtacaggtgggtttgggagagaggagcatgcgcgagagagtctccgagtgtgtgcgacgcgtgtgtgtgtggtgggttgtctgtgtgcatatgtcctgcccgtgtatatgcacccacaccatgtgcccgtgcacaccagtgactacgcagtcccccctttctggtttagctgtgggaagatctgaatctggggccgtttgaaagcaaaaacaaaccactgtctctgcttctgaaacgggaatcagtaactctttgcattttctgtcccacaagatatgcaaaaacaatgcaataatattcatttaaaaatacaattgtgagttgtgttggcattaaaactgtattttaaaaaaagacagaaatttaagggaaaaacacaagaaggcattttgcttcaatatattccgtgtaatgttttattgcattgataatgtttctgttgaagaaaccgttatacttgaattcaggtcagtttcagtatttttcaaatatttttttaaaactgaattgcaattgtgccaagcgaatataatgaattgaattaagttggttttcggattcacttcttgtatattttgctgcatgtaaagtaaatcattttgtatttggagtgtgacaagcttt

SEQ ID NO: 419832 - DNA, 8276 bp, Homo sapiens
atggtcaatgagaatacgaggatgtacattccagaggaaaaccaccaaggttccaactatgggagcccacgccccgcccatgccaacatgaatgccaatgcggcagcggggctggcccctgagcacatccccaccccgggggctgccctgtcgtggcaggcggccatcgacgcagcccggcaggctaagctgatgggcagcgctggcaatgcgaccatctccacagtcagctccacgcagcggaagcggcagcaatatgggaaacccaagaagcagggcagcaccacggccacacgcccgccccgagccctgctctgcctgaccctgaagaaccccatccggagggcctgcatcagcattgtcgaatggaaaccatttgaaataattattttactgactatttttgccaattgtgtggccttagcgatctatattccctttccagaagatgattccaacgccaccaattccaacctggaacgagtggaatatctctttctcataatttttacggtggaagcgtttttaaaagtaatcgcctatggactcctctttcaccccaatgcctacctccgcaacggctggaacctactagattttataattgtggttgtggggctttttagtgcaattttagaacaagcaaccaaagcagatggggcaaacgctctcggagggaaaggggccggatttgatgtgaaggcgctgagggccttccgcgtgctgcgccccctgcggctggtgtccggagtcccaagtctccaggtggtcctgaattccatcatcaaggccatggtccccctgctgcacatcgccctgcttgtgctgtttgtcatcatcatctacgccatcatcggcttggagctcttcatggggaagatgcacaagacctgctacaaccaggagggcatagcagatgttccagcagaagatgacccttccccttgtgcgctggaaacgggccacgggcggcagtgccagaacggcacggtgtgcaagcccggctgggatggtcccaagcacggcatcaccaactttgacaactttgccttcgccatgctcacggtgttccagtgcatcaccatggagggctggacggacgtgctgtactggatgcaggacgctatgggctatgagttaccctgggtgtattttgtcagtctggtcatctttggatcctttttcgttctaaatctggttctcggtgtgttgagcggagagttttccaaagagagggagaaggccaaggcccggggagatttccagaagctgcgggagaagcagcagctagaagaggatctcaaaggctacctggattggatcactcaggccgaagacatcgatcctgagaatgaggacgaaggcatggatgaggagaagccccgaaacatgagcatgcccaccagtgagaccgagtccgtcaacaccgaaaacgtggctggaggtgacatcgagggagaaaactgcggggccaggctggcccaccggatctccaagtcaaagttcagccgctactggcgccggtggaatcggttctgcagaaggaagtgccgcgccgcagtcaagtctaatgtcttctactggctggtgattttcctggtgttcctcaacacgctcaccattgcctctgagcactacaaccagcccaactggctcacagaagtccaagacacggcaaacaaggccctgctggccctgttcacggcagagatgctcctgaagatgtacagcctgggcctgcaggcctacttcgtgtccctcttcaaccgctttgactgcttcgtcgtgtgtggcggcatcctggagaccatcctggtggagaccaagatcatgtccccactgggcatctccgtgctcagatgcgtccggctgctgaggattttcaagatcacgaggtactggaactccttgagcaacctggtggcatccttgctgaactctgtgcgctccatcgcctccctgctccttctcctcttcctcttcatcatcatcttctccctcctggggatgcagctctttggaggaaagttcaactttgatgagatgcagacccggaggagcacattcgataacttcccccagtccctcctcactgtgtttcagatcctgaccggggaggactggaattcggtgatgtatgatgggatcatggcttatggcggcccctcttttccagggatgttagtctgtatttacttcatcatcctcttcatctgtggaaactatatcctactgaatgtgttcttggccattgctgtggacaacctggctgatgctgagagcctcacatctgcccaaaaggaggaggaagaggagaaggagagaaagaagctggccaggactgccagcccagagaagaaacaagagttggtggagaagccggcagtgggggaatccaaggaggagaagattgagctgaaatccatcacggctgacggagagtctccacccgccaccaagatcaacatggatgacctccagcccaatgaaaatgaggataagagcccctaccccaacccagaaactacaggagaagaggatgaggaggagccagagatgcctgtcggccctcgcccacgaccactctctgagcttcaccttaaggaaaaggcagtgcccatgccagaagccagcgcgtttttcatcttcagctctaacaacaggtttcgcctccagtgccaccgcattgtcaatgacacgatcttcaccaacctgatcctcttcttcattctgctcagcagcatttccctggctgctgaggacccggtccagcacacctccttcaggaaccatatcctaggcaatgcagactatgtcttcactagtatctttacattagaaattatccttaagatgactgcttatggggctttcttgcacaagggttctttctgccggaactacttcaacatcctggacctgctggtggtcagcgtgtccctcatctcctttggcatccagtccagtgcaatcaatgtcgtgaagatcttgcgagtcctgcgagtactcaggcccctgagggccatcaacagggccaaggggctaaagcatgtggttcagtgtgtgtttgtcgccatccggaccatcgggaacatcgtgattgtcaccaccctgctgcagttcatgtttgcctgcatcggggtccagctcttcaagggaaagctgtacacctgttcagacagttccaagcagacagaggcggaatgcaagggcaactacatcacgtacaaagacggggaggttgaccaccccatcatccaaccccgcagctgggagaacagcaagtttgactttgacaatgttctggcagccatgatggccctcttcaccgtctccaccttcgaagggtggccagagctgctgtaccgctccatcgactcccacacggaagacaagggccccatctacaactaccgtgtggagatctccatcttcttcatcatctacatcatcatcatcgccttcttcatgatgaacatcttcgtgggcttcgtcatcgtcacctttcaggagcagggggagcaggagtacaagaactgtgagctggacaagaaccagcgacagtgcgtggaatacgccctcaaggcccggcccctgcggaggtacatccccaagaaccagcaccagtacaaagtgtggtacgtggtcaactccacctacttcgagtacctgatgttcgtcctcatcctgctcaacaccatctgcctggccatgcagcactacggccagagctgcctgttcaaaatcgccatgaacatcctcaacatgctcttcactggcctcttcaccgtggagatgatcctgaagctcattgccttcaaacccaagggttactttagtgatccctggaatgtttttgacttcctcatcgtaattggcagcataattgacgtcattctcagtgagactaatccagctgaacatacccaatgctctccctctatgaacgcagaggaaaactcccgcatctccatcaccttcttccgcctgttccgggtcatgcgtctggtgaagctgctgagccgtggggagggcatccggacgctgctgtggaccttcatcaagtccttccaggccctgccctatgtggccctcctgatcgtgatgctgttcttcatctacgcggtgatcgggatgcaggtgtttgggaaaattgccctgaatgataccacagagatcaaccggaacaacaactttcagaccttcccccaggccgtgctgctcctcttcaggtgtgccaccggggaggcctggcaggacatcatgctggcctgcatgccaggcaagaagtgtgccccagagtccgagcccagcaacagcacggagggtgaaacaccctgtggtagcagctttgctgtcttctacttcatcagcttctacatgctctgtgccttcctgatcatcaacctctttgtagctgtcatcatggacaactttgactacctgacaagggactggtccatccttggtccccaccacctggatgagtttaaaagaatctgggcagagtatgaccctgaagccaagggtcgtatcaaacacctggatgtggtgaccctcctccggcggattcagccgccactaggttttgggaagctgtgccctcaccgcgtggcttgcaaacgcctggtctccatgaacatgcctctgaacagcgacgggacagtcatgttcaatgccaccctgtttgccctggtcaggacggccctgaggatcaaaacagaagggaacctagaacaagccaatgaggagctgcgggcgatcatcaagaagatctggaagcggaccagcatgaagctgctggaccaggtggtgccccctgcaggtgatgatgaggtcaccgttggcaagttctacgccacgttcctgatccaggagtacttccggaagttcaagaagcgcaaagagcagggccttgtgggcaagccctcccagaggaacgcgctgtctctgcaggctggcttgcgcacactgcatgacatcgggcctgagatccgacgggccatctctggagatctcaccgctgaggaggagctggacaaggccatgaaggaggctgtgtccgctgcttctgaagatgacatcttcaggagggccggtggcctgttcggcaaccacgtcagctactaccaaagcgacggccggagcgccttcccccagaccttcaccactcagcgcccgctgcacatcaacaaggcgggcagcagccagggcgacactgagtcgccatcccacgagaagctggtggactccaccttcaccccgagcagctactcgtccaccggctccaacgccaacatcaacaacgccaacaacaccgccctgggtcgcctccctcgccccgccggctaccccagcacggtcagcactgtggagggccacgggccccccttgtcccctgccatccgggtgcaggaggtggcgtggaagctcagctccaacagggaaaggcacgttccggtgtgtgaggatctggagctcaggagggattcaggctcagcagggactcaggctcactgccttctgctcaggagagcaaacccctctaggtgccactcccgggagagccaggcagccatggcgggtcaggaggagacgtctcaggatgagacctatgaagtgaagatgaaccatgacacggaggcctgcagtgagcccagcctgctctccacagagatgctctcctaccaggatgacgaaaatcggcaactgacgctcccagaggaggacaagagggacatccggcaatctccgaagaggggtttcctccgctctgcctcactaggtcgaagggcctccttccacctggaatgtctgaagcgacagaaggaccgagggggagacatctctcagaagacagtcctgcccttgcatctggttcatcatcaggcattggcagtggcaggcctgagccccctcctccagagaagccattcccctgcctcattccctaggccttttgccaccccaccagccacacctggcagccgaggctggcccccacagcccgtccccaccctgcggcttgagggggtcgagtccagtgagaaactcaacagcagcttcccatccatccactgcggctcctgggctgagaccacccccggtggcgggggcagcagcgccgcccggagagtccggcccgtctccctcatggtgcccagccaggctggggccccagggaggcagttccacggcagtgccagcagcctggtggaagcggtcttgatttcagaaggactggggcagtttgctcaagatcccaagttcatcgaggtcaccacccaggagctggccgacgcctgcgacatgaccatagaggagatggagagcgcggccgacaacatcctcagcgggggcgccccacagagccccaatggcgccctcttaccctttgtgaactgcagggacgcggggcaggaccgagccgggggcgaggaggacgcgggctgtgtgcgcgcgcggggtgcaccgagtgaggaggagctccaggacagcagggtctacgtcagcagcctgtagtgggcgctgccagatgcgggcttttttttttttatttgtttcaatgttcctaatgggttcgtttcagaagtgcctcactgttctcgtgacctggagttaaccggaacagcgtcttcattcatttctgttgggaccagacgcggagcctgggtgcgcgagccgccctccgggaggaaggcgcccggctgcgtctgcagaggcggggagaggaggcggcgagggtcccggggcgcgaggaaggcgctgccctctcccagctcgcaggccccgggccggccgcgcctctgcgggagagcaccccggcttcccgcgcgccctcaccaaaaggaccctacagcaaacggggtctttcgactctgcttgtagaaaccatttgcacatattctgtacgagcctgctgtctccctagagccagggccctgcggatttggagaagggagcggggcaggacttccaggaggaccccaacccggcccggagagggaggaggaggcctccaggggcgcggagctctggggatgggcgtcgggccggcagtggtgcggctcactccgtccctgcccacctgcgacgggatcccccgaccggcacggccacgccgagctcccggccagccgccggcccgcaggcagcgcgagggaggagctgcgccgccgggccggggccgccggctccgcccaaccaggtggtgctgagcttccgctgagcgctcttttgttttgtggtttgacacttttcttgacagcatgttgcagtttcttttcggttttggttttttttaaatgttttattttgctttcccagcgggaggggaggaagaagagtgtttacaaagtcctgtagccccctcacctttctgttttcacttttgccaatgtacatcgggtttggttttcttgtattatttaaacggttgtggtttcctttttccacggaggttcaatagaagccgctgcaggagagttttaccaaccattgtgtatgcccaataatttgttatcatttccttaggtagtaacctatttttgttctggtttggttcggttatctaatggaaaggtaactggcaatgcacttgatgtggtcttgcacatgtgggtgatagagttgggttcctttttatgctgggtgtacaggtgggtttgggagagaggagcatgcgcgagagagtctccgagtgtgtgcgacgcgtgtgtgtgtggtgggttgtctgtgtgcatatgtcctgcccgtgtatatgcacccacaccatgtgcccgtgcacaccagtgactacgcagtcccccctttctggtttagctgtgggaagatctgaatctggggccgtttgaaagcaaaaacaaaccactgtctctgcttctgaaacgggaatcagtaactctttgcattttctgtcccacaagatatgcaaaaacaatgcaataatattcatttaaaaatacaattgtgagttgtgttggcattaaaactgtattttaaaaaaagacagaaatttaagggaaaaacacaagaaggcattttgcttcaatatattccgtgtaatgttttattgcattgataatgtttctgttgaagaaaccgttatacttgaattcaggtcagtttcagtatttttcaaatatttttttaaaactgaattgcaattgtgccaagcgaatataatgaattgaattaagttggttttcggattcacttcttgtatattttgctgcatgtaaagtaaatcattttgtatttggagtgtgacaagcttt

SEQ ID NO: 419833 - DNA, 8255 bp, Homo sapiens
atggtcaatgagaatacgaggatgtacattccagaggaaaaccaccaaggttccaactatgggagcccacgccccgcccatgccaacatgaatgccaatgcggcagcggggctggcccctgagcacatccccaccccgggggctgccctgtcgtggcaggcggccatcgacgcagcccggcaggctaagctgatgggcagcgctggcaatgcgaccatctccacagtcagctccacgcagcggaagcggcagcaatatgggaaacccaagaagcagggcagcaccacggccacacgcccgccccgagccctgctctgcctgaccctgaagaaccccatccggagggcctgcatcagcattgtcgaatggaaaccatttgaaataattattttactgactatttttgccaattgtgtggccttagcgatctatattccctttccagaagatgattccaacgccaccaattccaacctggaacgagtggaatatctctttctcataatttttacggtggaagcgtttttaaaagtaatcgcctatggactcctctttcaccccaatgcctacctccgcaacggctggaacctactagattttataattgtggttgtggggctttttagtgcaattttagaacaagcaaccaaagcagatggggcaaacgctctcggagggaaaggggccggatttgatgtgaaggcgctgagggccttccgcgtgctgcgccccctgcggctggtgtccggagtcccaagtctccaggtggtcctgaattccatcatcaaggccatggtccccctgctgcacatcgccctgcttgtgctgtttgtcatcatcatctacgccatcatcggcttggagctcttcatggggaagatgcacaagacctgctacaaccaggagggcatagcagatgttccagcagaagatgacccttccccttgtgcgctggaaacgggccacgggcggcagtgccagaacggcacggtgtgcaagcccggctgggatggtcccaagcacggcatcaccaactttgacaactttgccttcgccatgctcacggtgttccagtgcatcaccatggagggctggacggacgtgctgtactgggtcaatgatgccgtaggaagggactggccctggatctattttgttacactaatcatcatagggtcattttttgtacttaacttggttctcggtgtgcttagcggagagttttccaaagagagggagaaggccaaggcccggggagatttccagaagctgcgggagaagcagcagctagaagaggatctcaaaggctacctggattggatcactcaggccgaagacatcgatcctgagaatgaggacgaaggcatggatgaggagaagccccgaaacatgagcatgcccaccagtgagaccgagtccgtcaacaccgaaaacgtggctggaggtgacatcgagggagaaaactgcggggccaggctggcccaccggatctccaagtcaaagttcagccgctactggcgccggtggaatcggttctgcagaaggaagtgccgcgccgcagtcaagtctaatgtcttctactggctggtgattttcctggtgttcctcaacacgctcaccattgcctctgagcactacaaccagcccaactggctcacagaagtccaagacacggcaaacaaggccctgctggccctgttcacggcagagatgctcctgaagatgtacagcctgggcctgcaggcctacttcgtgtccctcttcaaccgctttgactgcttcgtcgtgtgtggcggcatcctggagaccatcctggtggagaccaagatcatgtccccactgggcatctccgtgctcagatgcgtccggctgctgaggattttcaagatcacgaggtactggaactccttgagcaacctggtggcatccttgctgaactctgtgcgctccatcgcctccctgctccttctcctcttcctcttcatcatcatcttctccctcctggggatgcagctctttggaggaaagttcaactttgatgagatgcagacccggaggagcacattcgataacttcccccagtccctcctcactgtgtttcagatcctgaccggggaggactggaattcggtgatgtatgatgggatcatggcttatggcggcccctcttttccagggatgttagtctgtatttacttcatcatcctcttcatctgtggaaactatatcctactgaatgtgttcttggccattgctgtggacaacctggctgatgctgagagcctcacatctgcccaaaaggaggaggaagaggagaaggagagaaagaagctggccaggactgccagcccagagaagaaacaagagttggtggagaagccggcagtgggggaatccaaggaggagaagattgagctgaaatccatcacggctgacggagagtctccacccgccaccaagatcaacatggatgacctccagcccaatgaaaatgaggataagagcccctaccccaacccagaaactacaggagaagaggatgaggaggagccagagatgcctgtcggccctcgcccacgaccactctctgagcttcaccttaaggaaaaggcagtgcccatgccagaagccagcgcgtttttcatcttcagctctaacaacaggtttcgcctccagtgccaccgcattgtcaatgacacgatcttcaccaacctgatcctcttcttcattctgctcagcagcatttccctggctgctgaggacccggtccagcacacctccttcaggaaccatattctgttttattttgatattgtttttaccaccattttcaccattgaaattgctctgaagatgactgcttatggggctttcttgcacaagggttctttctgccggaactacttcaacatcctggacctgctggtggtcagcgtgtccctcatctcctttggcatccagtccagtgcaatcaatgtcgtgaagatcttgcgagtcctgcgagtactcaggcccctgagggccatcaacagggccaaggggctaaagcatgtggttcagtgtgtgtttgtcgccatccggaccatcgggaacatcgtgattgtcaccaccctgctgcagttcatgtttgcctgcatcggggtccagctcttcaagggaaagctgtacacctgttcagacagttccaagcagacagaggcggaatgcaagggcaactacatcacgtacaaagacggggaggttgaccaccccatcatccaaccccgcagctgggagaacagcaagtttgactttgacaatgttctggcagccatgatggccctcttcaccgtctccaccttcgaagggtggccagagctgctgtaccgctccatcgactcccacacggaagacaagggccccatctacaactaccgtgtggagatctccatcttcttcatcatctacatcatcatcatcgccttcttcatgatgaacatcttcgtgggcttcgtcatcgtcacctttcaggagcagggggagcaggagtacaagaactgtgagctggacaagaaccagcgacagtgcgtggaatacgccctcaaggcccggcccctgcggaggtacatccccaagaaccagcaccagtacaaagtgtggtacgtggtcaactccacctacttcgagtacctgatgttcgtcctcatcctgctcaacaccatctgcctggccatgcagcactacggccagagctgcctgttcaaaatcgccatgaacatcctcaacatgctcttcactggcctcttcaccgtggagatgatcctgaagctcattgccttcaaacccaagggttactttagtgatccctggaatgtttttgacttcctcatcgtaattggcagcataattgacgtcattctcagtgagactaatcactatttctgtgatgcatggaatacatttgacgccttgattgttgtgggtagcattgttgatatagcaatcaccgaggtaaacccagctgaacatacccaatgctctccctctatgaacgcagaggaaaactcccgcatctccatcaccttcttccgcctgttccgggtcatgcgtctggtgaagctgctgagccgtggggagggcatccggacgctgctgtggaccttcatcaagtccttccaggccctgccctatgtggccctcctgatcgtgatgctgttcttcatctacgcggtgatcgggatgcaggtgtttgggaaaattgccctgaatgataccacagagatcaaccggaacaacaactttcagaccttcccccaggccgtgctgctcctcttcaggtgtgccaccggggaggcctggcaggacatcatgctggcctgcatgccaggcaagaagtgtgccccagagtccgagcccagcaacagcacggagggtgaaacaccctgtggtagcagctttgctgtcttctacttcatcagcttctacatgctctgtgccttcctgatcatcaacctctttgtagctgtcatcatggacaactttgactacctgacaagggactggtccatccttggtccccaccacctggatgagtttaaaagaatctgggcagagtatgaccctgaagccaagggtcgtatcaaacacctggatgtggtgaccctcctccggcggattcagccgccactaggttttgggaagctgtgccctcaccgcgtggcttgcaaacgcctggtctccatgaacatgcctctgaacagcgacgggacagtcatgttcaatgccaccctgtttgccctggtcaggacggccctgaggatcaaaacagaagggaacctagaacaagccaatgaggagctgcgggcgatcatcaagaagatctggaagcggaccagcatgaagctgctggaccaggtggtgccccctgcaggtgatgatgaggtcaccgttggcaagttctacgccacgttcctgatccaggagtacttccggaagttcaagaagcgcaaagagcagggccttgtgggcaagccctcccagaggaacgcgctgtctctgcaggctggcttgcgcacactgcatgacatcgggcctgagatccgacgggccatctctggagatctcaccgctgaggaggagctggacaaggccatgaaggaggctgtgtccgctgcttctgaagatgacatcttcaggagggccggtggcctgttcggcaaccacgtcagctactaccaaagcgacggccggagcgccttcccccagaccttcaccactcagcgcccgctgcacatcaacaaggcgggcagcagccagggcgacactgagtcgccatcccacgagaagctggtggactccaccttcaccccgagcagctactcgtccaccggctccaacgccaacatcaacaacgccaacaacaccgccctgggtcgcctccctcgccccgccggctaccccagcacggtcagcactgtggagggccacgggccccccttgtcccctgccatccgggtgcaggaggtggcgtggaagctcagctccaacaggtgccactcccgggagagccaggcagccatggcgggtcaggaggagacgtctcaggatgagacctatgaagtgaagatgaaccatgacacggaggcctgcagtgagcccagcctgctctccacagagatgctctcctaccaggatgacgaaaatcggcaactgacgctcccagaggaggacaagagggacatccggcaatctccgaagaggggtttcctccgctctgcctcactaggtcgaagggcctccttccacctggaatgtctgaagcgacagaaggaccgagggggagacatctctcagaagacagtcctgcccttgcatctggttcatcatcaggcattggcagtggcaggcctgagccccctcctccagagaagccattcccctgcctcattccctaggccttttgccaccccaccagccacacctggcagccgaggctggcccccacagcccgtccccaccctgcggcttgagggggtcgagtccagtgagaaactcaacagcagcttcccatccatccactgcggctcctgggctgagaccacccccggtggcgggggcagcagcgccgcccggagagtccggcccgtctccctcatggtgcccagccaggctggggccccagggaggcagttccacggcagtgccagcagcctggtggaagcggtcttgatttcagaaggactggggcagtttgctcaagatcccaagttcatcgaggtcaccacccaggagctggccgacgcctgcgacatgaccatagaggagatggagagcgcggccgacaacatcctcagcgggggcgccccacagagccccaatggcgccctcttaccctttgtgaactgcagggacgcggggcaggaccgagccgggggcgaggaggacgcgggctgtgtgcgcgcgcggggtgcaccgagtgaggaggagctccaggacagcagggtctacgtcagcagcctgtagtgggcgctgccagatgcgggcttttttttttttatttgtttcaatgttcctaatgggttcgtttcagaagtgcctcactgttctcgtgacctggagttaaccggaacagcgtcttcattcatttctgttgggaccagacgcggagcctgggtgcgcgagccgccctccgggaggaaggcgcccggctgcgtctgcagaggcggggagaggaggcggcgagggtcccggggcgcgaggaaggcgctgccctctcccagctcgcaggccccgggccggccgcgcctctgcgggagagcaccccggcttcccgcgcgccctcaccaaaaggaccctacagcaaacggggtctttcgactctgcttgtagaaaccatttgcacatattctgtacgagcctgctgtctccctagagccagggccctgcggatttggagaagggagcggggcaggacttccaggaggaccccaacccggcccggagagggaggaggaggcctccaggggcgcggagctctggggatgggcgtcgggccggcagtggtgcggctcactccgtccctgcccacctgcgacgggatcccccgaccggcacggccacgccgagctcccggccagccgccggcccgcaggcagcgcgagggaggagctgcgccgccgggccggggccgccggctccgcccaaccaggtggtgctgagcttccgctgagcgctcttttgttttgtggtttgacacttttcttgacagcatgttgcagtttcttttcggttttggttttttttaaatgttttattttgctttcccagcgggaggggaggaagaagagtgtttacaaagtcctgtagccccctcacctttctgttttcacttttgccaatgtacatcgggtttggttttcttgtattatttaaacggttgtggtttcctttttccacggaggttcaatagaagccgctgcaggagagttttaccaaccattgtgtatgcccaataatttgttatcatttccttaggtagtaacctatttttgttctggtttggttcggttatctaatggaaaggtaactggcaatgcacttgatgtggtcttgcacatgtgggtgatagagttgggttcctttttatgctgggtgtacaggtgggtttgggagagaggagcatgcgcgagagagtctccgagtgtgtgcgacgcgtgtgtgtgtggtgggttgtctgtgtgcatatgtcctgcccgtgtatatgcacccacaccatgtgcccgtgcacaccagtgactacgcagtcccccctttctggtttagctgtgggaagatctgaatctggggccgtttgaaagcaaaaacaaaccactgtctctgcttctgaaacgggaatcagtaactctttgcattttctgtcccacaagatatgcaaaaacaatgcaataatattcatttaaaaatacaattgtgagttgtgttggcattaaaactgtattttaaaaaaagacagaaatttaagggaaaaacacaagaaggcattttgcttcaatatattccgtgtaatgttttattgcattgataatgtttctgttgaagaaaccgttatacttgaattcaggtcagtttcagtatttttcaaatatttttttaaaactgaattgcaattgtgccaagcgaatataatgaattgaattaagttggttttcggattcacttcttgtatattttgctgcatgtaaagtaaatcattttgtatttggagtgtgacaagcttt

SEQ ID NO: 419834 - DNA, 8222 bp, Homo sapiens
atggtcaatgagaatacgaggatgtacattccagaggaaaaccaccaaggttccaactatgggagcccacgccccgcccatgccaacatgaatgccaatgcggcagcggggctggcccctgagcacatccccaccccgggggctgccctgtcgtggcaggcggccatcgacgcagcccggcaggctaagctgatgggcagcgctggcaatgcgaccatctccacagtcagctccacgcagcggaagcggcagcaatatgggaaacccaagaagcagggcagcaccacggccacacgcccgccccgagccctgctctgcctgaccctgaagaaccccatccggagggcctgcatcagcattgtcgaatggaaaccatttgaaataattattttactgactatttttgccaattgtgtggccttagcgatctatattccctttccagaagatgattccaacgccaccaattccaacctggaacgagtggaatatctctttctcataatttttacggtggaagcgtttttaaaagtaatcgcctatggactcctctttcaccccaatgcctacctccgcaacggctggaacctactagattttataattgtggttgtggggctttttagtgcaattttagaacaagcaaccaaagcagatggggcaaacgctctcggagggaaaggggccggatttgatgtgaaggcgctgagggccttccgcgtgctgcgccccctgcggctggtgtccggagtcccaagtctccaggtggtcctgaattccatcatcaaggccatggtccccctgctgcacatcgccctgcttgtgctgtttgtcatcatcatctacgccatcatcggcttggagctcttcatggggaagatgcacaagacctgctacaaccaggagggcatagcagatgttccagcagaagatgacccttccccttgtgcgctggaaacgggccacgggcggcagtgccagaacggcacggtgtgcaagcccggctgggatggtcccaagcacggcatcaccaactttgacaactttgccttcgccatgctcacggtgttccagtgcatcaccatggagggctggacggacgtgctgtactgggtcaatgatgccgtaggaagggactggccctggatctattttgttacactaatcatcatagggtcattttttgtacttaacttggttctcggtgtgcttagcggagagttttccaaagagagggagaaggccaaggcccggggagatttccagaagctgcgggagaagcagcagctagaagaggatctcaaaggctacctggattggatcactcaggccgaagacatcgatcctgagaatgaggacgaaggcatggatgaggagaagccccgaaacatgagcatgcccaccagtgagaccgagtccgtcaacaccgaaaacgtggctggaggtgacatcgagggagaaaactgcggggccaggctggcccaccggatctccaagtcaaagttcagccgctactggcgccggtggaatcggttctgcagaaggaagtgccgcgccgcagtcaagtctaatgtcttctactggctggtgattttcctggtgttcctcaacacgctcaccattgcctctgagcactacaaccagcccaactggctcacagaagtccaagacacggcaaacaaggccctgctggccctgttcacggcagagatgctcctgaagatgtacagcctgggcctgcaggcctacttcgtgtccctcttcaaccgctttgactgcttcgtcgtgtgtggcggcatcctggagaccatcctggtggagaccaagatcatgtccccactgggcatctccgtgctcagatgcgtccggctgctgaggattttcaagatcacgaggtactggaactccttgagcaacctggtggcatccttgctgaactctgtgcgctccatcgcctccctgctccttctcctcttcctcttcatcatcatcttctccctcctggggatgcagctctttggaggaaagttcaactttgatgagatgcagacccggaggagcacattcgataacttcccccagtccctcctcactgtgtttcagatcctgaccggggaggactggaattcggtgatgtatgatgggatcatggcttatggcggcccctcttttccagggatgttagtctgtatttacttcatcatcctcttcatctgtggaaactatatcctactgaatgtgttcttggccattgctgtggacaacctggctgatgctgagagcctcacatctgcccaaaaggaggaggaagaggagaaggagagaaagaagctggccaggactgccagcccagagaagaaacaagagttggtggagaagccggcagtgggggaatccaaggaggagaagattgagctgaaatccatcacggctgacggagagtctccacccgccaccaagatcaacatggatgacctccagcccaatgaaaatgaggataagagcccctaccccaacccagaaactacaggagaagaggatgaggaggagccagagatgcctgtcggccctcgcccacgaccactctctgagcttcaccttaaggaaaaggcagtgcccatgccagaagccagcgcgtttttcatcttcagctctaacaacaggtttcgcctccagtgccaccgcattgtcaatgacacgatcttcaccaacctgatcctcttcttcattctgctcagcagcatttccctggctgctgaggacccggtccagcacacctccttcaggaaccatatcctaggcaatgcagactatgtcttcactagtatctttacattagaaattatccttaagatgactgcttatggggctttcttgcacaagggttctttctgccggaactacttcaacatcctggacctgctggtggtcagcgtgtccctcatctcctttggcatccagtccagtgcaatcaatgtcgtgaagatcttgcgagtcctgcgagtactcaggcccctgagggccatcaacagggccaaggggctaaagcatgtggttcagtgtgtgtttgtcgccatccggaccatcgggaacatcgtgattgtcaccaccctgctgcagttcatgtttgcctgcatcggggtccagctcttcaagggaaagctgtacacctgttcagacagttccaagcagacagaggcggaatgcaagggcaactacatcacgtacaaagacggggaggttgaccaccccatcatccaaccccgcagctgggagaacagcaagtttgactttgacaatgttctggcagccatgatggccctcttcaccgtctccaccttcgaagggtggccagagctgctgtaccgctccatcgactcccacacggaagacaagggccccatctacaactaccgtgtggagatctccatcttcttcatcatctacatcatcatcatcgccttcttcatgatgaacatcttcgtgggcttcgtcatcgtcacctttcaggagcagggggagcaggagtacaagaactgtgagctggacaagaaccagcgacagtgcgtggaatacgccctcaaggcccggcccctgcggaggtacatccccaagaaccagcaccagtacaaagtgtggtacgtggtcaactccacctacttcgagtacctgatgttcgtcctcatcctgctcaacaccatctgcctggccatgcagcactacggccagagctgcctgttcaaaatcgccatgaacatcctcaacatgctcttcactggcctcttcaccgtggagatgatcctgaagctcattgccttcaaacccaagggttactttagtgatccctggaatgtttttgacttcctcatcgtaattggcagcataattgacgtcattctcagtgagactaatcactatttctgtgatgcatggaatacatttgacgccttgattgttgtgggtagcattgttgatatagcaatcaccgaggtaaacaacgcagaggaaaactcccgcatctccatcaccttcttccgcctgttccgggtcatgcgtctggtgaagctgctgagccgtggggagggcatccggacgctgctgtggaccttcatcaagtccttccaggccctgccctatgtggccctcctgatcgtgatgctgttcttcatctacgcggtgatcgggatgcaggtgtttgggaaaattgccctgaatgataccacagagatcaaccggaacaacaactttcagaccttcccccaggccgtgctgctcctcttcaggtgtgccaccggggaggcctggcaggacatcatgctggcctgcatgccaggcaagaagtgtgccccagagtccgagcccagcaacagcacggagggtgaaacaccctgtggtagcagctttgctgtcttctacttcatcagcttctacatgctctgtgccttcctgatcatcaacctctttgtagctgtcatcatggacaactttgactacctgacaagggactggtccatccttggtccccaccacctggatgagtttaaaagaatctgggcagagtatgaccctgaagccaagggtcgtatcaaacacctggatgtggtgaccctcctccggcggattcagccgccactaggttttgggaagctgtgccctcaccgcgtggcttgcaaacgcctggtctccatgaacatgcctctgaacagcgacgggacagtcatgttcaatgccaccctgtttgccctggtcaggacggccctgaggatcaaaacagaagggaacctagaacaagccaatgaggagctgcgggcgatcatcaagaagatctggaagcggaccagcatgaagctgctggaccaggtggtgccccctgcaggtgatgatgaggtcaccgttggcaagttctacgccacgttcctgatccaggagtacttccggaagttcaagaagcgcaaagagcagggccttgtgggcaagccctcccagaggaacgcgctgtctctgcaggctggcttgcgcacactgcatgacatcgggcctgagatccgacgggccatctctggagatctcaccgctgaggaggagctggacaaggccatgaaggaggctgtgtccgctgcttctgaagatgacatcttcaggagggccggtggcctgttcggcaaccacgtcagctactaccaaagcgacggccggagcgccttcccccagaccttcaccactcagcgcccgctgcacatcaacaaggcgggcagcagccagggcgacactgagtcgccatcccacgagaagctggtggactccaccttcaccccgagcagctactcgtccaccggctccaacgccaacatcaacaacgccaacaacaccgccctgggtcgcctccctcgccccgccggctaccccagcacggtcagcactgtggagggccacgggccccccttgtcccctgccatccgggtgcaggaggtggcgtggaagctcagctccaacaggtgccactcccgggagagccaggcagccatggcgggtcaggaggagacgtctcaggatgagacctatgaagtgaagatgaaccatgacacggaggcctgcagtgagcccagcctgctctccacagagatgctctcctaccaggatgacgaaaatcggcaactgacgctcccagaggaggacaagagggacatccggcaatctccgaagaggggtttcctccgctctgcctcactaggtcgaagggcctccttccacctggaatgtctgaagcgacagaaggaccgagggggagacatctctcagaagacagtcctgcccttgcatctggttcatcatcaggcattggcagtggcaggcctgagccccctcctccagagaagccattcccctgcctcattccctaggccttttgccaccccaccagccacacctggcagccgaggctggcccccacagcccgtccccaccctgcggcttgagggggtcgagtccagtgagaaactcaacagcagcttcccatccatccactgcggctcctgggctgagaccacccccggtggcgggggcagcagcgccgcccggagagtccggcccgtctccctcatggtgcccagccaggctggggccccagggaggcagttccacggcagtgccagcagcctggtggaagcggtcttgatttcagaaggactggggcagtttgctcaagatcccaagttcatcgaggtcaccacccaggagctggccgacgcctgcgacatgaccatagaggagatggagagcgcggccgacaacatcctcagcgggggcgccccacagagccccaatggcgccctcttaccctttgtgaactgcagggacgcggggcaggaccgagccgggggcgaggaggacgcgggctgtgtgcgcgcgcggggtgcaccgagtgaggaggagctccaggacagcagggtctacgtcagcagcctgtagtgggcgctgccagatgcgggcttttttttttttatttgtttcaatgttcctaatgggttcgtttcagaagtgcctcactgttctcgtgacctggagttaaccggaacagcgtcttcattcatttctgttgggaccagacgcggagcctgggtgcgcgagccgccctccgggaggaaggcgcccggctgcgtctgcagaggcggggagaggaggcggcgagggtcccggggcgcgaggaaggcgctgccctctcccagctcgcaggccccgggccggccgcgcctctgcgggagagcaccccggcttcccgcgcgccctcaccaaaaggaccctacagcaaacggggtctttcgactctgcttgtagaaaccatttgcacatattctgtacgagcctgctgtctccctagagccagggccctgcggatttggagaagggagcggggcaggacttccaggaggaccccaacccggcccggagagggaggaggaggcctccaggggcgcggagctctggggatgggcgtcgggccggcagtggtgcggctcactccgtccctgcccacctgcgacgggatcccccgaccggcacggccacgccgagctcccggccagccgccggcccgcaggcagcgcgagggaggagctgcgccgccgggccggggccgccggctccgcccaaccaggtggtgctgagcttccgctgagcgctcttttgttttgtggtttgacacttttcttgacagcatgttgcagtttcttttcggttttggttttttttaaatgttttattttgctttcccagcgggaggggaggaagaagagtgtttacaaagtcctgtagccccctcacctttctgttttcacttttgccaatgtacatcgggtttggttttcttgtattatttaaacggttgtggtttcctttttccacggaggttcaatagaagccgctgcaggagagttttaccaaccattgtgtatgcccaataatttgttatcatttccttaggtagtaacctatttttgttctggtttggttcggttatctaatggaaaggtaactggcaatgcacttgatgtggtcttgcacatgtgggtgatagagttgggttcctttttatgctgggtgtacaggtgggtttgggagagaggagcatgcgcgagagagtctccgagtgtgtgcgacgcgtgtgtgtgtggtgggttgtctgtgtgcatatgtcctgcccgtgtatatgcacccacaccatgtgcccgtgcacaccagtgactacgcagtcccccctttctggtttagctgtgggaagatctgaatctggggccgtttgaaagcaaaaacaaaccactgtctctgcttctgaaacgggaatcagtaactctttgcattttctgtcccacaagatatgcaaaaacaatgcaataatattcatttaaaaatacaattgtgagttgtgttggcattaaaactgtattttaaaaaaagacagaaatttaagggaaaaacacaagaaggcattttgcttcaatatattccgtgtaatgttttattgcattgataatgtttctgttgaagaaaccgttatacttgaattcaggtcagtttcagtatttttcaaatatttttttaaaactgaattgcaattgtgccaagcgaatataatgaattgaattaagttggttttcggattcacttcttgtatattttgctgcatgtaaagtaaatcattttgtatttggagtgtgacaagcttt

SEQ ID NO: 419835 - DNA, 9675 bp, Homo sapiens
ccatggactcaatgtcaatgcttctcatgtgatacacaagaatactcaattaaaaaatgctaagggataagttttttttcagatagagttgagctttaaagggccacaaaccattgaaataggtaagatttgttcctgctcccaagaattaacttattgttcctttgagagcaatatcatacccaatgagactacacaattgagaaaaaatcagttggattaaaaaaatttgtacattaaaattcaaatttccaaagaacctgcaaaggttccaatactagttgattcttatctaactaaatgaaacaatttttgtcctaaatgttcatgatgggaggtaaatgtgataacatatatggggtgtacaattgttttacatgccatgccagacaccagagatatttgtttctaattttcattttcattgaaaacaaaagttgttacttttgcatcctaaagaatggagacaagaagaaaacaaacgtgtatctaaatgtgattaaaatgttaaaaggaaaaaatatcttaatggaaaaaaaataatgatgaaatagaatttacctacattaattccagtcacgatggaaattaaaggagggaagagcagaagcaaaattgtggaagagatgtagactaaaggagcaaatgagcatggctggaagatagtaatcattcctggtcagggtgtgttttcagctttgctgaatccagccttcacagagagtcatggacacacaccaaccacaagagtttatacataaaaaaggcaaaaatttgagagtacaatatactctctgcataataggtaagtgatgatgtaccaagttctcccttagtgtataaataaactcaagagatcaatatttttcttatcacatctcttacaagaaacaagggaattgataatgtcaaaggacactttctgcaacctagtaaagttcgataataaaaatagtgattaaaaggaaccaaatacctaaattgttgaatgtgtttatttttagtcagacattgttcttagcacttacaaaattgatgctccctttagcaataatgaatactcttatttttcatattaactgaacacctaccatgtgtctacccccattaattcactggagatatcagtgaccaaagaagactgataggttctactgttattcctatttacaaaataaaaaatagaagtataaggaactatcaaattatgaagccattgtttgaacccaaaatctgactgagccctcagttcttacatgctcccaggaatatttctggtcataagaactagagcgatttctagattgatcaatattttcccagtagagtcctgcctaggtaatgacagagtctttctcttcagctgtttactagtcttcttcactgaaattccccatttgaccatgccaacatgaatgccaatgcggcagcggggctggcccctgagcacatccccaccccgggggctgccctgtcgtggcaggcggccatcgacgcagcccggcaggctaagctgatgggcagcgctggcaatgcgaccatctccacagtcagctccacgcagcggaagcggcagcaatatgggaaacccaagaagcagggcagcaccacggccacacgcccgccccgagccctgctctgcctgaccctgaagaaccccatccggagggcctgcatcagcattgtcgaatggaaaccatttgaaataattattttactgactatttttgccaattgtgtggccttagcgatctatattccctttccagaagatgattccaacgccaccaattccaacctggaacgagtggaatatctctttctcataatttttacggtggaagcgtttttaaaagtaatcgcctatggactcctctttcaccccaatgcctacctccgcaacggctggaacctactagattttataattgtggttgtggggctttttagtgcaattttagaacaagcaaccaaagcagatggggcaaacgctctcggagggaaaggggccggatttgatgtgaaggcgctgagggccttccgcgtgctgcgccccctgcggctggtgtccggagtcccaagtctccaggtggtcctgaattccatcatcaaggccatggtccccctgctgcacatcgccctgcttgtgctgtttgtcatcatcatctacgccatcatcggcttggagctcttcatggggaagatgcacaagacctgctacaaccaggagggcatagcagatgttccagcagaagatgacccttccccttgtgcgctggaaacgggccacgggcggcagtgccagaacggcacggtgtgcaagcccggctgggatggtcccaagcacggcatcaccaactttgacaactttgccttcgccatgctcacggtgttccagtgcatcaccatggagggctggacggacgtgctgtactggatgcaggacgctatgggctatgagttaccctgggtgtattttgtcagtctggtcatctttggatcctttttcgttctaaatctggttctcggtgtgttgagcggagagttttccaaagagagggagaaggccaaggcccggggagatttccagaagctgcgggagaagcagcagctagaagaggatctcaaaggctacctggattggatcactcaggccgaagacatcgatcctgagaatgaggacgaaggcatggatgaggagaagccccgaaacatgagcatgcccaccagtgagaccgagtccgtcaacaccgaaaacgtggctggaggtgacatcgagggagaaaactgcggggccaggctggcccaccggatctccaagtcaaagttcagccgctactggcgccggtggaatcggttctgcagaaggaagtgccgcgccgcagtcaagtctaatgtcttctactggctggtgattttcctggtgttcctcaacacgctcaccattgcctctgagcactacaaccagcccaactggctcacagaagtccaagacacggcaaacaaggccctgctggccctgttcacggcagagatgctcctgaagatgtacagcctgggcctgcaggcctacttcgtgtccctcttcaaccgctttgactgcttcgtcgtgtgtggcggcatcctggagaccatcctggtggagaccaagatcatgtccccactgggcatctccgtgctcagatgcgtccggctgctgaggattttcaagatcacgaggtactggaactccttgagcaacctggtggcatccttgctgaactctgtgcgctccatcgcctccctgctccttctcctcttcctcttcatcatcatcttctccctcctggggatgcagctctttggaggaaagttcaactttgatgagatgcagacccggaggagcacattcgataacttcccccagtccctcctcactgtgtttcagatcctgaccggggaggactggaattcggtgatgtatgatgggatcatggcttatggcggcccctcttttccagggatgttagtctgtatttacttcatcatcctcttcatctgtggaaactatatcctactgaatgtgttcttggccattgctgtggacaacctggctgatgctgagagcctcacatctgcccaaaaggaggaggaagaggagaaggagagaaagaagctggccaggactgccagcccagagaagaaacaagagttggtggagaagccggcagtgggggaatccaaggaggagaagattgagctgaaatccatcacggctgacggagagtctccacccgccaccaagatcaacatggatgacctccagcccaatgaaaatgaggataagagcccctaccccaacccagaaactacaggagaagaggatgaggaggagccagagatgcctgtcggccctcgcccacgaccactctctgagcttcaccttaaggaaaaggcagtgcccatgccagaagccagcgcgtttttcatcttcagctctaacaacaggtttcgcctccagtgccaccgcattgtcaatgacacgatcttcaccaacctgatcctcttcttcattctgctcagcagcatttccctggctgctgaggacccggtccagcacacctccttcaggaaccatattctgttttattttgatattgtttttaccaccattttcaccattgaaattgctctgaagatgactgcttatggggctttcttgcacaagggttctttctgccggaactacttcaacatcctggacctgctggtggtcagcgtgtccctcatctcctttggcatccagtccagtgcaatcaatgtcgtgaagatcttgcgagtcctgcgagtactcaggcccctgagggccatcaacagggccaaggggctaaagcatgtggttcagtgtgtgtttgtcgccatccggaccatcgggaacatcgtgattgtcaccaccctgctgcagttcatgtttgcctgcatcggggtccagctcttcaagggaaagctgtacacctgttcagacagttccaagcagacagaggcggaatgcaagggcaactacatcacgtacaaagacggggaggttgaccaccccatcatccaaccccgcagctgggagaacagcaagtttgactttgacaatgttctggcagccatgatggccctcttcaccgtctccaccttcgaagggtggccagagctgctgtaccgctccatcgactcccacacggaagacaagggccccatctacaactaccgtgtggagatctccatcttcttcatcatctacatcatcatcatcgccttcttcatgatgaacatcttcgtgggcttcgtcatcgtcacctttcaggagcagggggagcaggagtacaagaactgtgagctggacaagaaccagcgacagtgcgtggaatacgccctcaaggcccggcccctgcggaggtacatccccaagaaccagcaccagtacaaagtgtggtacgtggtcaactccacctacttcgagtacctgatgttcgtcctcatcctgctcaacaccatctgcctggccatgcagcactacggccagagctgcctgttcaaaatcgccatgaacatcctcaacatgctcttcactggcctcttcaccgtggagatgatcctgaagctcattgccttcaaacccaagcactatttctgtgatgcatggaatacatttgacgccttgattgttgtgggtagcattgttgatatagcaatcaccgaggtaaacaacgcagaggaaaactcccgcatctccatcaccttcttccgcctgttccgggtcatgcgtctggtgaagctgctgagccgtggggagggcatccggacgctgctgtggaccttcatcaagtccttccaggccctgccctatgtggccctcctgatcgtgatgctgttcttcatctacgcggtgatcgggatgcaggtgtttgggaaaattgccctgaatgataccacagagatcaaccggaacaacaactttcagaccttcccccaggccgtgctgctcctcttcaggtgtgccaccggggaggcctggcaggacatcatgctggcctgcatgccaggcaagaagtgtgccccagagtccgagcccagcaacagcacggagggtgaaacaccctgtggtagcagctttgctgtcttctacttcatcagcttctacatgctctgtgccttcctgatcatcaacctctttgtagctgtcatcatggacaactttgactacctgacaagggactggtccatccttggtccccaccacctggatgagtttaaaagaatctgggcagagtatgaccctgaagccaagggtcgtatcaaacacctggatgtggtgaccctcctccggcggattcagccgccactaggttttgggaagctgtgccctcaccgcgtggcttgcaaacgcctggtctccatgaacatgcctctgaacagcgacgggacagtcatgttcaatgccaccctgtttgccctggtcaggacggccctgaggatcaaaacagaagggaacctagaacaagccaatgaggagctgcgggcgatcatcaagaagatctggaagcggaccagcatgaagctgctggaccaggtggtgccccctgcaggtgatgatgaggtcaccgttggcaagttctacgccacgttcctgatccaggagtacttccggaagttcaagaagcgcaaagagcagggccttgtgggcaagccctcccagaggaacgcgctgtctctgcaggctggcttgcgcacactgcatgacatcgggcctgagatccgacgggccatctctggagatctcaccgctgaggaggagctggacaaggccatgaaggaggctgtgtccgctgcttctgaagatgacatcttcaggagggccggtggcctgttcggcaaccacgtcagctactaccaaagcgacggccggagcgccttcccccagaccttcaccactcagcgcccgctgcacatcaacaaggcgggcagcagccagggcgacactgagtcgccatcccacgagaagctggtggactccaccttcaccccgagcagctactcgtccaccggctccaacgccaacatcaacaacgccaacaacaccgccctgggtcgcctccctcgccccgccggctaccccagcacggtcagcactgtggagggccacgggccccccttgtcccctgccatccgggtgcaggaggtggcgtggaagctcagctccaacaggatgcactgctgtgacatgctggatggtgggaccttccctcccgccctgggcccccgcagggctcctccctgtctgcatcagcagctccagggttccctggcggggctgagagaggacacaccctgcatcgtgcctggccacgcttcactgtgctgctcttccagagtaggagagtggctcccagcaggctgcacagccccccagcatgccaggtgccactcccgggagagccaggcagccatggcgggtcaggaggagacgtctcaggatgagacctatgaagtgaagatgaaccatgacacggaggcctgcagtgagcccagcctgctctccacagagatgctctcctaccaggatgacgaaaatcggcaactgacgctcccagaggaggacaagagggacatccggcaatctccgaagaggggtttcctccgctctgcctcactaggtcgaagggcctccttccacctggaatgtctgaagcgacagaaggaccgagggggagacatctctcagaagacagtcctgcccttgcatctggttcatcatcaggcattggcagtggcaggcctgagccccctcctccagagaagccattcccctgcctcattccctaggccttttgccaccccaccagccacacctggcagccgaggctggcccccacagcccgtccccaccctgcggcttgagggggtcgagtccagtgagaaactcaacagcagcttcccatccatccactgcggctcctgggctgagaccacccccggtggcgggggcagcagcgccgcccggagagtccggcccgtctccctcatggtgcccagccaggctggggccccagggaggcagttccacggcagtgccagcagcctggtggaagcggtcttgatttcagaaggactggggcagtttgctcaagatcccaagttcatcgaggtcaccacccaggagctggccgacgcctgcgacatgaccatagaggagatggagagcgcggccgacaacatcctcagcgggggcgccccacagagccccaatggcgccctcttaccctttgtgaactgcagggacgcggggcaggaccgagccgggggcgaggaggacgcgggctgtgtgcgcgcgcggggtgcaccgagtgaggaggagctccaggacagcagggtctacgtcagcagcctgtagtgggcgctgccagatgcgggcttttttttttttatttgtttcaatgttcctaatgggttcgtttcagaagtgcctcactgttctcgtgacctggagttaaccggaacagcgtcttcattcatttctgttgggaccagacgcggagcctgggtgcgcgagccgccctccgggaggaaggcgcccggctgcgtctgcagaggcggggagaggaggcggcgagggtcccggggcgcgaggaaggcgctgccctctcccagctcgcaggccccgggccggccgcgcctctgcgggagagcaccccggcttcccgcgcgccctcaccaaaaggaccctacagcaaacggggtctttcgactctgcttgtagaaaccatttgcacatattctgtacgagcctgctgtctccctagagccagggccctgcggatttggagaagggagcggggcaggacttccaggaggaccccaacccggcccggagagggaggaggaggcctccaggggcgcggagctctggggatgggcgtcgggccggcagtggtgcggctcactccgtccctgcccacctgcgacgggatcccccgaccggcacggccacgccgagctcccggccagccgccggcccgcaggcagcgcgagggaggagctgcgccgccgggccggggccgccggctccgcccaaccaggtggtgctgagcttccgctgagcgctcttttgttttgtggtttgacacttttcttgacagcatgttgcagtttcttttcggttttggttttttttaaatgttttattttgctttcccagcgggaggggaggaagaagagtgtttacaaagtcctgtagccccctcacctttctgttttcacttttgccaatgtacatcgggtttggttttcttgtattatttaaacggttgtggtttcctttttccacggaggttcaatagaagccgctgcaggagagttttaccaaccattgtgtatgcccaataatttgttatcatttccttaggtagtaacctatttttgttctggtttggttcggttatctaatggaaaggtaactggcaatgcacttgatgtggtcttgcacatgtgggtgatagagttgggttcctttttatgctgggtgtacaggtgggtttgggagagaggagcatgcgcgagagagtctccgagtgtgtgcgacgcgtgtgtgtgtggtgggttgtctgtgtgcatatgtcctgcccgtgtatatgcacccacaccatgtgcccgtgcacaccagtgactacgcagtcccccctttctggtttagctgtgggaagatctgaatctggggccgtttgaaagcaaaaacaaaccactgtctctgcttctgaaacgggaatcagtaactctttgcattttctgtcccacaagatatgcaaaaacaatgcaataatattcatttaaaaatacaattgtgagttgtgttggcattaaaactgtattttaaaaaaagacagaaatttaagggaaaaacacaagaaggcattttgcttcaatatattccgtgtaatgttttattgcattgataatgtttctgttgaagaaaccgttatacttgaattcaggtcagtttcagtatttttcaaatatttttttaaaactgaattgcaattgtgccaagcgaatataatgaattgaattaagttggttttcggattcacttcttgtatattttgctgcatgtaaagtaaatcattttgtatttggagtgtgacaagcttt

SEQ ID NO: 419836 - DNA, 7502 bp, Homo sapiens
cttttacaacagtgagtggaaaggactgaccttctaaattaacagcagcctaaatggaaagcctactttcttatgttgcttaattcacatctggggacctgatttaaacatgtcttgcgctgttgttgccatggttgctttgcccatcccatccctcatcctgtcacttttctctctgacttctttctctgcccacatgtctccctccctgctgctcccgtctcctgtcttcttctggccatttgagatgttccagcagaagatgacccttccccttgtgcgctggaaacgggccacgggcggcagtgccagaacggcacggtgtgcaagcccggctgggatggtcccaagcacggcatcaccaactttgacaactttgccttcgccatgctcacggtgttccagtgcatcaccatggagggctggacggacgtgctgtactggatgcaggacgctatgggctatgagttaccctgggtgtattttgtcagtctggtcatctttggatcctttttcgttctaaatctggttctcggtgtgttgagcggagagttttccaaagagagggagaaggccaaggcccggggagatttccagaagctgcgggagaagcagcagctagaagaggatctcaaaggctacctggattggatcactcaggccgaagacatcgatcctgagaatgaggacgaaggcatggatgaggagaagccccgaaacatgagcatgcccaccagtgagaccgagtccgtcaacaccgaaaacgtggctggaggtgacatcgagggagaaaactgcggggccaggctggcccaccggatctccaagtcaaagttcagccgctactggcgccggtggaatcggttctgcagaaggaagtgccgcgccgcagtcaagtctaatgtcttctactggctggtgattttcctggtgttcctcaacacgctcaccattgcctctgagcactacaaccagcccaactggctcacagaagtccaagacacggcaaacaaggccctgctggccctgttcacggcagagatgctcctgaagatgtacagcctgggcctgcaggcctacttcgtgtccctcttcaaccgctttgactgcttcgtcgtgtgtggcggcatcctggagaccatcctggtggagaccaagatcatgtccccactgggcatctccgtgctcagatgcgtccggctgctgaggattttcaagatcacgaggtactggaactccttgagcaacctggtggcatccttgctgaactctgtgcgctccatcgcctccctgctccttctcctcttcctcttcatcatcatcttctccctcctggggatgcagctctttggaggaaagttcaactttgatgagatgcagacccggaggagcacattcgataacttcccccagtccctcctcactgtgtttcagatcctgaccggggaggactggaattcggtgatgtatgatgggatcatggcttatggcggcccctcttttccagggatgttagtctgtatttacttcatcatcctcttcatctgtggaaactatatcctactgaatgtgttcttggccattgctgtggacaacctggctgatgctgagagcctcacatctgcccaaaaggaggaggaagaggagaaggagagaaagaagctggccaggactgccagcccagagaagaaacaagagttggtggagaagccggcagtgggggaatccaaggaggagaagattgagctgaaatccatcacggctgacggagagtctccacccgccaccaagatcaacatggatgacctccagcccaatgaaaatgaggataagagcccctaccccaacccagaaactacaggagaagaggatgaggaggagccagagatgcctgtcggccctcgcccacgaccactctctgagcttcaccttaaggaaaaggcagtgcccatgccagaagccagcgcgtttttcatcttcagctctaacaacaggtttcgcctccagtgccaccgcattgtcaatgacacgatcttcaccaacctgatcctcttcttcattctgctcagcagcatttccctggctgctgaggacccggtccagcacacctccttcaggaaccatattctgttttattttgatattgtttttaccaccattttcaccattgaaattgctctgaagatgactgcttatggggctttcttgcacaagggttctttctgccggaactacttcaacatcctggacctgctggtggtcagcgtgtccctcatctcctttggcatccagtccagtgcaatcaatgtcgtgaagatcttgcgagtcctgcgagtactcaggcccctgagggccatcaacagggccaaggggctaaagcatgtggttcagtgtgtgtttgtcgccatccggaccatcgggaacatcgtgattgtcaccaccctgctgcagttcatgtttgcctgcatcggggtccagctcttcaagggaaagctgtacacctgttcagacagttccaagcagacagaggcggaatgcaagggcaactacatcacgtacaaagacggggaggttgaccaccccatcatccaaccccgcagctgggagaacagcaagtttgactttgacaatgttctggcagccatgatggccctcttcaccgtctccaccttcgaagggtggccagagctgctgtaccgctccatcgactcccacacggaagacaagggccccatctacaactaccgtgtggagatctccatcttcttcatcatctacatcatcatcatcgccttcttcatgatgaacatcttcgtgggcttcgtcatcgtcacctttcaggagcagggggagcaggagtacaagaactgtgagctggacaagaaccagcgacagtgcgtggaatacgccctcaaggcccggcccctgcggaggtacatccccaagaaccagcaccagtacaaagtgtggtacgtggtcaactccacctacttcgagtacctgatgttcgtcctcatcctgctcaacaccatctgcctggccatgcagcactacggccagagctgcctgttcaaaatcgccatgaacatcctcaacatgctcttcactggcctcttcaccgtggagatgatcctgaagctcattgccttcaaacccaagggttactttagtgatccctggaatgtttttgacttcctcatcgtaattggcagcataattgacgtcattctcagtgagactaatccagctgaacatacccaatgctctccctctatgaacgcagaggaaaactcccgcatctccatcaccttcttccgcctgttccgggtcatgcgtctggtgaagctgctgagccgtggggagggcatccggacgctgctgtggaccttcatcaagtccttccaggccctgccctatgtggccctcctgatcgtgatgctgttcttcatctacgcggtgatcgggatgcaggtgtttgggaaaattgccctgaatgataccacagagatcaaccggaacaacaactttcagaccttcccccaggccgtgctgctcctcttcaggtgtgccaccggggaggcctggcaggacatcatgctggcctgcatgccaggcaagaagtgtgccccagagtccgagcccagcaacagcacggagggtgaaacaccctgtggtagcagctttgctgtcttctacttcatcagcttctacatgctctgtgccttcctgatcatcaacctctttgtagctgtcatcatggacaactttgactacctgacaagggactggtccatccttggtccccaccacctggatgagtttaaaagaatctgggcagagtatgaccctgaagccaagggtcgtatcaaacacctggatgtggtgaccctcctccggcggattcagccgccactaggttttgggaagctgtgccctcaccgcgtggcttgcaaacgcctggtctccatgaacatgcctctgaacagcgacgggacagtcatgttcaatgccaccctgtttgccctggtcaggacggccctgaggatcaaaacagaagggaacctagaacaagccaatgaggagctgcgggcgatcatcaagaagatctggaagcggaccagcatgaagctgctggaccaggtggtgccccctgcaggtgatgatgaggtcaccgttggcaagttctacgccacgttcctgatccaggagtacttccggaagttcaagaagcgcaaagagcagggccttgtgggcaagccctcccagaggaacgcgctgtctctgcaggctggcttgcgcacactgcatgacatcgggcctgagatccgacgggccatctctggagatctcaccgctgaggaggagctggacaaggccatgaaggaggctgtgtccgctgcttctgaagatgacatcttcaggagggccggtggcctgttcggcaaccacgtcagctactaccaaagcgacggccggagcgccttcccccagaccttcaccactcagcgcccgctgcacatcaacaaggcgggcagcagccagggcgacactgagtcgccatcccacgagaagctggtggactccaccttcaccccgagcagctactcgtccaccggctccaacgccaacatcaacaacgccaacaacaccgccctgggtcgcctccctcgccccgccggctaccccagcacggtcagcactgtggagggccacgggccccccttgtcccctgccatccgggtgcaggaggtggcgtggaagctcagctccaacaggtgccactcccgggagagccaggcagccatggcgggtcaggaggagacgtctcaggatgagacctatgaagtgaagatgaaccatgacacggaggcctgcagtgagcccagcctgctctccacagagatgctctcctaccaggatgacgaaaatcggcaactgacgctcccagaggaggacaagagggacatccggcaatctccgaagaggggtttcctccgctctgcctcactaggtcgaagggcctccttccacctggaatgtctgaagcgacagaaggaccgagggggagacatctctcagaagacagtcctgcccttgcatctggttcatcatcaggcattggcagtggcaggcctgagccccctcctccagagaagccattcccctgcctcattccctaggccttttgccaccccaccagccacacctggcagccgaggctggcccccacagcccgtccccaccctgcggcttgagggggtcgagtccagtgagaaactcaacagcagcttcccatccatccactgcggctcctgggctgagaccacccccggtggcgggggcagcagcgccgcccggagagtccggcccgtctccctcatggtgcccagccaggctggggccccagggaggcagttccacggcagtgccagcagcctggtggaagcggtcttgatttcagaaggactggggcagtttgctcaagatcccaagttcatcgaggtcaccacccaggagctggccgacgcctgcgacatgaccatagaggagatggagagcgcggccgacaacatcctcagcgggggcgccccacagagccccaatggcgccctcttaccctttgtgaactgcagggacgcggggcaggaccgagccgggggcgaggaggacgcgggctgtgtgcgcgcgcggggtgcaccgagtgaggaggagctccaggacagcagggtctacgtcagcagcctgtagtgggcgctgccagatgcgggcttttttttttttatttgtttcaatgttcctaatgggttcgtttcagaagtgcctcactgttctcgtgacctggagttaaccggaacagcgtcttcattcatttctgttgggaccagacgcggagcctgggtgcgcgagccgccctccgggaggaaggcgcccggctgcgtctgcagaggcggggagaggaggcggcgagggtcccggggcgcgaggaaggcgctgccctctcccagctcgcaggccccgggccggccgcgcctctgcgggagagcaccccggcttcccgcgcgccctcaccaaaaggaccctacagcaaacggggtctttcgactctgcttgtagaaaccatttgcacatattctgtacgagcctgctgtctccctagagccagggccctgcggatttggagaagggagcggggcaggacttccaggaggaccccaacccggcccggagagggaggaggaggcctccaggggcgcggagctctggggatgggcgtcgggccggcagtggtgcggctcactccgtccctgcccacctgcgacgggatcccccgaccggcacggccacgccgagctcccggccagccgccggcccgcaggcagcgcgagggaggagctgcgccgccgggccggggccgccggctccgcccaaccaggtggtgctgagcttccgctgagcgctcttttgttttgtggtttgacacttttcttgacagcatgttgcagtttcttttcggttttggttttttttaaatgttttattttgctttcccagcgggaggggaggaagaagagtgtttacaaagtcctgtagccccctcacctttctgttttcacttttgccaatgtacatcgggtttggttttcttgtattatttaaacggttgtggtttcctttttccacggaggttcaatagaagccgctgcaggagagttttaccaaccattgtgtatgcccaataatttgttatcatttccttaggtagtaacctatttttgttctggtttggttcggttatctaatggaaaggtaactggcaatgcacttgatgtggtcttgcacatgtgggtgatagagttgggttcctttttatgctgggtgtacaggtgggtttgggagagaggagcatgcgcgagagagtctccgagtgtgtgcgacgcgtgtgtgtgtggtgggttgtctgtgtgcatatgtcctgcccgtgtatatgcacccacaccatgtgcccgtgcacaccagtgactacgcagtcccccctttctggtttagctgtgggaagatctgaatctggggccgtttgaaagcaaaaacaaaccactgtctctgcttctgaaacgggaatcagtaactctttgcattttctgtcccacaagatatgcaaaaacaatgcaataatattcatttaaaaatacaattgtgagttgtgttggcattaaaactgtattttaaaaaaagacagaaatttaagggaaaaacacaagaaggcattttgcttcaatatattccgtgtaatgttttattgcattgataatgtttctgttgaagaaaccgttatacttgaattcaggtcagtttcagtatttttcaaatatttttttaaaactgaattgcaattgtgccaagcgaatataatgaattgaattaagttggttttcggattcacttcttgtatattttgctgcatgtaaagtaaatcattttgtatttggagtgtgacaagcttt

SEQ ID NO: 419837 - DNA, 6199 bp, Homo sapiens
cttttacaacagtgagtggaaaggactgaccttctaaattaacagcagcctaaatggaaagcctactttcttatgttgcttaattcacatctggggacctgatttaaacatgtcttgcgctgttgttgccatggttgctttgcccatcccatccctcatcctgtcacttttctctctgacttctttctctgcccacatgtctccctccctgctgctcccgtctcctgtcttcttctggccatttgagatgttccagcagaagatgacccttccccttgtgcgctggaaacgggccacgggcggcagtgccagaacggcacggtgtgcaagcccggctgggatggtcccaagcacggcatcaccaactttgacaactttgccttcgccatgctcacggtgttccagtgcatcaccatggagggctggacggacgtgctgtactggatgcaggacgctatgggctatgagttaccctgggtgtattttgtcagtctggtcatctttggatcctttttcgttctaaatctggttctcggtgtgttgagcggagagttttccaaagagagggagaaggccaaggcccggggagatttccagaagctgcgggagaagcagcagctagaagaggatctcaaaggctacctggattggatcactcaggccgaagacatcgatcctgagaatgaggacgaaggcatggatgaggagaagccccgaaacatgagcatgcccaccagtgagaccgagtccgtcaacaccgaaaacgtggctggaggtgacatcgagggagaaaactgcggggccaggctggcccaccggatctccaagtcaaagttcagccgctactggcgccggtggaatcggttctgcagaaggaagtgccgcgccgcagtcaagtctaatgtcttctactggctggtgattttcctggtgttcctcaacacgctcaccattgcctctgagcactacaaccagcccaactggctcacagaagtccaagacacggcaaacaaggccctgctggccctgttcacggcagagatgctcctgaagatgtacagcctgggcctgcaggcctacttcgtgtccctcttcaaccgctttgactgcttcgtcgtgtgtggcggcatcctggagaccatcctggtggagaccaagatcatgtccccactgggcatctccgtgctcagatgcgtccggctgctgaggattttcaagatcacgaggtactggaactccttgagcaacctggtggcatccttgctgaactctgtgcgctccatcgcctccctgctccttctcctcttcctcttcatcatcatcttctccctcctggggatgcagctctttggaggaaagttcaactttgatgagatgcagacccggaggagcacattcgataacttcccccagtccctcctcactgtgtttcagatcctgaccggggaggactggaattcggtgatgtatgatgggatcatggcttatggcggcccctcttttccagggatgttagtctgtatttacttcatcatcctcttcatctgtggaaactatatcctactgaatgtgttcttggccattgctgtggacaacctggctgatgctgagagcctcacatctgcccaaaaggaggaggaagaggagaaggagagaaagaagctggccaggactgccagcccagagaagaaacaagagttggtggagaagccggcagtgggggaatccaaggaggagaagattgagctgaaatccatcacggctgacggagagtctccacccgccaccaagatcaacatggatgacctccagcccaatgaaaatgaggataagagcccctaccccaacccagaaactacaggagaagaggatgaggaggagccagagatgcctgtcggccctcgcccacgaccactctctgagcttcaccttaaggaaaaggcagtgcccatgccagaagccagcgcgtttttcatcttcagctctaacaacaggtttcgcctccagtgccaccgcattgtcaatgacacgatcttcaccaacctgatcctcttcttcattctgctcagcagcatttccctggctgctgaggacccggtccagcacacctccttcaggaaccatattctgttttattttgatattgtttttaccaccattttcaccattgaaattgctctgaagatgactgcttatggggctttcttgcacaagggttctttctgccggaactacttcaacatcctggacctgctggtggtcagcgtgtccctcatctcctttggcatccagtccagtgcaatcaatgtcgtgaagatcttgcgagtcctgcgagtactcaggcccctgagggccatcaacagggccaaggggctaaagcatgtggttcagtgtgtgtttgtcgccatccggaccatcgggaacatcgtgattgtcaccaccctgctgcagttcatgtttgcctgcatcggggtccagctcttcaagggaaagctgtacacctgttcagacagttccaagcagacagaggcggaatgcaagggcaactacatcacgtacaaagacggggaggttgaccaccccatcatccaaccccgcagctgggagaacagcaagtttgactttgacaatgttctggcagccatgatggccctcttcaccgtctccaccttcgaagggtggccagagctgctgtaccgctccatcgactcccacacggaagacaagggccccatctacaactaccgtgtggagatctccatcttcttcatcatctacatcatcatcatcgccttcttcatgatgaacatcttcgtgggcttcgtcatcgtcacctttcaggagcagggggagcaggagtacaagaactgtgagctggacaagaaccagcgacagtgcgtggaatacgccctcaaggcccggcccctgcggaggtacatccccaagaaccagcaccagtacaaagtgtggtacgtggtcaactccacctacttcgagtacctgatgttcgtcctcatcctgctcaacaccatctgcctggccatgcagcactacggccagagctgcctgttcaaaatcgccatgaacatcctcaacatgctcttcactggcctcttcaccgtggagatgatcctgaagctcattgccttcaaacccaagggttactttagtgatccctggaatgtttttgacttcctcatcgtaattggcagcataattgacgtcattctcagtgagactaatccagctgaacatacccaatgctctccctctatgaacgcagaggaaaactcccgcatctccatcaccttcttccgcctgttccgggtcatgcgtctggtgaagctgctgagccgtggggagggcatccggacgctgctgtggaccttcatcaagtccttccaggccctgccctatgtggccctcctgatcgtgatgctgttcttcatctacgcggtgatcgggatgcaggtgtttgggaaaattgccctgaatgataccacagagatcaaccggaacaacaactttcagaccttcccccaggccgtgctgctcctcttcaggtgtgccaccggggaggcctggcaggacatcatgctggcctgcatgccaggcaagaagtgtgccccagagtccgagcccagcaacagcacggagggtgaaacaccctgtggtagcagctttgctgtcttctacttcatcagcttctacatgctctgtgccttcctgatcatcaacctctttgtagctgtcatcatggacaactttgactacctgacaagggactggtccatccttggtccccaccacctggatgagtttaaaagaatctgggcagagtatgaccctgaagccaagggtcgtatcaaacacctggatgtggtgaccctcctccggcggattcagccgccactaggttttgggaagctgtgccctcaccgcgtggcttgcaaacgcctggtctccatgaacatgcctctgaacagcgacgggacagtcatgttcaatgccaccctgtttgccctggtcaggacggccctgaggatcaaaacagaagggaacctagaacaagccaatgaggagctgcgggcgatcatcaagaagatctggaagcggaccagcatgaagctgctggaccaggtggtgccccctgcaggtgatgatgaggtcaccgttggcaagttctacgccacgttcctgatccaggagtacttccggaagttcaagaagcgcaaagagcagggccttgtgggcaagccctcccagaggaacgcgctgtctctgcaggctggcttgcgcacactgcatgacatcgggcctgagatccgacgggccatctctggagatctcaccgctgaggaggagctggacaaggccatgaaggaggctgtgtccgctgcttctgaagatgacatcttcaggagggccggtggcctgttcggcaaccacgtcagctactaccaaagcgacggccggagcgccttcccccagaccttcaccactcagcgcccgctgcacatcaacaaggcgggcagcagccagggcgacactgagtcgccatcccacgagaagctggtggactccaccttcaccccgagcagctactcgtccaccggctccaacgccaacatcaacaacgccaacaacaccgccctgggtcgcctccctcgccccgccggctaccccagcacggtcagcactgtggagggccacgggccccccttgtcccctgccatccgggtgcaggaggtggcgtggaagctcagctccaacaggtgccactcccgggagagccaggcagccatggcgggtcaggaggagacgtctcaggatgagacctatgaagtgaagatgaaccatgacacggaggcctgcagtgagcccagcctgctctccacagagatgctctcctaccaggatgacgaaaatcggcaactgacgctcccagaggaggacaagagggacatccggcaatctccgaagaggggtttcctccgctctgcctcactaggtcgaagggcctccttccacctggaatgtctgaagcgacagaaggaccgagggggagacatctctcagaagacagtcctgcccttgcatctggttcatcatcaggcattggcagtggcaggcctgagccccctcctccagagaagccattcccctgcctcattccctaggccttttgccaccccaccagccacacctggcagccgaggctggcccccacagcccgtccccaccctgcggcttgagggggtcgagtccagtgagaaactcaacagcagcttcccatccatccactgcggctcctgggctgagaccacccccggtggcgggggcagcagcgccgcccggagagtccggcccgtctccctcatggtgcccagccaggctggggccccagggaggcagttccacggcagtgccagcagcctggtggaagcggtaggtgactcgcagatgggcaggggggagaggccacgggcaacaaggggacttggcatgcggggctgagaagggagcacctggctcttgccaaattcattgcagtcaatatctgagcccgaaagaccctccctctcagggctgcaggagggctcgtgtgcggaaagccatgactgcacaagatgctatgggctctcttgaggctaggcccactgcagagggcggcagaaaccactgagcaacttatcccttatactgcagctgctcgacatgcaaatgtgagcctggctgcctttatacacagacaggcaagatccaaggtgctcaggcctgactgcccgtgagcatcacctggggagctttggaaacccgggacagattaactgatgattgttaaagctcttcgatgattttaacgtgtagcaaggttgagagccactagcctagaacaagcgagctttcagtcccactgtgctctgcctggtcagagcatctagtgcaatcccggcaccacattattagggacctttgacacactggaacaaacccaacagaggatgaccaggatggcaaggttcctagaaaccatttcctaggagaaccatttcagggaattcgggaagaaaacctggagaggaggtgactttggagggtgcgatacacctctcacacctgcaacgggtgggatggggaaagggtggcaggctcagcccaccagcggacagatttcagctcacatggggaagacctt

SEQ ID NO: 419838 - DNA, 735 bp, Homo sapiens
cttttacaacagtgagtggaaaggactgaccttctaaattaacagcagcctaaatggaaagcctactttcttatgttgcttaattcacatctggggacctgatttaaacatgtcttgcgctgttgttgccatggttgctttgcccatcccatccctcatcctgtcacttttctctctgacttctttctctgcccacatgtctccctccctgctgctcccgtctcctgtcttcttctggccatttgagatgttccagcagaagatgacccttccccttgtgcgctggaaacgggccacgggcggcagtgccagaacggcacggtgtgcaagcccggctgggatggtcccaagcacggcatcaccaactttgacaactttgccttcgccatgctcacggtgttccagtgcatcaccatggagggctggacggacgtgctgtactgggtcaatgatgccgtaggaagggactggccctggatctattttgttacactaatcatcatagggtcattttttgtacttaacttggttctcggtgtgcttagcgggtaagcaggaccaaggaaaaaggtcttgatttttccatttatttttatttattctttctgctattcctggctgtattctttttctggctctgatgaacctgggataaggggtcaccacaggagccttgaagtggatgtccttgtcctggctgggtaaagggtcagatgtgccactggtcttggtggt

SEQ ID NO: 419839 - DNA, 2062 bp, Homo sapiens
gtggtttctgcagtgtcgtgaacttggctaaactgaactgtgttcccagaattcccttccttgtttgtttctctggtgagggttggccacgagagagatttgcatgaggtttggaagtggaagtagagcaacagccatgcgtattcactggaagtggatgtaggtcaggccctgttccatcacgtgcacgttaccatggatctcctgcacttgtggtgtgggcagccgctgggcccacggctcctcccactcccgcagaactctgcctttggcttttccagaccctgggccgggtatgagaaccagcttcttggtctgcagccacaaggatgaaggtttggggatgagagaccagcacgggctctgatgagagacaggtgcaggtcccagcttgtggcttgcaggtctcagtcgtacttgctctccctcaccatcctttccaaccgcctggcctgtggtctggtgaagaagaaacagccgaaccgagactttcaccagcccctctaattgctcaaaccgctttcacaatcctctctttctacatcattcctagtggttcttttctgatggaacctctgactggtaacatggcattaccagtcctttccctctcatgttttgctatttcctgatggaacctgggagtctgagtgatttgtatttcaagaagcagttatgctggatctctttgttggttaataccccatgacctatctggccgttatgggatatttcagggataggagttgtgaaagagcccttggctggacgtttctagccttaatctttggcaagccatttcatttccctgagcctcagtttccgccttcctacagcgtgagcaggtctgggtgggctctcaagcccctttcagctctaagattccaagtctgtgattccgatacatcttgactacaatgagcgtgtttaccttttgtctctgagcagtggccctgggtcttggtagtgactaaattccgagctcccaaggtgcagctgcttttcttccttttaattataaattagctgttcattggctgcttctttctagagcctgttttgcttatcttgcaatctgttcatttctgttgatgaacacagtcaaataggcctctatgtgcagtctcctggtttccctggtcaaagtggaaggttggtagaaactggccttcatgtctttgtttccctcaaagttttattcttagtaacgctatatatggttttatagaccacacatatatagtttcctgtgtcttagatgataacatccttaaaatatgaaatatattttgaacctagatacctacccagtattctctgccacagagtaaacatttcattaaatgagtttcaaggactccataccctgatataggagtacattcaagaaatgagtttaggccgggcgcggtggctcacacctgtaatcccagcacttgggaggccgagacgagtggatcacctgaggtcaggagttccagaccagcctgaccaacatggtgaaaccccatctctactaaaaaaaatacagaaattacccgggcatggtggctggtgcctgtaatccccgctacttgggaggccaaggtgggagaatcgcttgaacctgggaggcggaggttgcagtgagccaagttcgtgccattgcactctggcctgggtaacaagagtgaaactccgtttagaaatgagtttagtctgggagaatctgctttttgagtaaaaaagtttgattttatgtatgtgtgcgtctgtatatatgtttctgtatcctgagtatttctttgcggcttcttcagttatgaaagaggttggtactgttacccttacgttataggtattacaaactcggttttacaaggttacataaactaatggccctggggcgaatgacgtatgccacttttgtgttgatttgtagaacttacttagctttggcatttcccctagtaattcccaaggcaaaaccaggaattgtcagagacgtgaccagacatgtattaaaattctagtgcaattgggaaacttggtcttcctgatttgtttatacttcagccaaacc

SEQ ID NO: 419840 - DNA, 1521 bp, Homo sapiens
taacgggatccggcgcccacggcgccgccggcgccggggctccgagtggtcactggggactcgacggacaggcgtaccagtcggcccctcagtggctagccggatggagccgggagtcggagtgatgatgcagagcagcatgctggatcctcgtggtctaccccatgacctatctggccgttatgggatatttcagggataggagttgtgaaagagcccttggctggacgtttctagccttaatctttggcaagccatttcatttccctgagcctcagtttccgccttcctacagcgtgagcaggtctgggtgggctctcaagcccctttcagctctaagattccaagtctgtgattccgatacatcttgactacaatgagcgtgtttaccttttgtctctgagcagtggccctgggtcttggtagtgactaaattccgagctcccaaggtgcagctgcttttcttccttttaattataaattagctgttcattggctgcttctttctagagcctgttttgcttatcttgcaatctgttcatttctgttgatgaacacagtcaaataggcctctatgtgcagtctcctggtttccctggtcaaagtggaaggttggtagaaactggccttcatgtctttgtttccctcaaagttttattcttagtaacgctatatatggttttatagaccacacatatatagtttcctgtgtcttagatgataacatccttaaaatatgaaatatattttgaacctagatacctacccagtattctctgccacagagtaaacatttcattaaatgagtttcaaggactccataccctgatataggagtacattcaagaaatgagtttaggccgggcgcggtggctcacacctgtaatcccagcacttgggaggccgagacgagtggatcacctgaggtcaggagttccagaccagcctgaccaacatggtgaaaccccatctctactaaaaaaaatacagaaattacccgggcatggtggctggtgcctgtaatccccgctacttgggaggccaaggtgggagaatcgcttgaacctgggaggcggaggttgcagtgagccaagttcgtgccattgcactctggcctgggtaacaagagtgaaactccgtttagaaatgagtttagtctgggagaatctgctttttgagtaaaaaagtttgattttatgtatgtgtgcgtctgtatatatgtttctgtatcctgagtatttctttgcggcttcttcagttatgaaagaggttggtactgttacccttacgttataggtattacaaactcggttttacaaggttacataaactaatggccctggggcgaatgacgtatgccacttttgtgttgatttgtagaacttacttagctttggcatttcccctagtaattcccaaggcaaaaccaggaattgtcagagacgtgaccagacatgtattaaaattctagtgcaattgggaaacttggtcttcctgatttgtttatacttcagccaaacc

SEQ ID NO: 419841 - DNA, 1020 bp, Homo sapiens
ctcagcctcccaaagtgctgggattataggcgtgcccattgtgcctggccaagccaccacgcctggcctcggatggattttagatgcctgatgtaggtaaagggcacggagacttcaggaagtcctgaaggcttctctacaggtcctctttagctagtccatatctaccatctacttcacctcccaataccagtcccctctgggaatacacagctcttgtagcaatgttacctgctaaggcccctgttcctttcccgtcatcaggagaactcactttctgtacctgagctatgtatggggtcctgtcctaccaagagcctattatagttcatcatgacacaaacggtgggcaacaaagaagttaaaaacatttctcaagagggaggaaacacaggggcagtcctggggcagaagggaaccaagcggagaaggcatgtttcctagggagagtcctctctgatagtctattaactagtgttatcccaaatacaagccagagaccgtaacgattctgtgtcctagtgatccaagagacaggaatctttcccccgggtccagatgaatgaacactgaagtgtcaccccactcaggactccccacccccttcctcactgaccagctacctgtgtcctgacacatactggtttaaaaagctttcccgaatagcctcacctgggcaaaggatcaaggccagcagggcccagacaccaaacagaagcgttttcatcctgataagaagggccaaaggctggagagaaaaagacagcaatgctggagaaagtgaccaaaaatatatatataaggaaaattgcttatttgatattaaaactcagtccctttttctgaaacctcactagtctagaaaaattacagcaaaaacatcagcagtgaaggtgtactaaaagaatgtcttatatctatttatttcagtttagcttatgtgcatagcaaaaacatgggggaaaatatgaaaaaggatgaggcgatattatcaagattcctgtactaagttgtattcta

SEQ ID NO: 419842 - DNA, 1021 bp, Homo sapiens
gggagccagcaggcccctcgctcaaccccacgctggcagccaccgcggccctcatccccctgcaccgacgcgccggagacatccgcccaggcccgcttccgggaggaagtgacgctcccagccagcttccggtccaggagactcggccccgcctctgcgccgggcagcttaaagggaccacgacccccaggaggattgaaggagaccggtggggacggggcggggcgcagccttgcgaagccctaacgcagcgctggggaggggggcggccgaaaggggggcggtggtcgggccgcgcaagcggagatggaatggggcccgggctcagactggtcacggggggaggctgccggcgtggaccgcgggaaggcggggctggggctcggcgggaggccacccccacagccgccccgggaggagcgcgcccagcagctgctggacgcggtggagcagcggcagcggcagctcctggacaccatcgcagcctgcgaggagatgttacggcagctgggccgccggcgcccggagccggctggtggcgggaacgtctcagccaaacctggagcgcccccccagccggctgtctccgccagaggcggctttccaaaggatgctggcgatggagctgcggagccctgaccatccccgagcagaataccctgacttctctccctccccagggccggtggctggactctgaacaactcccttcagtaaaggggccagtcttcactggcagtggctggtacttggctctcagcctggagtggcagctctgctagcagctgggttcactcccacttcatcctggctgaaagcagtgctgtgctttgaaatgcagccaatgaatacccagtctgattacccagatttgggcagaccagcagtgctcgccagagtggtctggcctgctatgggggatccaggtggtgttacatgtccatttcatgttttgggggcttttagccccacaaaacaccttcagtagagccttgattaaaaggaaacctgcagactctcc

SEQ ID NO: 419843 - DNA, 890 bp, Homo sapiens
gggagccagcaggcccctcgctcaaccccacgctggcagccaccgcggccctcatccccctgcaccgacgcgccggagacatccgcccaggcccgcttccgggaggaagtgacgctcccagccagcttccggtccaggagactcggccccgcctctgcgccgggcagcttaaagggaccacgacccccaggaggattgaaggagaccgggggaggctgccggcgtggaccgcgggaaggcggggctggggctcggcgggaggccacccccacagccgccccgggaggagcgcgcccagcagctgctggacgcggtggagcagcggcagcggcagctcctggacaccatcgcagcctgcgaggagatgttacggcagctgggccgccggcgcccggagccggctggtggcgggaacgtctcagccaaacctggagcgcccccccagccggctgtctccgccagaggcggctttccaaaggatgctggcgatggagctgcggagccctgaccatccccgagcagaataccctgacttctctccctccccagggccggtggctggactctgaacaactcccttcagtaaaggggccagtcttcactggcagtggctggtacttggctctcagcctggagtggcagctctgctagcagctgggttcactcccacttcatcctggctgaaagcagtgctgtgctttgaaatgcagccaatgaatacccagtctgattacccagatttgggcagaccagcagtgctcgccagagtggtctggcctgctatgggggatccaggtggtgttacatgtccatttcatgttttgggggcttttagccccacaaaacaccttcagtagagccttgattaaaaggaaacctgcagactctcc

SEQ ID NO: 419844 - DNA, 379 bp, Homo sapiens
ctgaggtactctacaggatcttatgctgctccctcttcagccggtggctggactctgaacaactcccttcagtaaaggggccagtcttcactggcagtggctggtacttggctctcagcctggagtggcagctctgctagcagctgggttcactcccacttcatcctggctgaaagcagtgctgtgctttgaaatgcagccaatgaatacccagtctgattacccagatttgggcagaccagcagtgctcgccagagtggtctggcctgctatgggggatccaggtggtgttacatgtccatttcatgttttgggggcttttagccccacaaaacaccttcagtagagccttgattaaaaggaaacctgcagactctcc

SEQ ID NO: 419845 - DNA, 1112 bp, Homo sapiens
gggagccagcaggcccctcgctcaaccccacgctggcagccaccgcggccctcatccccctgcaccgacgcgccggagacatccgcccaggcccgcttccgggaggaagtgacgctcccagccagcttccggtccaggagactcggccccgcctctgcgccgggcagcttaaagggaccacgacccccaggaggattgaaggagaccggtggggacggggcggggcgcagccttgcgaagccctaacgcagcgctggggaggggggcggccgaaaggggggcggtggtcgggccgcgcaagcggagatggaatggggcccgggctcagactggtcacgggggtgagagggggcccgtcggggcgggaggaaggggcttggccccgcgcaagcgccggccctgaccgtctgtctctcgctctctcccgggcagggaggctgccggcgtggaccgcgggaaggcggggctggggctcggcgggaggccacccccacagccgccccgggaggagcgcgcccagcagctgctggacgcggtggagcagcggcagcggcagctcctggacaccatcgcagcctgcgaggagatgttacggcagctgggccgccggcgcccggagccggctggtggcgggaacgtctcagccaaacctggagcgcccccccagccggctgtctccgccagaggcggctttccaaaggatgctggcgatggagctgcggagccctgaccatccccgagcagaataccctgacttctctccctccccagggccggtggctggactctgaacaactcccttcagtaaaggggccagtcttcactggcagtggctggtacttggctctcagcctggagtggcagctctgctagcagctgggttcactcccacttcatcctggctgaaagcagtgctgtgctttgaaatgcagccaatgaatacccagtctgattacccagatttgggcagaccagcagtgctcgccagagtggtctggcctgctatgggggatccaggtggtgttacatgtccatttcatgttttgggggcttttagccccacaaaacaccttcagtagagccttgattaaaaggaaacctgcagactctcc

SEQ ID NO: 419846 - DNA, 1412 bp, Homo sapiens
gggagccagcaggcccctcgctcaaccccacgctggcagccaccgcggccctcatccccctgcaccgacgcgccggagacatccgcccaggcccgcttccgggaggaagtgacgctcccagccagcttccggtccaggagactcggccccgcctctgcgccgggcagcttaaagggaccacgacccccaggaggattgaaggagaccggtggggacggggcggggcgcagccttgcgaagccctaacgcagcgctggggaggggggcggccgaaaggggggcggtggtcgggccgcgcaagcggagatggaatggggcccgggctcagactggtcacgggggtgagagggggcccgtcggggcgggaggaaggggcttggccccgcgcaagcgccggccctgaccgtctgtctctcgctctctcccgggcagggaggctgccggcgtggaccgcgggaaggcggggctggggctcggcgggaggccacccccacagccgccccgggaggagcgcgcccagcagctgctggacgcggtggagcagcggcagcggcagctcctggacaccatcgcagcctgcgaggagatgttacggcagctgggccgccggcgcccggagccggctggtggcgggaacgtctcagccaaacctggagcgcccccccagccggctgtctccgccagaggcggctttccaaaggatgctggcgatggagctgcggagccctgaccatccccgagcagaataccctgacttctctccctccccagggccggtggctggactctgaacaactcccttcagtaaaggggccagtcttcactggcagtggctggtacttggctctcagcctggagtggcagctctgctagcagctgggttcactcccacttcatcctggctgaaagcagtgctgtgctttgaaatgcagccaatgaatacccagtctgattacccagatttgggcagaccagcagtgctcgccagagtggtctggcctgctatgggggatccaggtggtgttacatgtccatttcatgttttgggggcttttagccccacaaaacaccttcagtagagccttgattaaaaggaaacctgcagactctccataactaatttgtgtagtataatataataatgagtatgtgagcaaaagaagtgagcaagaagctgaggaatgagtgagggaggcgagtggagaaagaacaatgagagcgggcaagatgcgagatagagaggagtatgaaagaggcaactcgtgcgacccgaacgcccacgcgcaggaagaagagagggcgtaagaagacgacaggagagtcgagccacacagagccagacgacagagcgagcggagcgcggcgcatcccacgtgggaacacgtacgcaaatagatgtaccacacaaccgc

SEQ ID NO: 419847 - DNA, 1102 bp, Homo sapiens
gggagccagcaggcccctcgctcaaccccacgctggcagccaccgcggccctcatccccctgcaccgacgcgccggagacatccgcccaggcccgcttccgggaggaagtgacgctcccagccagcttccggtccaggagactcggccccgcctctgcgccgggcagcttaaagggaccacgacccccaggaggattgaaggagaccggtggggacggggcggggcgcagccttgcgaagccctaacgcagcgctggggaggggggcggccgaaaggggggcggtggtcgggccgcgcaagcggagatggaatggggcccgggctcagactggtcacggggggaggctgccggcgtggaccgcgggaaggcggggctggggctcggcgggaggccacccccacagccgccccgggaggagcgcgcccagcagctgctggacgcggtggagcagcggcagcggcagctcctggacaccatcgcagcctgcgaggagatgttacggcagctgggccgccggcgcccggagccggctggtggcgggaacgtctcagccaaacctggagcgcccccccagccggctgtctccgccagaggcggctttccaaaggatgctggcgatggagctgcggagccctgaccatccccgagcagaataccctgacttctctccctccccagggccagtgaagcagaatcacgagatacaagcacccaacagtgagaaaataagccagtgcaacatgatagcgaatagacgaattatcagaggacacatcagcctgggaggtgaggcaggcgacaagcaatggcaagcaagaggtaacagcaccccactatcataccaagagcagaaaaaggcaggagcaaggacagaagaaagaagcatccagaaaaaaacccagggacagattaccgcagatattggggcaggaccagcagtggctcgccaagaagtgggtctgaggcctggctatggggggggatccagggtggggtggttacataggtccattttccatggtatttgggggggccataaatgcccccacaaaaacaccttccagtaagaagccgttgattaaaaaccggaaacctggcag

SEQ ID NO: 419848 - DNA, 980 bp, Homo sapiens
gggagccagcaggcccctcgctcaaccccacgctggcagccaccgcggccctcatccccctgcaccgacgcgccggagacatccgcccaggcccgcttccgggaggaagtgacgctcccagccagcttccggtccaggagactcggccccgcctctgcgccgggcagcttaaagggaccacgacccccaggaggattgaaggagaccgggggaggctgccggcgtggaccgcgggaaggcggggctggggctcggcgggaggccacccccacagccgccccgggaggagcgcgcccagcagctgctggacgcggtggagcagcggcagcggcagctcctggacaccatcgcagcctgcgaggagatgttacggcagctgggccgccggcgcccggagccggctggtggcgggaacgtctcagccaaacctggagcgcccccccagccggctgtctccgccagaggcggctttccaaaggatgctggcgatggagctgcggagccctgaccatccccgagcagaataccctgacttctctccctccccagggccggtggctggactctgaacaactcccttcagtaaaggggccagtcttcactggcagtggctggtacttggctctcagcctggagtggcagctctgctagcagctgggttcactcccacttcatcctggctgaaagcagtgctgtgctttgaaatgcagccaatgaatacccagtctgattacccagatttgggcagaccagcagtgctcgccagagtggtctggcctgctatgggggatccaggtggtgttacatgtccatttcatgttttgggggcttttagccccacaaaacaccttcagtagagccttgattaaaaggaaacctgcagactctccaaaaaaaagcacgcaaacaaggaaagaaaccgcgcgtaaggggggaaaagggaaagggccaggagagggcgcggccggtggcaagggaag

SEQ ID NO: 419849 - DNA, 1202 bp, Homo sapiens
gggagccagcaggcccctcgctcaaccccacgctggcagccaccgcggccctcatccccctgcaccgacgcgccggagacatccgcccaggcccgcttccgggaggaagtgacgctcccagccagcttccggtccaggagactcggccccgcctctgcgccgggcagcttaaagggaccacgacccccaggaggattgaaggagaccggtggggacggggcggggcgcagccttgcgaagccctaacgcagcgctggggaggggggcggccgaaaggggggcggtggtcgggccgcgcaagcggagatggaatggggcccgggctcagactggtcacgggggtgagagggggcccgtcggggcgggaggaaggggcttggccccgcgcaagcgccggccctgaccgtctgtctctcgctctctcccgggcagggaggctgccggcgtggaccgcgggaaggcggggctggggctcggcgggaggccacccccacagccgccccgggaggagcgcgcccagcagctgctggacgcggtggagcagcggcagcggcagctcctggacaccatcgcagcctgcgaggagatgttacggcagctgggccgccggcgcccggagccggctggtggcgggaacgtctcagccaaacctggagcgcccccccagccggctgtctccgccagaggcggctttccaaaggatgctggcgatggagctgcggagccctgaccatccccgagcagaataccctgacttctctccctccccagggccggtggctggactctgaacaactcccttcagtaaaggggccagtcttcactggcagtggctggtacttggctctcagcctggagtggcagctctgctagcagctgggttcactcccacttcatcctggctgaaagcagtgctgtgctttgaaatgcagccaatgaatacccagtctgattacccagatttgggcagaccagcagtgctcgccagagtggtctggcctgctatgggggatccaggtggtgttacatgtccatttcatgttttgggggcttttagccccacaaaacaccttcagtagagccttgattaaaaggaaacctgcagactctccaaaaaaaagcacgcaaacaaggaaagaaaccgcgcgtaaggggggaaaagggaaagggccaggagagggcgcggccggtggcaagggaag

SEQ ID NO: 419850 - DNA, 1089 bp, Homo sapiens
gggagccagcaggcccctcgctcaaccccacgctggcagccaccgcggccctcatccccctgcaccgacgcgccggagacatccgcccaggcccgcttccgggaggaagtgacgctcccagccagcttccggtccaggagactcggccccgcctctgcgccgggcagcttaaagggaccacgacccccaggaggattgaaggagaccggtggggacggggcggggcgcagccttgcgaagccctaacgcagcgctggggaggggggcggccgaaaggggggcggtggtcgggccgcgcaagcggagatggaatggggcccgggctcagactggtcacggggggaggctgccggcgtggaccgcgggaaggcggggctggggctcggcgggaggccacccccacagccgccccgggaggagcgcgcccagcagctgctggacgcggtggagcagcggcagcggcagctcctggacaccatcgcagcctgcgaggagatgttacggcagctgggccgccggcgcccggagccggctggtggcgggaacgtctcagccaaacctggagcgcccccccagccggctgtctccgccagaggcggctttccaaaggatgctggcgatggagctgcggagccctgaccatccccgagcagaataccctgacttctctccctccccagggccggtggctggactctgaacaactcccttcagtaaaggggccagtcttcactggcagtggctggtacttggctctcagcctggagtggcagctctgctagcagctgggttcactcccacttcatcctggctgaaagcagtgctgtgctttgaaatgcagccaatgaatacccagtctgattacccagatttgggcagaccagcagtgctcgccagagtggtctggcctgctatgggggatccaggtggtgttacatgtccatttcatgttttgggggcttttagccccacaaaacaccttcagtagagccttgattaaaaggaaacctgcagactctccaaataaaaaaagaagaaaaaaagaaaagaaagaaggaagagaagaaaaatagaaaacaaaaaagaagg

SEQ ID NO: 419851 - DNA, 1595 bp, Homo sapiens
ccgcgtcttattccttctaatctctcccccgccccttgtcttgcgcctgccttcctaacagccttcagttccccttctcccgtcagaccttcctgacctcccacctggttctctaggggcagggtggacaggaagcagctcagcccagcctgggagaggccaagggctgcctcctatcagagagcgcctgctcgctgtgcccccgggttatgacgacccccaataaaggaaacaaggccttgaaggtgaagcgggagccgggtgagaatggcaccagcctgacggatgaggagctggtgaccatgtcggtgcgggagctgaaccagcacctgcggggcctgtccaaggaggagatcgtccagctgaagcagcgccggcgcacgctcaagaaccgcggctacgctgccagctgccgcgtgaagcgggtgacgcagaaggaggagctggagaagcagaaggcggagctgcagcaggaggtggagaagctggcctcagagaacgccagcatgaagctggagctcgacgcgctgcgctccaagtacgaggcgctgcagaccttcgcccggacggtggcccgcagccccgtggcgccagcccggggcccccttgccgccggcctggggcccctcgtcccaggcaaggtggccgccaccagcgtcatcacaatagtaaagtccaagacggatgcccgatcgtagggacgcgcgtctgcccaggcgggtctttgcggggccactaggcacatggcgaatttggctgccctgtccctctgtttccttctcttctctttcctccctctcttccccacccttctctcttccctgcaaagcacaacctgtaccccaggggcgccgggctgagcccctttgatctcgtcattgtcgtcgtgtgttttgtatgttgggattggtcagttcggcggtgacgtggggtcgccccaaccccttttgtaccagggccatgcaggcttggagtccagagttggtgctgtgggaacggactagagagagttgcgggagagagaaggagcaggcacgctgggcctcgcgtgtccccgagcagtgagggtcccagtgttccctccactcccgagtggccacaggctcgcgggctgggaaggattcactctctttagccccaggggagcagctcagcttagcccagcatgaagagatgggctctgctctgagagtagggcgggcttgaaggccctgatgggtggaccaccagcctgggcgcagtggtgctgggggcgtgcagctgggcccaggggctgtgcactcaggcctgacccgttgcactgaacaagaccaaatcgctggttgtgcgcttaacgtgagggtgggtccagtgtgccctgcgatgggtcccgtgtcactgtttacatgacctatttgtgtggttatatagccctttatttaaaagagagaagttccttttacaaagttattaaattaattatatgtttaaaagttaaagaaaaaagagctgcagagtatttataaaactgtcttttagaaaaaaaacaagcaagaagaccatttgaccatatgaatggaaaagggaagaaagtataatagaaactttgctagtta

SEQ ID NO: 419852 - DNA, 1722 bp, Homo sapiens
ccgcctggtccggcccggccttcccagtgcgctcggcccggcccgcgcaggcggcgagtcctccgagccccgggcccggacccctcgcgccggtccctgccccgcgcggcctcggagcgcgcgcggccccgccccgccccggcctcggcccgccgggcccgcagtgtgagagcgcctgctcgctgtgcccccgggttatgacgacccccaataaaggaaacaaggccttgaaggtgaagcgggagccgggtgagaatggcaccagcctgacggatgaggagctggtgaccatgtcggtgcgggagctgaaccagcacctgcggggcctgtccaaggaggagatcgtccagctgaagcagcgccggcgcacgctcaagaaccgcggctacgctgccagctgccgcgtgaagcgggtgacgcagaaggaggagctggagaagcagaaggcggagctgcagcaggaggtggagaagctggcctcagagaacgccagcatgaagctggagctcgacgcgctgcgctccaagtacgaggcgctgcagaccttcgcccggacggtggcccgcagccccgtggcgccagcccggggcccccttgccgccggcctggggcccctcgtcccaggcaaggtggccgccaccagcgtcatcacaatagtaaagtccaagacggatgcccgatcgtagggacgcgcgtctgcccaggcgggtctttgcggggccactaggcacatggcgaatttggctgccctgtccctctgtttccttctcttctctttcctccctctcttccccacccttctctcttccctgcaaagcacaacctgtaccccaggggcgccgggctgagcccctttgatctcgtcattgtcgtcgtgtgttttgtatgttgggattggtcagttcggcggtgacgtggggtcgccccaaccccttttgtaccagggccatgcaggcttggagtccagagttggtgctgtgggaacggactagagagagttgcgggagagagaaggagcaggcacgctgggcctcgcgtgtccccgagcagtgagggtcccagtgttccctccactcccgagtggccacaggctcgcgggctgggaaggattcactctctttagccccaggggagcagctcagcttagcccagcatgaagagatgggctctgctctgagagtagggcgggcttgaaggccctgatgggtggaccaccagcctgggcgcagtggtgctgggggcgtgcagctgggcccaggggctgtgcactcaggcctgacccgttgcactgaacaagaccaaatcgctggttgtgcgcttaacgtgagggtgggtccagtgtgccctgcgatgggtcccgtgtcactgtttacatgacctatttgtgtggttatatagccctttatttaaaagagagaagttccttttacaaagttattaaattaattatatgtttaaaagttaaagaaaaaagagctgcagagtatttataaaactgtcttttagaaaaaaaacaagcaagaagaccatttgaccatatgaatggaaaagggaagaaagtataatagaaactttgctagttaaaaaaaaaagaaaaaaaaagaaaaaaaatccctttcttgtaaacttacggacacctctttgtggctgttggagtttagtttttatatacacagagttatcagacattatttataaaacttagtttaaaaaaaagacaaa

SEQ ID NO: 419853 - DNA, 1583 bp, Homo sapiens
ccgcctggtccggcccggccttcccagtgcgctcggcccggcccgcgcaggcggcgagtcctccgagccccgggcccggacccctcgcgccggtccctgccccgcgcggcctcggagcgcgcgcggccccgccccgccccggcctcggcccgccgggcccgcagtgtgagagcgcctgctcgctgtgcccccgggttatgacgacccccaataaaggaaacaaggccttgaaggtgaagcgggagccgggtgagaatggcaccagcctgacggatgaggagctggtgaccatgtcggtgcgggagctgaaccagcacctgcggggcctgtccaaggaggagatcgtccagctgaagcagcgccggcgcacgctcaagaaccgcggctacgctgccagctgccgcgtgaagcgggtgacgcagaaggaggagctggagaagcagaaggcggagctgcagcaggaggtggagaagctggcctcagagaacgccagcatgaagctggagctcgacgcgctgcgctccaagtacgaggcgctgcagaccttcgcccggacggtggcccgcagccccgtggcgccagcccggggcccccttgccgccggcctggggcccctcgtcccaggcaaggtggccgccaccagcgtcatcacaatagtaaagtccaagacggatgcccgatcgtagggacgcgcgtctgcccaggcgggtctttgcggggccactaggcacatggcgaatttggctgccctgtccctctgtttccttctcttctctttcctccctctcttccccacccttctctcttccctgcaaagcacaacctgtaccccaggggcgccgggctgagcccctttgatctcgtcattgtcgtcgtgtgttttgtatgttgggattggtcagttcggcggtgacgtggggtcgccccaaccccttttgtaccagggccatgcaggcttggagtccagagttggtgctgtgggaacggactagagagagttgcgggagagagaaggagcaggcacgctgggcctcgcgtgtccccgagcagtgagggtcccagtgttccctccactcccgagtggccacaggctcgcgggctgggaaggattcactctctttagccccaggggagcagctcagcttagcccagcatgaagagatgggctctgctctgagagtagggcgggcttgaaggccctgatgggtggaccaccagcctgggcgcagtggtgctgggggcgtgcagctgggcccaggggctgtgcactcaggcctgacccgttgcactgaacaagaccaaatcgctggttgtgcgcttaacgtgagggtgggtccagtgtgccctgcgatgggtcccgtgtcactgtttacatgacctatttgtgtggttatatagccctttatttaaaagagagaagttccttttacaaagttattaaattaattatatgtttaaaagttaaagaaaaaagagctgcagagtatttataaaactgtcttttagaaaaaaaacaagcaagaagaccatttgaccatatgaatggaaaagggaagaaagtataatagaaactttgctagtta

SEQ ID NO: 419854 - DNA, 380 bp, Homo sapiens
  misc_feature (22)..(22): n is a, c, g, or t
tcgtgccgaattcggcacgacngaaacctcgaggagctgggctagatacttcgagagtagccctgtcttgtcccctcctacccccagattagcaccacccctctcactcttgggttggatgctatgggaattacaacccatcactcccaatgcctccctttcctggaggagcctgctgcattctcctgctgagggatcccagagagggcaggtgcccaccccacaggccctttcctggaccatggagccaggtgaaacctgtctggccccttacccattgggttcttactccttcacaacggtcagcactcctctcccagcccccctgcccactgttctcaataaaatgtgagtggtgagaggcctctgcaggaatgctt

SEQ ID NO: 419855 - DNA, 952 bp, Homo sapiens
ggcccaagagtctgcatttctgacagagtcctaggtgatgcccatgttgccagtccctgtaccctcattgagtaggaagaagctagagctcataaggtccattcatctgtgctatatcattacaccctggaaactaccttgtaggtattattataatgctcacttttcaaacgggaaacagatgtaaagtgaagcagttggctcaaaggttcacagcaagttaatgttaggactggtactagtattagctcctttctttcagtgcaaccaccaaggacttgttggatgccaggcactgtgctaggtgctgtgggtattcagctgaccaaggaagaaggcacattctcccccaaacaaggcttccctgtcccatggtgtaggatttctctgcaaccctgtgtagcaacaccactgccaggatcctggagtggcatgtggctgactcagagatgagtgccctgccattatcagctcctggtactggaggccccagcctgctataagccttggccctgctctggccatactgagaaaaattctctcagtaatctgagatggctgccatggtggctgcctccctgttccaggccttctgctctgaatgggctgaaagggatgcaactgaaaataggtcagagctgtatttccagaggagaaagttatggagggtgctaaccactctccatgaactcacagaggcagaggcctctcctaagagtgaggcatgtgggagtgaggctggacagcctcctggaagctctcggagctatgtcttctgttcctttttatggccatcctatccctctgccctctcagggaaaggggctgtttgccacacagctcatccggaagggggagaccatcttcgtagaacggcccctggtggctgcacagtttctctggaatgcactttatcgctaccgaggtgagtacatctctcctactcctcatg

SEQ ID NO: 419856 - DNA, 432 bp, Homo sapiens
gctgctcggggcggggctagggggctttgctgctgtatccctggaacggtgggcggggatgtgccgggcagagagaactgaggtgtaaaagagggagtcctcacgaacttcatgtgtgagatttgggtgaggggatgaggagagaggccaagatccttcacgagggtccttggagtgctgaggaatttggaccagatcccaatgcctccctttcctggaggagcctgctgcattctcctgctgagggatcccagagagggcaggtgcccaccccacaggccctttcctggaccatggagccaggtgaaacctgtctggccccttacccattgggttcttactccttcacaacggtcagcactcctctcccagcccccctgcccactgttctcaataaaatgtgagtggtgagaggcctctgcaggaatgctt

SEQ ID NO: 419857 - DNA, 407 bp, Homo sapiens
gctgctcggggcggggctagggggctttgctgctgtatccctggaacggtgggcggggatgtgccgggcagagagaactgaggtgtaaaagagggagtcctcacgaacttcatgtgtgagatttgggtgaggggatgaggagagaggccaagatccttcacgagggtccttggagtgctgaggaatttggaccagagtccaaaggccgtgggggcattgggagagtttttagcaggaaggtgacgtgattttgtcgtttttattgtgttccaaaagttcattgtagaaaaaaatacaaaatgcatgtaaggaaagaaaatacaaaaatcacccatacttctatacttgtgcaaagatgagtacgttaaaattacatttttagaaactgctttttgatgcagcagtga

SEQ ID NO: 419858 - DNA, 2426 bp, Homo sapiens
gtcataaggcggaggcgcgcccaagatggcggcctccatgtgcgacgtgttctccttctgcgtgggcgtggcgggccgcgcgcgggtctccgtggaagtccgtttcgtgagcagcgccaagggaaaggggctgtttgccacacagctcatccggaagggggagaccatcttcgtagaacggcccctggtggctgcacagtttctctggaatgcactttatcgctaccgagcctgtgaccactgccttagggcactagagaaggcagaggagaatgcccagaggctgaccgggaaaccaggccaggttctgcctcacccagagctgtgcactgtgcgcaaagacctccaccagaactgtccccattgccaagtgatgtactgcagtgcagaatgtcggttggcagccactgagcaataccaccaggtcctgtgcccaggcccctcccaggatgaccccttgcatcctctcaataagcttcaggaggcatggaggagtattcactacccacctgagactgcaagcatcatgttgatggctaggatggtggccacagtgaagcaggcgaaggacaaggaccgttggatcagactcttttcccagttttgtaacaaaacagccaatgaagaggaggaaattgtccataaacttctgggagacaaattcaagggccaactggaacttctgcggagactcttcacagaggccctctatgaggaagcagtcagccagtggttcactccagatggattccggtctctctttgctcttgttgggaccaatggccaaggaatcgggaccagctccctaagccagtgggtccatgcctgtgacactctggagttgaagcctcaggaccgtgagcagcttgacgccttcattgaccagctatacaaggacatcgaggcaggaaatttgtatcagctacttggactgctgtcagcgggagcgcagccgccacagccgccacaagatcctcagggagaactatctatttgtctgttcctgtcccaaatgcctggcagaggctgatgaacccaatgtgacctcagaagaggaagaggaagaggaggaggaggaggaaggagagccagaagatgcagagctgggggatgagatgactgatgtgtgatgttgccctgcccagaaagggccctgccctagaccctgccagaaaagggggctcttcccccagagaagtggcttggagggaacttcccactcccattgcctgctttccccattccagccctctctgctagagggtaggagagagcctggatctctggccccaacccccaccagacctcatgccctggacactgctgctgagttggctcagactctgcactggcactgagcctttcacaactggcctccccttgaggttcctccactctagggtttgaggggctggaatcagggccagggcctaacagtgtttcttcccctcggccccacggcccatactcaccccttcacctgaggcttctcccctctcaacttgctgttgatttcttttgaggggtaaaagaaagaccgagttcattgaagcagagatgggaggtggtgaggcgtcctcacctccccccaccacagctgtggctggtaaggcaactgcttgaccactggcccagcaagcagaggcgggcaggaggatctgggcatcctgagccccttccctgaggctgtctcctgggaatgctggaccagggggattacttcccccacccacacccccatttggacatctggggaagtggagattaacccctcccccagactcgtgccttgcctctcaggacctggcacagtggctggccttatggagtatggaaaaggcctctgccttcctcaggagggacacatagtgggtcatcaccctttctcacacctgcttcccaatgagcactcagcagcatggctgagacctggggcttgacaggcctgcgctccttagattaggatgctctggtattcctggggccagttaaaatgggtcagtgaggggctctcctggcctcaatctccatctttagggtctccacagactaacattgaagtcttccagaaacctcgaggagctgggctagatacttcgagagtagccctgtcttgtcccctcctacccccagattagcaccacccctctcactcttgggttggatgctatgggaattacaacccatcactcccaatgcctccctttcctggaggagcctgctgcattctcctgctgagggatcccagagagggcaggtgcccaccccacaggccctttcctggaccatggagccaggtgaaacctgtctggccccttacccattgggttcttactccttcacaacggtcagcactcctctcccagcccccctgcccactgttctcaataaaatgtgagtggtgagaggcctctgcaggaatgctt

SEQ ID NO: 419859 - DNA, 3273 bp, Homo sapiens
ggcccaagagtctgcatttctgacagagtcctaggtgatgcccatgttgccagtccctgtaccctcattgagtaggaagaagctagagctcataaggtccattcatctgtgctatatcattacaccctggaaactaccttgtaggtattattataatgctcacttttcaaacgggaaacagatgtaaagtgaagcagttggctcaaaggttcacagcaagttaatgttaggactggtactagtattagctcctttctttcagtgcaaccaccaaggacttgttggatgccaggcactgtgctaggtgctgtgggtattcagctgaccaaggaagaaggcacattctcccccaaacaaggcttccctgtcccatggtgtaggatttctctgcaaccctgtgtagcaacaccactgccaggatcctggagtggcatgtggctgactcagagatgagtgccctgccattatcagctcctggtactggaggccccagcctgctataagccttggccctgctctggccatactgagaaaaattctctcagtaatctgagatggctgccatggtggctgcctccctgttccaggccttctgctctgaatgggctgaaagggatgcaactgaaaataggtcagagctgtatttccagaggagaaagttatggagggtgctaaccactctccatgaactcacagaggcagaggcctctcctaagagtgaggcatgtgggagtgaggctggacagcctcctggaagctctcggagctatgtcttctgttcctttttatggccatcctatccctctgccctctcagggaaaggggctgtttgccacacagctcatccggaagggggagaccatcttcgtagaacggcccctggtggctgcacagtttctctggaatgcactttatcgctaccgagcctgtgaccactgccttagggcactagagaaggcagaggagaatgcccagaggctgaccgggaaaccaggccaggttctgcctcacccagagctgtgcactgtgcgcaaagacctccaccagaactgtccccattgccaagtgatgtactgcagtgcagaatgtcggttggcagccactgagcaataccaccaggtcctgtgcccaggcccctcccaggatgaccccttgcatcctctcaataagcttcaggaggcatggaggagtattcactacccacctgagactgcaagcatcatgttgatggctaggatggtggccacagtgaagcaggcgaaggacaaggaccgttggatcagactcttttcccagttttgtaacaaaacagccaatgaagaggaggaaattgtccataaacttctgggagacaaattcaagggccaactggaacttctgcggagactcttcacagaggccctctatgaggaagcagtcagccagtggttcactccagatggattccggtctctctttgctcttgttgggaccaatggccaaggaatcgggaccagctccctaagccagtgggtccatgcctgtgacactctggagttgaagcctcaggaccgtgagcagcttgacgccttcattgaccagctatacaaggacatcgaggcagcaactggagagtttcttaactgtgaaggatctggcctctttgtgcttcagagctgctgcaaccacagttgtgtgcccaatgcagagacctcctttccagaaaacaacttccttttgcatgtcactgctctggaggatattaagccaggagaggaaatttgtatcagctacttggactgctgtcagcgggagcgcagccgccacagccgccacaagatcctcagggagaactatctatttgtctgttcctgtcccaaatgcctggcagaggctgatgaacccaatgtgacctcagaagaggaagaggaagaggaggaggaggaggaaggagagccagaagatgcagagctgggggatgagatgactgatgtgtgatgttgccctgcccagaaagggccctgccctagaccctgccagaaaagggggctcttcccccagagaagtggcttggagggaacttcccactcccattgcctgctttccccattccagccctctctgctagagggtaggagagagcctggatctctggccccaacccccaccagacctcatgccctggacactgctgctgagttggctcagactctgcactggcactgagcctttcacaactggcctccccttgaggttcctccactctagggtttgaggggctggaatcagggccagggcctaacagtgtttcttcccctcggccccacggcccatactcaccccttcacctgaggcttctcccctctcaacttgctgttgatttcttttgaggggtaaaagaaagaccgagttcattgaagcagagatgggaggtggtgaggcgtcctcacctccccccaccacagctgtggctggtaaggcaactgcttgaccactggcccagcaagcagaggcgggcaggaggatctgggcatcctgagccccttccctgaggctgtctcctgggaatgctggaccagggggattacttcccccacccacacccccatttggacatctggggaagtggagattaacccctcccccagactcgtgccttgcctctcaggacctggcacagtggctggccttatggagtatggaaaaggcctctgccttcctcaggagggacacatagtgggtcatcaccctttctcacacctgcttcccaatgagcactcagcagcatggctgagacctggggcttgacaggcctgcgctccttagattaggatgctctggtattcctggggccagttaaaatgggtcagtgaggggctctcctggcctcaatctccatctttagggtctccacagactaacattgaagtcttccagaaacctcgaggagctgggctagatacttcgagagtagccctgtcttgtcccctcctacccccagattagcaccacccctctcactcttgggttggatgctatgggaattacaacccatcactcccaatgcctccctttcctggaggagcctgctgcattctcctgctgagggatcccagagagggcaggtgcccaccccacaggccctttcctggaccatggagccaggtgaaacctgtctggccccttacccattgggttcttactccttcacaacggtcagcactcctctcccagcccccctgcccactgttctcaataaaatgtgagtggtgagaggcctctgcaggaatgctt

SEQ ID NO: 419860 - DNA, 2482 bp, Homo sapiens
atttactcactttccaaacctttatgaaacactagaatggtgcctggcacatagcagctgctctgtagggctgtgaaagggatagatgtggcctctgctctcaagatattgttgtgtctggctctcaccgtcagcctgtgaccactgccttagggcactagagaaggcagaggagaatgcccagaggctgaccgggaaaccaggccaggttctgcctcacccagagctgtgcactgtgcgcaaagacctccaccagaactgtccccattgccaagtgatgtactgcagtgcagaatgtcggttggcagccactgagcaataccaccaggtcctgtgcccaggcccctcccaggatgaccccttgcatcctctcaataagcttcaggaggcatggaggagtattcactacccacctgagactgcaagcatcatgttgatggctaggatggtggccacagtgaagcaggcgaaggacaaggaccgttggatcagactcttttcccagttttgtaacaaaacagccaatgaagaggaggaaattgtccataaacttctgggagacaaattcaagggccaactggaacttctgcggagactcttcacagaggccctctatgaggaagcagtcagccagtggttcactccagatggattccggtctctctttgctcttgttgggaccaatggccaaggaatcgggaccagctccctaagccagtgggtccatgcctgtgacactctggagttgaagcctcaggaccgtgagcagcttgacgccttcattgaccagctatacaaggacatcgaggcagcaactggagagtttcttaactgtgaaggatctggcctctttgtgcttcagagctgctgcaaccacagttgtgtgcccaatgcagagacctcctttccagaaaacaacttccttttgcatgtcactgctctggaggatattaagccaggagaggaaatttgtatcagctacttggactgctgtcagcgggagcgcagccgccacagccgccacaagatcctcagggagaactatctatttgtctgttcctgtcccaaatgcctggcagaggctgatgaacccaatgtgacctcagaagaggaagaggaagaggaggaggaggaggaaggagagccagaagatgcagagctgggggatgagatgactgatgtgtgatgttgccctgcccagaaagggccctgccctagaccctgccagaaaagggggctcttcccccagagaagtggcttggagggaacttcccactcccattgcctgctttccccattccagccctctctgctagagggtaggagagagcctggatctctggccccaacccccaccagacctcatgccctggacactgctgctgagttggctcagactctgcactggcactgagcctttcacaactggcctccccttgaggttcctccactctagggtttgaggggctggaatcagggccagggcctaacagtgtttcttcccctcggccccacggcccatactcaccccttcacctgaggcttctcccctctcaacttgctgttgatttcttttgaggggtaaaagaaagaccgagttcattgaagcagagatgggaggtggtgaggcgtcctcacctccccccaccacagctgtggctggtaaggcaactgcttgaccactggcccagcaagcagaggcgggcaggaggatctgggcatcctgagccccttccctgaggctgtctcctgggaatgctggaccagggggattacttcccccacccacacccccatttggacatctggggaagtggagattaacccctcccccagactcgtgccttgcctctcaggacctggcacagtggctggccttatggagtatggaaaaggcctctgccttcctcaggagggacacatagtgggtcatcaccctttctcacacctgcttcccaatgagcactcagcagcatggctgagacctggggcttgacaggcctgcgctccttagattaggatgctctggtattcctggggccagttaaaatgggtcagtgaggggctctcctggcctcaatctccatctttagggtctccacagactaacattgaagtcttccagaaacctcgaggagctgggctagatacttcgagagtagccctgtcttgtcccctcctacccccagattagcaccacccctctcactcttgggttggatgctatgggaattacaacccatcactcccaatgcctccctttcctggaggagcctgctgcattctcctgctgagggatcccagagagggcaggtgcccaccccacaggccctttcctggaccatggagccaggtgaaacctgtctggccccttacccattgggttcttactccttcacaacggtcagcactcctctcccagcccccctgcccactgttctcaataaaatgtgagtggtgagaggcctctgcaggaatgctt

SEQ ID NO: 419861 - DNA, 2128 bp, Homo sapiens
ctccttcgatttggctctctatatagtgaagcagaacgtcacaagcgtgatgtcgcacactaatagggaacgtgagcagcgttcagaccgtcgtgaatagtgtatcaccctagggatgatgtgtgtgccatggtaatcctgctcagtacgatgaggaaccgagtaggacgttggtgtatgtgcttggtagggagccattgcctaagctctgtctgtgggattatggcgaatatgggggacctctagagtcgccggggctctatagcttgcagttggccggtgtttcacaccgtatggattgcggtcgcggttagcacttgcagagagcaatggtcaaggaatcgggaccagctccctaagccagtgggtccatgcctgtgacactctggagttgaagcctcaggaccgtgagcagcttgacgccttcattgaccagctatacaaggacatcgaggcagcaactggagagtttcttaactgtgaaggatctggcctctttgtgcttcagagctgctgcaaccacagttgtgtgcccaatgcagagacctcctttccagaaaacaacttccttttgcatgtcactgctctggaggatattaagccaggagaggaaatttgtatcagctacttggactgctgtcagcgggagcgcagccgccacagccgccacaagatcctcagggagaactatctatttgtctgttcctgtcccaaatgcctggcagaggctgatgaacccaatgtgacctcagaagaggaagaggaagaggaggaggaggaggaaggagagccagaagatgcagagctgggggatgagatgactgatgtgtgatgttgccctgcccagaaagggccctgccctagaccctgccagaaaagggggctcttcccccagagaagtggcttggagggaacttcccactcccattgcctgctttccccattccagccctctctgctagagggtaggagagagcctggatctctggccccaacccccaccagacctcatgccctggacactgctgctgagttggctcagactctgcactggcactgagcctttcacaactggcctccccttgaggttcctccactctagggtttgaggggctggaatcagggccagggcctaacagtgtttcttcccctcggccccacggcccatactcaccccttcacctgaggcttctcccctctcaacttgctgttgatttcttttgaggggtaaaagaaagaccgagttcattgaagcagagatgggaggtggtgaggcgtcctcacctccccccaccacagctgtggctggtaaggcaactgcttgaccactggcccagcaagcagaggcgggcaggaggatctgggcatcctgagccccttccctgaggctgtctcctgggaatgctggaccagggggattacttcccccacccacacccccatttggacatctggggaagtggagattaacccctcccccagactcgtgccttgcctctcaggacctggcacagtggctggccttatggagtatggaaaaggcctctgccttcctcaggagggacacatagtgggtcatcaccctttctcacacctgcttcccaatgagcactcagcagcatggctgagacctggggcttgacaggcctgcgctccttagattaggatgctctggtattcctggggccagttaaaatgggtcagtgaggggctctcctggcctcaatctccatctttagggtctccacagactaacattgaagtcttccagaaacctcgaggagctgggctagatacttcgagagtagccctgtcttgtcccctcctacccccagattagcaccacccctctcactcttgggttggatgctatgggaattacaacccatcactcccaatgcctccctttcctggaggagcctgctgcattctcctgctgagggatcccagagagggcaggtgcccaccccacaggccctttcctggaccatggagccaggtgaaacctgtctggccccttacccattgggttcttactccttcacaacggtcagcactcctctcccagcccccctgcccactgttctcaataaaatgtgagtggtgagaggcctctgcaggaatgctt

SEQ ID NO: 419862 - DNA, 866 bp, Homo sapiens
gtcataaggcggaggcgcgcccaagatggcggcctccatgtgcgacgtgttctccttctgcgtgggcgtggcgggccgcgcgcgggtctccgtggaagtccgtttcgtgagcagcgccaagggaaaggggctgtttgccacacagctcatccggaagggggagaccatcttcgtagaacggcccctggtggctgcacagtttctctggaatgcactttatcgctaccgagcctgtgaccactgccttagggcactagagaaggcagaggagaatgcccagaggctgaccgggaaaccaggccaggttctgcctcacccagagctgtgcactgtgcgcaaagacctccaccagaactgtccccattgccaagtgatgtactgcagtgcagaatgtcggttggcagccactgagcaataccaccaggtcctgtgcccaggcccctcccaggatgaccccttgcatcctctcaataagcttcaggaggcatggaggagtattcactacccacctgagactgcaagcatcatgttgatggctaggatggtggccacagtgaagcaggcgaaggacaaggaccgttggatcagactcttttcccagttttgtaacaaaacagccaatgaagaggaggaaattgtccataaacttctgggagacaaattcaagggccaactggaacttctgcggagactcttcacagaggccctctatgaggaagcagtcagccagtggttcactccagatggattccggtctctctttgctcttgttgggaccaatggccaaggaatcgggaccaggatcggtagaatgttccagagctattgaagttactctcaggggtgggaaactgaggaaggtagcc

SEQ ID NO: 419863 - DNA, 2172 bp, Homo sapiens
ggcacgaggtgcaaaacagccgtcagaagttgggttaggacagttgtagcactgcaggctatgacctgaatggcagaagacagccaggacgagcagcagcccgaacaggacagacccaacaattgacggctgttttgcagtcagaagttgggttaggacagttgtagcactgcaggctatgacctgaatggcagaagacagccaggacgagcagcagcccgaacaggacagaccctccttggattcccattgtgattgtccacagaacctggcggcgcccaggatcccttcacagaggccctctatgaggaagcagtcagccagtggttcactccagatggattccggtctctctttgctcttgttgggaccaatggccaaggaatcgggaccagctccctaagccagtgggtccatgcctgtgacactctggagttgaagcctcaggaccgtgagcagcttgacgccttcattgaccagctatacaaggacatcgaggcagcaactggagagtttcttaactgtgaaggatctggcctctttgtgcttcagagctgctgcaaccacagttgtgtgcccaatgcagagacctcctttccagaaaacaacttccttttgcatgtcactgctctggaggatattaagccaggagaggaaatttgtatcagctacttggactgctgtcagcgggagcgcagccgccacagccgccacaagatcctcagggagaactatctatttgtctgttcctgtcccaaatgcctggcagaggctgatgaacccaatgtgacctcagaagaggaagaggaagaggaggaggaggaggaaggagagccagaagatgcagagctgggggatgagatgactgatgtgtgatgttgccctgcccagaaagggccctgccctagaccctgccagaaaagggggctcttcccccagagaagtggcttggagggaacttcccactcccattgcctgctttccccattccagccctctctgctagagggtaggagagagcctggatctctggccccaacccccaccagacctcatgccctggacactgctgctgagttggctcagactctgcactggcactgagcctttcacaactggcctccccttgaggttcctccactctagggtttgaggggctggaatcagggccagggcctaacagtgtttcttcccctcggccccacggcccatactcaccccttcacctgaggcttctcccctctcaacttgctgttgatttcttttgaggggtaaaagaaagaccgagttcattgaagcagagatgggaggtggtgaggcgtcctcacctccccccaccacagctgtggctggtaaggcaactgcttgaccactggcccagcaagcagaggcgggcaggaggatctgggcatcctgagccccttccctgaggctgtctcctgggaatgctggaccagggggattacttcccccacccacacccccatttggacatctggggaagtggagattaacccctcccccagactcgtgccttgcctctcaggacctggcacagtggctggccttatggagtatggaaaaggcctctgccttcctcaggagggacacatagtgggtcatcaccctttctcacacctgcttcccaatgagcactcagcagcatggctgagacctggggcttgacaggcctgcgctccttagattaggatgctctggtattcctggggccagttaaaatgggtcagtgaggggctctcctggcctcaatctccatctttagggtctccacagactaacattgaagtcttccagaaacctcgaggagctgggctagatacttcgagagtagccctgtcttgtcccctcctacccccagattagcaccacccctctcactcttgggttggatgctatgggaattacaacccatcactcccaatgcctccctttcctggaggagcctgctgcattctcctgctgagggatcccagagagggcaggtgcccaccccacaggccctttcctggaccatggagccaggtgaaacctgtctggccccttacccattgggttcttactccttcacaacggtcagcactcctctcccagcccccctgcccactgttctcaataaaatgtgagtggtgagaggcctctgcaggaatgctt

SEQ ID NO: 419864 - DNA, 2578 bp, Homo sapiens
gtcataaggcggaggcgcgcccaagatggcggcctccatgtgcgacgtgttctccttctgcgtgggcgtggcgggccgcgcgcgggtctccgtggaagtccgtttcgtgagcagcgccaagggaaaggggctgtttgccacacagctcatccggaagggggagaccatcttcgtagaacggcccctggtggctgcacagtttctctggaatgcactttatcgctaccgagcctgtgaccactgccttagggcactagagaaggcagaggagaatgcccagaggctgaccgggaaaccaggccaggttctgcctcacccagagctgtgcactgtgcgcaaagacctccaccagaactgtccccattgccaagtgatgtactgcagtgcagaatgtcggttggcagccactgagcaataccaccaggtcctgtgcccaggcccctcccaggatgaccccttgcatcctctcaataagcttcaggaggcatggaggagtattcactacccacctgagactgcaagcatcatgttgatggctaggatggtggccacagtgaagcaggcgaaggacaaggaccgttggatcagactcttttcccagttttgtaacaaaacagccaatgaagaggaggaaattgtccataaacttctgggagacaaattcaagggccaactggaacttctgcggagactcttcacagaggccctctatgaggaagcagtcagccagtggttcactccagatggattccggtctctctttgctcttgttgggaccaatggccaaggaatcgggaccagctccctaagccagtgggtccatgcctgtgacactctggagttgaagcctcaggaccgtgagcagcttgacgccttcattgaccagctatacaaggacatcgaggcagcaactggagagtttcttaactgtgaaggatctggcctctttgtgcttcagagctgctgcaaccacagttgtgtgcccaatgcagagacctcctttccagaaaacaacttccttttgcatgtcactgctctggaggatattaagccaggagaggaaatttgtatcagctacttggactgctgtcagcgggagcgcagccgccacagccgccacaagatcctcagggagaactatctatttgtctgttcctgtcccaaatgcctggcagaggctgatgaacccaatgtgacctcagaagaggaagaggaagaggaggaggaggaggaaggagagccagaagatgcagagctgggggatgagatgactgatgtgtgatgttgccctgcccagaaagggccctgccctagaccctgccagaaaagggggctcttcccccagagaagtggcttggagggaacttcccactcccattgcctgctttccccattccagccctctctgctagagggtaggagagagcctggatctctggccccaacccccaccagacctcatgccctggacactgctgctgagttggctcagactctgcactggcactgagcctttcacaactggcctccccttgaggttcctccactctagggtttgaggggctggaatcagggccagggcctaacagtgtttcttcccctcggccccacggcccatactcaccccttcacctgaggcttctcccctctcaacttgctgttgatttcttttgaggggtaaaagaaagaccgagttcattgaagcagagatgggaggtggtgaggcgtcctcacctccccccaccacagctgtggctggtaaggcaactgcttgaccactggcccagcaagcagaggcgggcaggaggatctgggcatcctgagccccttccctgaggctgtctcctgggaatgctggaccagggggattacttcccccacccacacccccatttggacatctggggaagtggagattaacccctcccccagactcgtgccttgcctctcaggacctggcacagtggctggccttatggagtatggaaaaggcctctgccttcctcaggagggacacatagtgggtcatcaccctttctcacacctgcttcccaatgagcactcagcagcatggctgagacctggggcttgacaggcctgcgctccttagattaggatgctctggtattcctggggccagttaaaatgggtcagtgaggggctctcctggcctcaatctccatctttagggtctccacagactaacattgaagtcttccagaaacctcgaggagctgggctagatacttcgagagtagccctgtcttgtcccctcctacccccagattagcaccacccctctcactcttgggttggatgctatgggaattacaacccatcactcccaatgcctccctttcctggaggagcctgctgcattctcctgctgagggatcccagagagggcaggtgcccaccccacaggccctttcctggaccatggagccaggtgaaacctgtctggccccttacccattgggttcttactccttcacaacggtcagcactcctctcccagcccccctgcccactgttctcaataaaatgtgagtggtgagaggcctctgcaggaatgctt

SEQ ID NO: 419865 - DNA, 2677 bp, Homo sapiens
gtcataaggcggaggcgcgcccaagatggcggcctccatgtgcgacgtgttctccttctgcgtgggcgtggcgggccgcgcgcgggtctccgtggaagtccgtttcgtgagcagcgccaagggaaaggggctgtttgccacacagctcatccggaagggggagaccatcttcgtagaacggcccctggtggctgcacagtttctctggaatgcactttatcgctaccgagaatggtgcctggcacatagcagctgctctgtagggctgtgaaagggatagatgtggcctctgctctcaagatattgttgtgtctggctctcaccgtcagcctgtgaccactgccttagggcactagagaaggcagaggagaatgcccagaggctgaccgggaaaccaggccaggttctgcctcacccagagctgtgcactgtgcgcaaagacctccaccagaactgtccccattgccaagtgatgtactgcagtgcagaatgtcggttggcagccactgagcaataccaccaggtcctgtgcccaggcccctcccaggatgaccccttgcatcctctcaataagcttcaggaggcatggaggagtattcactacccacctgagactgcaagcatcatgttgatggctaggatggtggccacagtgaagcaggcgaaggacaaggaccgttggatcagactcttttcccagttttgtaacaaaacagccaatgaagaggaggaaattgtccataaacttctgggagacaaattcaagggccaactggaacttctgcggagactcttcacagaggccctctatgaggaagcagtcagccagtggttcactccagatggattccggtctctctttgctcttgttgggaccaatggccaaggaatcgggaccagctccctaagccagtgggtccatgcctgtgacactctggagttgaagcctcaggaccgtgagcagcttgacgccttcattgaccagctatacaaggacatcgaggcagcaactggagagtttcttaactgtgaaggatctggcctctttgtgcttcagagctgctgcaaccacagttgtgtgcccaatgcagagacctcctttccagaaaacaacttccttttgcatgtcactgctctggaggatattaagccaggagaggaaatttgtatcagctacttggactgctgtcagcgggagcgcagccgccacagccgccacaagatcctcagggagaactatctatttgtctgttcctgtcccaaatgcctggcagaggctgatgaacccaatgtgacctcagaagaggaagaggaagaggaggaggaggaggaaggagagccagaagatgcagagctgggggatgagatgactgatgtgtgatgttgccctgcccagaaagggccctgccctagaccctgccagaaaagggggctcttcccccagagaagtggcttggagggaacttcccactcccattgcctgctttccccattccagccctctctgctagagggtaggagagagcctggatctctggccccaacccccaccagacctcatgccctggacactgctgctgagttggctcagactctgcactggcactgagcctttcacaactggcctccccttgaggttcctccactctagggtttgaggggctggaatcagggccagggcctaacagtgtttcttcccctcggccccacggcccatactcaccccttcacctgaggcttctcccctctcaacttgctgttgatttcttttgaggggtaaaagaaagaccgagttcattgaagcagagatgggaggtggtgaggcgtcctcacctccccccaccacagctgtggctggtaaggcaactgcttgaccactggcccagcaagcagaggcgggcaggaggatctgggcatcctgagccccttccctgaggctgtctcctgggaatgctggaccagggggattacttcccccacccacacccccatttggacatctggggaagtggagattaacccctcccccagactcgtgccttgcctctcaggacctggcacagtggctggccttatggagtatggaaaaggcctctgccttcctcaggagggacacatagtgggtcatcaccctttctcacacctgcttcccaatgagcactcagcagcatggctgagacctggggcttgacaggcctgcgctccttagattaggatgctctggtattcctggggccagttaaaatgggtcagtgaggggctctcctggcctcaatctccatctttagggtctccacagactaacattgaagtcttccagaaacctcgaggagctgggctagatacttcgagagtagccctgtcttgtcccctcctacccccagattagcaccacccctctcactcttgggttggatgctatgggaattacaacccatcactcccaatgcctccctttcctggaggagcctgctgcattctcctgctgagggatcccagagagggcaggtgcccaccccacaggccctttcctggaccatggagccaggtgaaacctgtctggccccttacccattgggttcttactccttcacaacggtcagcactcctctcccagcccccctgcccactgttctcaataaaatgtgagtggtgagaggcctctgcaggaatgctt

SEQ ID NO: 419866 - DNA, 1727 bp, Homo sapiens
gtttcttaactgtgaaggatctggcctcattgaccagctatacaaggacatcgaggccaactggagagtttcttaactgtgaaggatctggcctctttgtgcttcagagctgctgcaaccacagttgtgtgcccaatgcagagacctcctttccagaaaacaacttccttttgcatgtcactgctctggaggatattaagccaggagaggaaatttgtatcagctacttggactgctgtcagcgggagcgcagccgccacagccgccacaagatcctcagggagaactatctatttgtctgttcctgtcccaaatgcctggcagaggctgatgaacccaatgtgacctcagaagaggaagaggaagaggaggaggaggaggaaggagagccagaagatgcagagctgggggatgagatgactgatgtgtgatgttgccctgcccagaaagggccctgccctagaccctgccagaaaagggggctcttcccccagagaagtggcttggagggaacttcccactcccattgcctgctttccccattccagccctctctgctagagggtaggagagagcctggatctctggccccaacccccaccagacctcatgccctggacactgctgctgagttggctcagactctgcactggcactgagcctttcacaactggcctccccttgaggttcctccactctagggtttgaggggctggaatcagggccagggcctaacagtgtttcttcccctcggccccacggcccatactcaccccttcacctgaggcttctcccctctcaacttgctgttgatttcttttgaggggtaaaagaaagaccgagttcattgaagcagagatgggaggtggtgaggcgtcctcacctccccccaccacagctgtggctggtaaggcaactgcttgaccactggcccagcaagcagaggcgggcaggaggatctgggcatcctgagccccttccctgaggctgtctcctgggaatgctggaccagggggattacttcccccacccacacccccatttggacatctggggaagtggagattaacccctcccccagactcgtgccttgcctctcaggacctggcacagtggctggccttatggagtatggaaaaggcctctgccttcctcaggagggacacatagtgggtcatcaccctttctcacacctgcttcccaatgagcactcagcagcatggctgagacctggggcttgacaggcctgcgctccttagattaggatgctctggtattcctggggccagttaaaatgggtcagtgaggggctctcctggcctcaatctccatctttagggtctccacagactaacattgaagtcttccagaaacctcgaggagctgggctagatacttcgagagtagccctgtcttgtcccctcctacccccagattagcaccacccctctcactcttgggttggatgctatgggaattacaacccatcactcccaatgcctccctttcctggaggagcctgctgcattctcctgctgagggatcccagagagggcaggtgcccaccccacaggccctttcctggaccatggagccaggtgaaacctgtctggccccttacccattgggttcttactccttcacaacggtcagcactcctctcccagcccccctgcccactgttctcaataaaatgtgagtggtgagaggcctctgcaggaatgctt

SEQ ID NO: 419867 - DNA, 1300 bp, Homo sapiens
gtcataaggcggaggcgcgcccaagatggcggcctccatgtgcgacgtgttctccttctgcgtgggcgtggcgggccgcgcgcgggtctccgtggaagtccgtttcgtgagcagcgccaagggaaaggggctgtttgccacacagctcatccggaagggggagaccatcttcgtagaacggcccctggtggctgcacagtttctctggaatgcactttatcgctaccgagcctgtgaccactgccttagggcactagagaaggcagaggagaatgcccagaggctgaccgggaaaccaggccaggttctgcctcacccagagctgtgcactgtgcgcaaagacctccaccagaactgtccccattgccaagtgatgtactgcagtgcagaatgtcggttggcagccactgagcaataccaccaggtcctgtgcccaggcccctcccaggatgaccccttgcatcctctcaataagcttcaggaggcatggaggagtattcactacccacctgagactgcaagcatcatgttgatggctaggatggtggccacagtgaagcaggcgaaggacaaggaccgttggatcagactcttttcccagttttgtaacaaaacagccaatgaagaggaggaaattgtccataaacttctgggagacaaattcaagggccaactggaacttctgcggagactcttcacagaggccctctatgaggaagcagtcagccagtggttcactccagatggattccggtctctctttgctcttgttgggaccaatggccaaggaatcgggaccagctccctaagccagtgggtccatgcctgtgacactctggagttgaagcctcaggaccgtgagcagcttgacgccttcattgaccagctatacaaggacatcgaggcaggaaatttgtatcagctacttggactgctgtcagcgggagcgcagccgccacagccgccacaagatcctcagggagaactatctatttgtctgttcctgtcccaaatgcctggcagaggctgatgaacccaatgtgacctcagaagaggaagaggaagaggaggaggaggaggaaggagagccagaagatgcagagctgggggatgagatgactgatgtgtgatgtgcccaccccacaggccctttcctggaccatggagccaggtgaaacctgtctggccccttacccattgggttcttactccttcacaacggtcagcactcctctcccagcccccctgcccactgttctcaataaaatgtgagtggtgagaggcctctgcaggaatgctt

SEQ ID NO: 419868 - DNA, 3464 bp, Homo sapiens
gggacgctgcggtgccgctttccctatccagtcctgttcccgcggctccccagcctaccccgggccgaccaagaggtccggcggggtctgcgccgcatcagcgcccgctcgtcaggcctagccctccgcacagccaaggccgaccagacctctagacactccgtcgtcgggtgtggggcggagaagtaaagggcgagttttcttcctagattccagtgggaaccaagaaaaggagttggcagctgtgtaaactggacctggggtgcggcctccgggaacaaaagaggtgataaatgcacagcagccgaggttctgcgtgctcctttggggccactacgaatccccgtgaatcaccccagcccgggcagagggccagaaatgatgaaaatgcagattcatggcttccactccagccctacaagatcaccaaccgtatctggcagtacccaggaatctgcattctcgacaagcgtccgcgccgacggggctagtgaagtttgagaacaattgcttcctacccagccgctccgctatcacctaggtagcacggccgctgcggctgaggctgtgactgcggctgcggctgggccgcgcctcaaccgagcttggtcctttcctttggtcccgccccgctgctcagcgcggattggtggcgggacgcaaatctggcgctgattgggcggcggcagagtcgctcgtgaagattgtagggttcgggtgctctagagtgctaaatttatcttcagaccggcgaccgcgccagccgcgaatcggatctctatggagatggcctaggcgatatccctgagctgagagcatcaccctgtccccgaatccttctttcctctctgttttgtttttcattcccctccctctctcccctccccctccagtccacgacgactggctgttgaccctgttcaggcctcggtgaaggcttttggttactccccttcccaccccatcccttaattttattcttttgaagagtgcatttcaagctgccaaggtggagagagggattacagaaaggagaacaccttatttcagcttttatttttatgtgataatctacctttaagaaaaggtgtaccatacctgagagcaccaggaagtcgcatgagagatcacctgatacatgaacgtatgatgttccatctgcgcattgatgaataggcagcatttacaaattaactgatgtgttgctgtatatcatctctttgatgattgctcctcttctttgtatcctgtcttataatttcaacacatttgcgatactcaatgtctattctaaattaaccatgttttgtaccacaaactcattgcccatggatctgttgctgaaacaaggaagtcttaaacaagaagtggaatctttctgttatcagattgtgtctgaatcaaatgatcagaaggttggaatattacaaagtgaagataagcagttgcaaccttcagtttctaaaaaatcagaaggtgagctttccagggtcaaatttatatccaattccaacaaaataacatttagtaaaaaaccaaaaagaagaaaatatgatgaaagttatttgtcttttggatttacttacttcggaaatagagatgcacctcatgctcagtgtgtattatgtaagaaaattttatcaaatagctctttagcccctagtaagcttcgaagacatttggaaactaaacatgctgcatataaagacaaagacataagctttttcaagcaacatctcgattcacctgaaaataataaacccccaacacctaaaattgtgaatacagataatgaaagtgctacagaagcatcatacaatgtaagttaccatatagcgctgagtggagaggctcatactattggagaattgcttatcaaaccttgtgcaaaagatgtagtgatgcggatgtttgatgaacaatatagtaaaaaaatagatgcagtacagctatcaaacagtactgttgcacgtcgaattaaggatctagctgctgacattgaagaagagcttgtttgtagactgaaaatttgcgatgggttttcactgcaactagatgaatcagctgatgtttcaggacttgctgtgctgcttgtgtttgttcgttataggtttaataagtctattgaggaagacctactcctgtgtgaatctttgcaaagtaatgctaccggtgaagaaatattcaactgtatcaacagttttatgcagaaacatgaaattgaatgggaaaaatgtgttgatgtttgtagtgatgcttctagggcagtggatgggaaaattgccgaagctgtcaccttaataaaatatgtggctcccgaaagcaccagtagtcactgcctattatacagacatgcactggcagttaaaataatgcctacatctctaaaaaatgtgctagaccaggcagtacaaatcatcaattatattaaagctcgaccacatcaatccagactattaaaaattttatgtgaggaaatgggtgctcagcacacagcacttcttctaaatacagaggtgaggtggctttctcgaggtaaagttcttgtaagactttttgaacttcgtcgtgaacttttggttttcatggattctgcttttcgactatctgattgtttaacaaattcatcttggctgctaagacttgcatatcttgcagatatttttactaaattaaatgaagttaatttgtcaatgcaaggaaaaaatgtgaccgtttttacagtatttgataaaatgtcgtcattgttaagaaaattggaattttgggcctcatctgtagaagaagaaaactttgattgttttcctacactcagtgattttttgactgaaattaattctacagttgataaagatatttgcagtgccattgtgcagcacctaaggggtttgcgcgctactctgttaaaatactttcctgtaacaaatgacaataatgcttgggttagaaatccatttacagttactgttaaaccagcttcattagtagcacgggactatgagagcctgattgatttaacatctgattctcaagtgaagcaaaattttagtgaactttcactaaatgatttttggagtagcctaattcaggaatacccaagcattgcaaggcgtgcagtgcgtgtacttcttccttttgctacaatgcacctgtgtgaaacggggttttcatattacgctgcaacaaaaacaaaatataggaaaagacttgatgctgcacctcatatgcgaatccgacttagcaatattacacctaatattaagcggatatgtgataaaaagacacaaaaacactgttctcattaaaattggaggagtttgcatgtctcatgataaccaaatgtaagatgaaaataaaagatgatttacttcatctctggtatttgggggatttaaataaaatgattccatttttttatactatttagattttaagaaggctaaagaatcaaacgttttaaacat

SEQ ID NO: 419869 - DNA, 1156 bp, Homo sapiens
gggacgctgcggtgccgctttccctatccagtcctgttcccgcggctccccagcctaccccgggccgaccaagaggtccggcggggtctgcgccgcatcagcgcccgctcgtcaggcctagccctccgcacagccaaggccgaccagacctctagacactccgtcgtcgggtgtggggcggagaagtaaagggcgagttttcttcctagattccagtgggaaccaagaaaaggagttggcagctgtgtaaactggacctggggtgcggcctccgggaacaaaagaggtgataaatgcacagcagccgaggttctgcgtgctcctttggggccactacgaatccccgtgaatcaccccagcccgggcagagggccagaaatgatgaaaatgcagattcatggcttccactccagccctacaagatcaccaaccgtatctggcagtacccaggaatctgcattctcgacaagcgtccgcgccgacggggctagtgaagtttgagaacaattgcttcctacccagccgctccgctatcacctaggtagcacggccgctgcggctgaggctgtgactgcggctgcggctgggccgcgcctcaaccgagcttggtcctttcctttggtcccgccccgctgctcagcgcggattggtggcgggacgcaaatctggcgctgattgggcggcggcagagtcgctcgtgaagattgtagggttcgggtgctctagagtgctaaatttatcttcagaccggcgaccgcgccagccgcgaatcggatctctatggagatggcctaggcgatatccctgagctgagagcatcaccctgtccccgaatccttctttcctctctgttttgtttttcattcccctccctctctcccctccccctccagtccacgacgactggctgttgaccctgttcaggcctcggtgaagagtgcatttcaagctgccaaggtggagagagggattacagaaaggagaacaccttatttcaggtatcttatcctctaccccttaataggagaaccattttgactcaagatctaacatgagaatacaaaacttactctatagccaggttataaagtttaaatcaaaagtagctatatttggacagacataatttgtatgccttgatttatagagttaatag

SEQ ID NO: 419870 - DNA, 363 bp, Homo sapiens
ctgcttagatccagaaagaataaacccatcttacgggtttatagttagttctgcttgttactgtatctaattttaatttttctcattctaggcttttggttactccccttcccaccccatcccttaattttattcttttgaagagtgcatttcaagctgccaaggtggagagagggattacagaaaggagaacaccttatttcaggtatcttatcctctaccccttaataggagaaccattttgactcaagatctaacatgagaatacaaaacttactctatagccaggttataaagtttaaatcaaaagtagctatatttggacagacataatttgtatgccttgatttatagagttaatag

SEQ ID NO: 419871 - DNA, 4775 bp, Homo sapiens
gggacgctgcggtgccgctttccctatccagtcctgttcccgcggctccccagcctaccccgggccgaccaagaggtccggcggggtctgcgccgcatcagcgcccgctcgtcaggcctagccctccgcacagccaaggccgaccagacctctagacactccgtcgtcgggtgtggggcggagaagtaaagggcgagttttcttcctagattccagtgggaaccaagaaaaggagttggcagctgtgtaaactggacctggggtgcggcctccgggaacaaaagaggtgataaatgcacagcagccgaggttctgcgtgctcctttggggccactacgaatccccgtgaatcaccccagcccgggcagagggccagaaatgatgaaaatgcagattcatggcttccactccagccctacaagatcaccaaccgtatctggcagtacccaggaatctgcattctcgacaagcgtccgcgccgacggggctagtgaagtttgagaacaattgcttcctacccagccgctccgctatcacctaggtagcacggccgctgcggctgaggctgtgactgcggctgcggctgggccgcgcctcaaccgagcttggtcctttcctttggtcccgccccgctgctcagcgcggattggtggcgggacgcaaatctggcgctgattgggcggcggcagagtcgctcgtgaagattgtagggttcgggtgctctagagtgctaaatttatcttcagaccggcgaccgcgccagccgcgaatcggatctctatggagatggcctaggcgatatccctgagctgagagcatcaccctgtccccgaatccttctttcctctctgttttgtttttcattcccctccctctctcccctccccctccagtccacgacgactggctgttgaccctgttcaggcctcggtgaaggtgagaagcagagccgccgccgcggctaagcggtgcgctctgaaatggccgcttcctggaactgcctaagatggcggtcgcgggctctgctgtggaccgcggcgctgctgtgcagcccagccgcggcaaaatccgttctctccatcgctgatggagatgaaatagagagatggtgttgggtgctgagacgttttcatgtggtcgttagcgcaggcggccgcccggggacgcgagagaagacctgaggcgagggtgggctgcgactggtagggagccccccagtcgtggcaatctgtgggcagcgcgcacctgtgacagggaggagctgagggatagttggccctggctgcacatccaggtgaccgtttaaaaaagcatttaggtgttggaaggagcatctgttcccacctttttggctggcctgcactcagatcctgtcctcctgaccctgagggtattgttcccagccggaaccgcccgaagataggggagaaaggattgtgatacttgtcagtttaaccggaaggagactaaagacggaagttttccccgctcttcagggagtggaaaggaaactttactctcaaaggagtccagattctttgtcctcgagaaattcggggaaacaccttcgaagaggcttttggttactccccttcccaccccatcccttaattttattcttttgaagagtgcatttcaagctgccaaggtggagagagggattacagaaaggagaacaccttatttcaggtcctggttaagtcgtcacctgttgtataaatagaatgcagagttatctgtaaaaatatacattactttcattgagtcttaatttggataatataaacgtttatataatttaagtccagagaaacagtacctaacttttgatatacaatttattcttcattgttaacgcataacatttaggatacagtagaattatgtatctcgcaaaacttggaactgtgtgtgtgtttaattcacttcttcagaattgttgctagccctgaagggacttcagatatataatagtatcaacaactaatacatctaatgacagtaggcatcaaaagctaaaagagatttcacaatactacataccatgagacagggctgataaattatggcccatgctgtctggttttgtacgtaaagttttattggaacacacctgtgtccattctttcatgtattgtctatggctgctgtcatgttacaactacagagttgagtagttgcaacagagactatatggcccttgaccaaaaaaagcctgccaacccctgccatgggacatattcttcagggtccctttcttaaaaatatgtataacaactcttaataatttattggctcagtgattcccaaattatgttttatagaatattaatattctctaagttaataaatgttttgagaaaatgattgatgctaatattggtttttctttatggttgattttaatatgtttatttaaatatgagattaagactgctaaactcatttctatagcttttatttttatgtgataatctacctttaagaaaaggtgtaccatacctgagagcaccaggaagtcgcatgagagatcacctgatacatgaacgtatgatgttccatctgcgcattgatgaataggcagcatttacaaattaactgatgtgttgctgtatatcatctctttgatgattgctcctcttctttgtatcctgtcttataatttcaacacatttgcgatactcaatgtctattctaaattaaccatgttttgtaccacaaactcattgcccatggatctgttgctgaaacaaggaagtcttaaacaagaagtggaatctttctgttatcagattgtgtctgaatcaaatgatcagaaggttggaatattacaaagtgaagataagcagttgcaaccttcagtttctaaaaaatcagaaggtgagctttccagggtcaaatttatatccaattccaacaaaataacatttagtaaaaaaccaaaaagaagaaaatatgatgaaagttatttgtcttttggatttacttacttcggaaatagagatgcacctcatgctcagtgtgtattatgtaagaaaattttatcaaatagctctttagcccctagtaagcttcgaagacatttggaaactaaacatgctgcatataaagacaaagacataagctttttcaagcaacatctcgattcacctgaaaataataaacccccaacacctaaaattgtgaatacagataatgaaagtgctacagaagcatcatacaatgtaagttaccatatagcgctgagtggagaggctcatactattggagaattgcttatcaaaccttgtgcaaaagatgtagtgatgcggatgtttgatgaacaatatagtaaaaaaatagatgcagtacagctatcaaacagtactgttgcacgtcgaattaaggatctagctgctgacattgaagaagagcttgtttgtagactgaaaatttgcgatgggttttcactgcaactagatgaatcagctgatgtttcaggacttgctgtgctgcttgtgtttgttcgttataggtttaataagtctattgaggaagacctactcctgtgtgaatctttgcaaagtaatgctaccggtgaagaaatattcaactgtatcaacagttttatgcagaaacatgaaattgaatgggaaaaatgtgttgatgtttgtagtgatgcttctagggcagtggatgggaaaattgccgaagctgtcaccttaataaaatatgtggctcccgaaagcaccagtagtcactgcctattatacagacatgcactggcagttaaaataatgcctacatctctaaaaaatgtgctagaccaggcagtacaaatcatcaattatattaaagctcgaccacatcaatccagactattaaaaattttatgtgaggaaatgggtgctcagcacacagcacttcttctaaatacagaggtgaggtggctttctcgaggtaaagttcttgtaagactttttgaacttcgtcgtgaacttttggttttcatggattctgcttttcgactatctgattgtttaacaaattcatcttggctgctaagacttgcatatcttgcagatatttttactaaattaaatgaagttaatttgtcaatgcaaggaaaaaatgtgaccgtttttacagtatttgataaaatgtcgtcattgttaagaaaattggaattttgggcctcatctgtagaagaagaaaactttgattgttttcctacactcagtgattttttgactgaaattaattctacagttgataaagatatttgcagtgccattgtgcagcacctaaggggtttgcgcgctactctgttaaaatactttcctgtaacaaatgacaataatgcttgggttagaaatccatttacagttactgttaaaccagcttcattagtagcacgggactatgagagcctgattgatttaacatctgattctcaagtgaagcaaaattttagtgaactttcactaaatgatttttggagtagcctaattcaggaatacccaagcattgcaaggcgtgcagtgcgtgtacttcttccttttgctacaatgcacctgtgtgaaacggggttttcatattacgctgcaacaaaaacaaaatataggaaaagacttgatgctgcacctcatatgcgaatccgacttagcaatattacacctaatattaagcggatatgtgataaaaagacacaaaaacactgttctcattaaaattggaggagtttgcatgtctcatgataaccaaatgtaagatgaaaataaaagatgatttacttc

SEQ ID NO: 419872 - DNA, 4868 bp, Homo sapiens
gggacgctgcggtgccgctttccctatccagtcctgttcccgcggctccccagcctaccccgggccgaccaagaggtccggcggggtctgcgccgcatcagcgcccgctcgtcaggcctagccctccgcacagccaaggccgaccagacctctagacactccgtcgtcgggtgtggggcggagaagtaaagggcgagttttcttcctagattccagtgggaaccaagaaaaggagttggcagctgtgtaaactggacctggggtgcggcctccgggaacaaaagaggtgataaatgcacagcagccgaggttctgcgtgctcctttggggccactacgaatccccgtgaatcaccccagcccgggcagagggccagaaatgatgaaaatgcagattcatggcttccactccagccctacaagatcaccaaccgtatctggcagtacccaggaatctgcattctcgacaagcgtccgcgccgacggggctagtgaagtttgagaacaattgcttcctacccagccgctccgctatcacctaggtagcacggccgctgcggctgaggctgtgactgcggctgcggctgggccgcgcctcaaccgagcttggtcctttcctttggtcccgccccgctgctcagcgcggattggtggcgggacgcaaatctggcgctgattgggcggcggcagagtcgctcgtgaagattgtagggttcgggtgctctagagtgctaaatttatcttcagaccggcgaccgcgccagccgcgaatcggatctctatggagatggcctaggcgatatccctgagctgagagcatcaccctgtccccgaatccttctttcctctctgttttgtttttcattcccctccctctctcccctccccctccagtccacgacgactggctgttgaccctgttcaggcctcggtgaaggtgagaagcagagccgccgccgcggctaagcggtgcgctctgaaatggccgcttcctggaactgcctaagatggcggtcgcgggctctgctgtggaccgcggcgctgctgtgcagcccagccgcggcaaaatccgttctctccatcgctgatggagatgaaatagagagatggtgttgggtgctgagacgttttcatgtggtcgttagcgcaggcggccgcccggggacgcgagagaagacctgaggcgagggtgggctgcgactggtagggagccccccagtcgtggcaatctgtgggcagcgcgcacctgtgacagggaggagctgagggatagttggccctggctgcacatccaggtgaccgtttaaaaaagcatttaggtgttggaaggagcatctgttcccacctttttggctggcctgcactcagatcctgtcctcctgaccctgagggtattgttcccagccggaaccgcccgaagataggggagaaaggattgtgatacttgtcagtttaaccggaaggagactaaagacggaagttttccccgctcttcagggagtggaaaggaaactttactctcaaaggagtccagattctttgtcctcgagaaattcggggaaacaccttcgaagaggcttttggttactccccttcccaccccatcccttaattttattcttttgaagagtgcatttcaagctgccaaggtggagagagggattacagaaaggagaacaccttatttcaggtcctggttaagtcgtcacctgttgtataaatagaatgcagagttatctgtaaaaatatacattactttcattgagtcttaatttggataatataaacgtttatataatttaagtccagagaaacagtacctaacttttgatatacaatttattcttcattgttaacgcataacatttaggatacagtagaattatgtatctcgcaaaacttggaactgtgtgtgtgtttaattcacttcttcagaattgttgctagccctgaagggacttcagatatataatagtatcaacaactaatacatctaatgacagtaggcatcaaaagctaaaagagatttcacaatactacataccatgagacagggctgataaattatggcccatgctgtctggttttgtacgtaaagttttattggaacacacctgtgtccattctttcatgtattgtctatggctgctgtcatgttacaactacagagttgagtagttgcaacagagactatatggcccttgaccaaaaaaagcctgccaacccctgccatgggacatattcttcagggtccctttcttaaaaatatgtataacaactcttaataatttattggctcagtgattcccaaattatgttttatagaatattaatattctctaagttaataaatgttttgagaaaatgattgatgctaatattggtttttctttatggttgattttaatatgtttatttaaatatgagattaagactgctaaactcatttctatagcttttatttttatgtgataatctacctttaagaaaaggtgtaccatacctgagagcaccaggaagtcgcatgagagatcacctgatacatgaacgtatgatgttccatctgcgcattgatgaataggcagcatttacaaattaactgatgtgttgctgtatatcatctctttgatgattgctcctcttctttgtatcctgtcttataatttcaacacatttgcgatactcaatgtctattctaaattaaccatgttttgtaccacaaactcattgcccatggatctgttgctgaaacaaggaagtcttaaacaagaagtggaatctttctgttatcagattgtgtctgaatcaaatgatcagaaggttggaatattacaaagtgaagataagcagttgcaaccttcagtttctaaaaaatcagaaggtgagctttccagggtcaaatttatatccaattccaacaaaataacatttagtaaaaaaccaaaaagaagaaaatatgatgaaagttatttgtcttttggatttacttacttcggaaatagagatgcacctcatgctcagtgtgtattatgtaagaaaattttatcaaatagctctttagcccctagtaagcttcgaagacatttggaaactaaacatgctgcatataaagacaaagacataagctttttcaagcaacatctcgattcacctgaaaataataaacccccaacacctaaaattgtgaatacagataatgaaagtgctacagaagcatcatacaatgtaagttaccatatagcgctgagtggagaggctcatactattggagaattgcttatcaaaccttgtgcaaaagatgtagtgatgcggatgtttgatgaacaatatagtaaaaaaatagatgcagtacagctatcaaacagtactgttgcacgtcgaattaaggatctagctgctgacattgaagaagagcttgtttgtagactgaaaatttgcgatgggttttcactgcaactagatgaatcagctgatgtttcaggacttgctgtgctgcttgtgtttgttcgttataggtttaataagtctattgaggaagacctactcctgtgtgaatctttgcaaagtaatgctaccggtgaagaaatattcaactgtatcaacagttttatgcagaaacatgaaattgaatgggaaaaatgtgttgatgtttgtagtgatgcttctagggcagtggatgggaaaattgccgaagctgtcaccttaataaaatatgtggctcccgaaagcaccagtagtcactgcctattatacagacatgcactggcagttaaaataatgcctacatctctaaaaaatgtgctagaccaggcagtacaaatcatcaattatattaaagctcgaccacatcaatccagactattaaaaattttatgtgaggaaatgggtgctcagcacacagcacttcttctaaatacagaggtgaggtggctttctcgaggtaaagttcttgtaagactttttgaacttcgtcgtgaacttttggttttcatggattctgcttttcgactatctgattgtttaacaaattcatcttggctgctaagacttgcatatcttgcagatatttttactaaattaaatgaagttaatttgtcaatgcaaggaaaaaatgtgaccgtttttacagtatttgataaaatgtcgtcattgttaagaaaattggaattttgggcctcatctgtagaagaagaaaactttgattgttttcctacactcagtgattttttgactgaaattaattctacagttgataaagatatttgcagtgccattgtgcagcacctaaggggtttgcgcgctactctgttaaaatactttcctgtaacaaatgacaataatgcttgggttagaaatccatttacagttactgttaaaccagcttcattagtagcacgggactatgagagcctgattgatttaacatctgattctcaagtgaagcaaaattttagtgaactttcactaaatgatttttggagtagcctaattcaggaatacccaagcattgcaaggcgtgcagtgcgtgtacttcttccttttgctacaatgcacctgtgtgaaacggggttttcatattacgctgcaacaaaaacaaaatataggaaaagacttgatgctgcacctcatatgcgaatccgacttagcaatattacacctaatattaagcggatatgtgataaaaagacacaaaaacactgttctcattaaaattggaggagtttgcatgtctcatgataaccaaatgtaagatgaaaataaaagatgatttacttcatctctggtatttgggggatttaaataaaatgattccatttttttatactatttagattttaagaaggctaaagaatcaaacgttttaaacat

SEQ ID NO: 419873 - DNA, 3433 bp, Homo sapiens
gggacgctgcggtgccgctttccctatccagtcctgttcccgcggctccccagcctaccccgggccgaccaagaggtccggcggggtctgcgccgcatcagcgcccgctcgtcaggcctagccctccgcacagccaaggccgaccagacctctagacactccgtcgtcgggtgtggggcggagaagtaaagggcgagttttcttcctagattccagtgggaaccaagaaaaggagttggcagctgtgtaaactggacctggggtgcggcctccgggaacaaaagaggtgataaatgcacagcagccgaggttctgcgtgctcctttggggccactacgaatccccgtgaatcaccccagcccgggcagagggccagaaatgatgaaaatgcagattcatggcttccactccagccctacaagatcaccaaccgtatctggcagtacccaggaatctgcattctcgacaagcgtccgcgccgacggggctagtgaagtttgagaacaattgcttcctacccagccgctccgctatcacctaggtagcacggccgctgcggctgaggctgtgactgcggctgcggctgggccgcgcctcaaccgagcttggtcctttcctttggtcccgccccgctgctcagcgcggattggtggcgggacgcaaatctggcgctgattgggcggcggcagagtcgctcgtgaagattgtagggttcgggtgctctagagtgctaaatttatcttcagaccggcgaccgcgccagccgcgaatcggatctctatggagatggcctaggcgatatccctgagctgagagcatcaccctgtccccgaatccttctttcctctctgttttgtttttcattcccctccctctctcccctccccctccagtccacgacgactggctgttgaccctgttcaggcctcggtgaaggcttttggttactccccttcccaccccatcccttaattttattcttttgaagagtgcatttcaagctgccaaggtggagagagggattacagaaaggagaacaccttatttcagaaaaggtgtaccatacctgagagcaccaggaagtcgcatgagagatcacctgatacatgaacgtatgatgttccatctgcgcattgatgaataggcagcatttacaaattaactgatgtgttgctgtatatcatctctttgatgattgctcctcttctttgtatcctgtcttataatttcaacacatttgcgatactcaatgtctattctaaattaaccatgttttgtaccacaaactcattgcccatggatctgttgctgaaacaaggaagtcttaaacaagaagtggaatctttctgttatcagattgtgtctgaatcaaatgatcagaaggttggaatattacaaagtgaagataagcagttgcaaccttcagtttctaaaaaatcagaaggtgagctttccagggtcaaatttatatccaattccaacaaaataacatttagtaaaaaaccaaaaagaagaaaatatgatgaaagttatttgtcttttggatttacttacttcggaaatagagatgcacctcatgctcagtgtgtattatgtaagaaaattttatcaaatagctctttagcccctagtaagcttcgaagacatttggaaactaaacatgctgcatataaagacaaagacataagctttttcaagcaacatctcgattcacctgaaaataataaacccccaacacctaaaattgtgaatacagataatgaaagtgctacagaagcatcatacaatgtaagttaccatatagcgctgagtggagaggctcatactattggagaattgcttatcaaaccttgtgcaaaagatgtagtgatgcggatgtttgatgaacaatatagtaaaaaaatagtgggggggtggggttggggggtggggtagagagggtgtggggggtgggggagctgctgacattgaagaagagcttgtttgtagactgaaaatttgcgatgggttttcactgcaactagatgaatcagctgatgtttcaggacttgctgtgctgcttgtgtttgttcgttataggtttaataagtctattgaggaagacctactcctgtgtgaatctttgcaaagtaatgctaccggtgaagaaatattcaactgtatcaacagttttatgcagaaacatgaaattgaatgggaaaaatgtgttgatgtttgtagtgatgcttctagggcagtggatgggaaaattgccgaagctgtcaccttaataaaatatgtggctcccgaaagcaccagtagtcactgcctattatacagacatgcactggcagttaaaataatgcctacatctctaaaaaatgtgctagaccaggcagtacaaatcatcaattatattaaagctcgaccacatcaatccagactattaaaaattttatgtgaggaaatgggtgctcagcacacagcacttcttctaaatacagaggtgaggtggctttctcgaggtaaagttcttgtaagactttttgaacttcgtcgtgaacttttggttttcatggattctgcttttcgactatctgattgtttaacaaattcatcttggctgctaagacttgcatatcttgcagatatttttactaaattaaatgaagttaatttgtcaatgcaaggaaaaaatgtgaccgtttttacagtatttgataaaatgtcgtcattgttaagaaaattggaattttgggcctcatctgtagaagaagaaaactttgattgttttcctacactcagtgattttttgactgaaattaattctacagttgataaagatatttgcagtgccattgtgcagcacctaaggggtttgcgcgctactctgttaaaatactttcctgtaacaaatgacaataatgcttgggttagaaatccatttacagttactgttaaaccagcttcattagtagcacgggactatgagagcctgattgatttaacatctgattctcaagtgaagcaaaattttagtgaactttcactaaatgatttttggagtagcctaattcaggaatacccaagcattgcaaggcgtgcagtgcgtgtacttcttccttttgctacaatgcacctgtgtgaaacggggttttcatattacgctgcaacaaaaacaaaatataggaaaagacttgatgctgcacctcatatgcgaatccgacttagcaatattacacctaatattaagcggatatgtgataaaaagacacaaaaacactgttctcattaaaattggaggagtttgcatgtctcatgataaccaaatgtaagatgaaaataaaagatgatttacttcatctctggtatttgggggatttaaataaaatgattccatttttttatactatttagattttaagaaggctaaagaatcaaacgttttaaacat

SEQ ID NO: 419874 - DNA, 1927 bp, Homo sapiens
gggacgctgcggtgccgctttccctatccagtcctgttcccgcggctccccagcctaccccgggccgaccaagaggtccggcggggtctgcgccgcatcagcgcccgctcgtcaggcctagccctccgcacagccaaggccgaccagacctctagacactccgtcgtcgggtgtggggcggagaagtaaagggcgagttttcttcctagattccagtgggaaccaagaaaaggagttggcagctgtgtaaactggacctggggtgcggcctccgggaacaaaagaggtgataaatgcacagcagccgaggttctgcgtgctcctttggggccactacgaatccccgtgaatcaccccagcccgggcagagggccagaaatgatgaaaatgcagattcatggcttccactccagccctacaagatcaccaaccgtatctggcagtacccaggaatctgcattctcgacaagcgtccgcgccgacggggctagtgaagtttgagaacaattgcttcctacccagccgctccgctatcacctaggtagcacggccgctgcggctgaggctgtgactgcggctgcggctgggccgcgcctcaaccgagcttggtcctttcctttggtcccgccccgctgctcagcgcggattggtggcgggacgcaaatctggcgctgattgggcggcggcagagtcgctcgtgaagattgtagggttcgggtgctctagagtgctaaatttatcttcagaccggcgaccgcgccagccgcgaatcggatctctatggagatggcctaggcgatatccctgagctgagagcatcaccctgtccccgaatccttctttcctctctgttttgtttttcattcccctccctctctcccctccccctccagtccacgacgactggctgttgaccctgttcaggcctcggtgaaggtgagaagcagagccgccgccgcggctaagcggtgcgctctgaaatggccgcttcctggaactgcctaagatggcggtcgcgggctctgctgtggaccgcggcgctgctgtgcagcccagccgcggcaaaatccgttctctccatcgctgatggagatgaaatagagagatggtgttgggtgctgagacgttttcatgtggtcgttagcgcaggcggccgcccggggacgcgagagaagacctgaggcgagggtgggctgcgactggtagggagccccccagtcgtggcaatctgtgggcagcgcgcacctgtgacagggaggagctgagggatagttggccctggctgcacatccaggtgaccgtttaaaaaagcatttaggtgttggaaggagcatctgttcccacctttttggctggcctgcactcagatcctgtcctcctgaccctgagggtattgttcccagccggaaccgcccgaagataggggagaaaggattgtgatacttgtcagtttaaccggaaggagactaaagacggaagttttccccgctcttcagggagtggaaaggaaactttactctcaaaggagtccagattctttgtcctcgagaaattcggggaaacaccttcgaagaggtggggttgaggaccttctttctgaaaacaaaagcttcctactcttctgtgtcctctggcaacgagagggatcctgatcttttacgtgaaccagcagctccacagagttctccgttgcaaaatccaaaaggagactgtggaaggagaatctgcttttttgctcccaataagaagcagggctttatgctgttgctagtatgagaccctcgactttctggcagttataatccattgttcatccgtttcgctgcataacccaactcctagtaacgagattttttagtagttggggaattaaaagtattcaggaacacccaagtaatggctagacacatgggctatgcagtcaaac

SEQ ID NO: 419875 - DNA, 3339 bp, Homo sapiens
gggacgctgcggtgccgctttccctatccagtcctgttcccgcggctccccagcctaccccgggccgaccaagaggtccggcggggtctgcgccgcatcagcgcccgctcgtcaggcctagccctccgcacagccaaggccgaccagacctctagacactccgtcgtcgggtgtggggcggagaagtaaagggcgagttttcttcctagattccagtgggaaccaagaaaaggagttggcagctgtgtaaactggacctggggtgcggcctccgggaacaaaagaggtgataaatgcacagcagccgaggttctgcgtgctcctttggggccactacgaatccccgtgaatcaccccagcccgggcagagggccagaaatgatgaaaatgcagattcatggcttccactccagccctacaagatcaccaaccgtatctggcagtacccaggaatctgcattctcgacaagcgtccgcgccgacggggctagtgaagtttgagaacaattgcttcctacccagccgctccgctatcacctaggtagcacggccgctgcggctgaggctgtgactgcggctgcggctgggccgcgcctcaaccgagcttggtcctttcctttggtcccgccccgctgctcagcgcggattggtggcgggacgcaaatctggcgctgattgggcggcggcagagtcgctcgtgaagattgtagggttcgggtgctctagagtgctaaatttatcttcagaccggcgaccgcgccagccgcgaatcggatctctatggagatggcctaggcgatatccctgagctgagagcatcaccctgtccccgaatccttctttcctctctgttttgtttttcattcccctccctctctcccctccccctccagtccacgacgactggctgttgaccctgttcaggcctcggtgaaggcttttggttactccccttcccaccccatcccttaattttattcttttgaagagtgcatttcaagctgccaaggtggagagagggattacagaaaggagaacaccttatttcagaaaaggtgtaccatacctgagagcaccaggaagtcgcatgagagatcacctgatacatgaacgtatgatgttccatctgcgcattgatgaataggcagcatttacaaattaactgatgtgttgctgtatatcatctctttgatgattgctcctcttctttgtatcctgtcttataatttcaacacatttgcgatactcaatgtctattctaaattaaccatgttttgtaccacaaactcattgcccatggatctgttgctgaaacaaggaagtcttaaacaagaagtggaatctttctgttatcagattgtgtctgaatcaaatgatcagaaggttggaatattacaaagtgaagataagcagttgcaaccttcagtttctaaaaaatcagaaggtgagctttccagggtcaaatttatatccaattccaacaaaataacatttagtaaaaaaccaaaaagaagaaaatatgatgaaagttatttgtcttttggatttacttacttcggaaatagagatgcacctcatgctcagtgtgtattatgtaagaaaattttatcaaatagctctttagcccctagtaagcttcgaagacatttggaaactaaacatgctgcatataaagacaaagacataagctttttcaagcaacatctcgattcacctgaaaataataaacccccaacacctaaaattgtgaatacagataatgaaagtgctacagaagcatcatacaatgtaagttaccatatagcgctgagtggagaggctcatactattggagaattgcttatcaaaccttgtgcaaaagatgtagtgatgcggatgtttgatgaacaatatagtaaaaaaatagatgcagtacagctatcaaacagtactgttgcacgtcgaattaaggatctagctgctgacattgaagaagagcttgtttgtagactgaaaatttgcgatgggttttcactgcaactagatgaatcagctgatgtttcaggacttgctgtgctgcttgtgtttgttcgttataggtttaataagtctattgaggaagacctactcctgtgtgaatctttgcaaagtaatgctaccggtgaagaaatattcaactgtatcaacagttttatgcagaaacatgaaattgaatgggaaaaatgtgttgatgtttgtagtgatgcttctagggcagtggatgggaaaattgccgaagctgtcaccttaataaaatatgtggctcccgaaagcaccagtagtcactgcctattatacagacatgcactggcagttaaaataatgcctacatctctaaaaaatgtgctagaccaggcagtacaaatcatcaattatattaaagctcgaccacatcaatccagactattaaaaattttatgtgaggaaatgggtgctcagcacacagcacttcttctaaatacagaggtgaggtggctttctcgaggtaaagttcttgtaagactttttgaacttcgtcgtgaacttttggttttcatggattctgcttttcgactatctgattgtttaacaaattcatcttggctgctaagacttgcatatcttgcagatatttttactaaattaaatgaagttaatttgtcaatgcaaggaaaaaatgtgaccgtttttacagtatttgataaaatgtcgtcattgttaagaaaattggaattttgggcctcatctgtagaagaagaaaactttgattgttttcctacactcagtgattttttgactgaaattaattctacagttgataaagatatttgcagtgccattgtgcagcacctaaggggtttgcgcgctactctgttaaaatactttcctgtaacaaatgacaataatgcttgggttagaaatccatttacagttactgttaaaccagcttcattagtagcacgggactatgagagcctgattgatttaacatctgattctcaagtgaagcaaaattttagtgaactttcactaaatgatttttggagtagcctaattcaggaatacccaagcattgcaaggcgtgcagtgcgtgtacttcttccttttgctacaatgcacctgtgtgaaacggggttttcatattacgctgcaacaaaaacaaaatataggaaaagacttgatgctgcacctcatatgcgaatccgacttagcaatattacacctaatattaagcggatatgtgataaaaagacacaaaaacactgttctcattaaaattggaggagtttgcatgtctcatgataaccaaatgtaagatgaaaataaaagatgatttacttc

SEQ ID NO: 419876 - DNA, 4136 bp, Homo sapiens
gggacgctgcggtgccgctttccctatccagtcctgttcccgcggctccccagcctaccccgggccgaccaagaggtccggcggggtctgcgccgcatcagcgcccgctcgtcaggcctagccctccgcacagccaaggccgaccagacctctagacactccgtcgtcgggtgtggggcggagaagtaaagggcgagttttcttcctagattccagtgggaaccaagaaaaggagttggcagctgtgtaaactggacctggggtgcggcctccgggaacaaaagaggtgataaatgcacagcagccgaggttctgcgtgctcctttggggccactacgaatccccgtgaatcaccccagcccgggcagagggccagaaatgatgaaaatgcagattcatggcttccactccagccctacaagatcaccaaccgtatctggcagtacccaggaatctgcattctcgacaagcgtccgcgccgacggggctagtgaagtttgagaacaattgcttcctacccagccgctccgctatcacctaggtagcacggccgctgcggctgaggctgtgactgcggctgcggctgggccgcgcctcaaccgagcttggtcctttcctttggtcccgccccgctgctcagcgcggattggtggcgggacgcaaatctggcgctgattgggcggcggcagagtcgctcgtgaagattgtagggttcgggtgctctagagtgctaaatttatcttcagaccggcgaccgcgccagccgcgaatcggatctctatggagatggcctaggcgatatccctgagctgagagcatcaccctgtccccgaatccttctttcctctctgttttgtttttcattcccctccctctctcccctccccctccagtccacgacgactggctgttgaccctgttcaggcctcggtgaaggcttttggttactccccttcccaccccatcccttaattttattcttttgaagagtgcatttcaagctgccaaggtggagagagggattacagaaaggagaacaccttatttcaggtcctggttaagtcgtcacctgttgtataaatagaatgcagagttatctgtaaaaatatacattactttcattgagtcttaatttggataatataaacgtttatataatttaagtccagagaaacagtacctaacttttgatatacaatttattcttcattgttaacgcataacatttaggatacagtagaattatgtatctcgcaaaacttggaactgtgtgtgtgtttaattcacttcttcagaattgttgctagccctgaagggacttcagatatataatagtatcaacaactaatacatctaatgacagtaggcatcaaaagctaaaagagatttcacaatactacataccatgagacagggctgataaattatggcccatgctgtctggttttgtacgtaaagttttattggaacacacctgtgtccattctttcatgtattgtctatggctgctgtcatgttacaactacagagttgagtagttgcaacagagactatatggcccttgaccaaaaaaagcctgccaacccctgccatgggacatattcttcagggtccctttcttaaaaatatgtataacaactcttaataatttattggctcagtgattcccaaattatgttttatagaatattaatattctctaagttaataaatgttttgagaaaatgattgatgctaatattggtttttctttatggttgattttaatatgtttatttaaatatgagattaagactgctaaactcatttctatagcttttatttttatgtgataatctacctttaagaaaaggtgtaccatacctgagagcaccaggaagtcgcatgagagatcacctgatacatgaacgtatgatgttccatctgcgcattgatgaataggcagcatttacaaattaactgatgtgttgctgtatatcatctctttgatgattgctcctcttctttgtatcctgtcttataatttcaacacatttgcgatactcaatgtctattctaaattaaccatgttttgtaccacaaactcattgcccatggatctgttgctgaaacaaggaagtcttaaacaagaagtggaatctttctgttatcagattgtgtctgaatcaaatgatcagaaggttggaatattacaaagtgaagataagcagttgcaaccttcagtttctaaaaaatcagaaggtgagctttccagggtcaaatttatatccaattccaacaaaataacatttagtaaaaaaccaaaaagaagaaaatatgatgaaagttatttgtcttttggatttacttacttcggaaatagagatgcacctcatgctcagtgtgtattatgtaagaaaattttatcaaatagctctttagcccctagtaagcttcgaagacatttggaaactaaacatgctgcatataaagacaaagacataagctttttcaagcaacatctcgattcacctgaaaataataaacccccaacacctaaaattgtgaatacagataatgaaagtgctacagaagcatcatacaatgtaagttaccatatagcgctgagtggagaggctcatactattggagaattgcttatcaaaccttgtgcaaaagatgtagtgatgcggatgtttgatgaacaatatagtaaaaaaatagatgcagtacagctatcaaacagtactgttgcacgtcgaattaaggatctagctgctgacattgaagaagagcttgtttgtagactgaaaatttgcgatgggttttcactgcaactagatgaatcagctgatgtttcaggacttgctgtgctgcttgtgtttgttcgttataggtttaataagtctattgaggaagacctactcctgtgtgaatctttgcaaagtaatgctaccggtgaagaaatattcaactgtatcaacagttttatgcagaaacatgaaattgaatgggaaaaatgtgttgatgtttgtagtgatgcttctagggcagtggatgggaaaattgccgaagctgtcaccttaataaaatatgtggctcccgaaagcaccagtagtcactgcctattatacagacatgcactggcagttaaaataatgcctacatctctaaaaaatgtgctagaccaggcagtacaaatcatcaattatattaaagctcgaccacatcaatccagactattaaaaattttatgtgaggaaatgggtgctcagcacacagcacttcttctaaatacagaggtgaggtggctttctcgaggtaaagttcttgtaagactttttgaacttcgtcgtgaacttttggttttcatggattctgcttttcgactatctgattgtttaacaaattcatcttggctgctaagacttgcatatcttgcagatatttttactaaattaaatgaagttaatttgtcaatgcaaggaaaaaatgtgaccgtttttacagtatttgataaaatgtcgtcattgttaagaaaattggaattttgggcctcatctgtagaagaagaaaactttgattgttttcctacactcagtgattttttgactgaaattaattctacagttgataaagatatttgcagtgccattgtgcagcacctaaggggtttgcgcgctactctgttaaaatactttcctgtaacaaatgacaataatgcttgggttagaaatccatttacagttactgttaaaccagcttcattagtagcacgggactatgagagcctgattgatttaacatctgattctcaagtgaagcaaaattttagtgaactttcactaaatgatttttggagtagcctaattcaggaatacccaagcattgcaaggcgtgcagtgcgtgtacttcttccttttgctacaatgcacctgtgtgaaacggggttttcatattacgctgcaacaaaaacaaaatataggaaaagacttgatgctgcacctcatatgcgaatccgacttagcaatattacacctaatattaagcggatatgtgataaaaagacacaaaaacactgttctcattaaaattggaggagtttgcatgtctcatgataaccaaatgtaagatgaaaataaaagatgatttacttc

SEQ ID NO: 419877 - DNA, 4720 bp, Homo sapiens
gggacgctgcggtgccgctttccctatccagtcctgttcccgcggctccccagcctaccccgggccgaccaagaggtccggcggggtctgcgccgcatcagcgcccgctcgtcaggcctagccctccgcacagccaaggccgaccagacctctagacactccgtcgtcgggtgtggggcggagaagtaaagggcgagttttcttcctagattccagtgggaaccaagaaaaggagttggcagctgtgtaaactggacctggggtgcggcctccgggaacaaaagaggtgataaatgcacagcagccgaggttctgcgtgctcctttggggccactacgaatccccgtgaatcaccccagcccgggcagagggccagaaatgatgaaaatgcagattcatggcttccactccagccctacaagatcaccaaccgtatctggcagtacccaggaatctgcattctcgacaagcgtccgcgccgacggggctagtgaagtttgagaacaattgcttcctacccagccgctccgctatcacctaggtagcacggccgctgcggctgaggctgtgactgcggctgcggctgggccgcgcctcaaccgagcttggtcctttcctttggtcccgccccgctgctcagcgcggattggtggcgggacgcaaatctggcgctgattgggcggcggcagagtcgctcgtgaagattgtagggttcgggtgctctagagtgctaaatttatcttcagaccggcgaccgcgccagccgcgaatcggatctctatggagatggcctaggcgatatccctgagctgagagcatcaccctgtccccgaatccttctttcctctctgttttgtttttcattcccctccctctctcccctccccctccagtccacgacgactggctgttgaccctgttcaggcctcggtgaaggtgagaagcagagccgccgccgcggctaagcggtgcgctctgaaatggccgcttcctggaactgcctaagatggcggtcgcgggctctgctgtggaccgcggcgctgctgtgcagcccagccgcggcaaaatccgttctctccatcgctgatggagatgaaatagagagatggtgttgggtgctgagacgttttcatgtggtcgttagcgcaggcggccgcccggggacgcgagagaagacctgaggcgagggtgggctgcgactggtagggagccccccagtcgtggcaatctgtgggcagcgcgcacctgtgacagggaggagctgagggatagttggccctggctgcacatccaggtgaccgtttaaaaaagcatttaggtgttggaaggagcatctgttcccacctttttggctggcctgcactcagatcctgtcctcctgaccctgagggtattgttcccagccggaaccgcccgaagataggggagaaaggattgtgatacttgtcagtttaaccggaaggagactaaagacggaagttttccccgctcttcagggagtggaaaggaaactttactctcaaaggagtccagattctttgtcctcgagaaattcggggaaacaccttcgaagaggcttttggttactccccttcccaccccatcccttaattttattcttttgaagagtgcatttcaagctgccaaggtggagagagggattacagaaaggagaacaccttatttcaggtcctggttaagtcgtcacctgttgtataaatagaatgcagagttatctgtaaaaatatacattactttcattgagtcttaatttggataatataaacgtttatataatttaagtccagagaaacagtacctaacttttgatatacaatttattcttcattgttaacgcataacatttaggatacagtagaattatgtatctcgcaaaacttggaactgtgtgtgtgtttaattcacttcttcagaattgttgctagccctgaagggacttcagatatataatagtatcaacaactaatacatctaatgacagtaggcatcaaaagccatgctgtctggttttgtacgtaaagttttattggaacacacctgtgtccattctttcatgtattgtctatggctgctgtcatgttacaactacagagttgagtagttgcaacagagactatatggcccttgaccaaaaaaagcctgccaacccctgccatgggacatattcttcagggtccctttcttaaaaatatgtataacaactcttaataatttattggctcagtgattcccaaattatgttttatagaatattaatattctctaagttaataaatgttttgagaaaatgattgatgctaatattggtttttctttatggttgattttaatatgtttatttaaatatgagattaagactgctaaactcatttctatagcttttatttttatgtgataatctacctttaagaaaaggtgtaccatacctgagagcaccaggaagtcgcatgagagatcacctgatacatgaacgtatgatgttccatctgcgcattgatgaataggcagcatttacaaattaactgatgtgttgctgtatatcatctctttgatgattgctcctcttctttgtatcctgtcttataatttcaacacatttgcgatactcaatgtctattctaaattaaccatgttttgtaccacaaactcattgcccatggatctgttgctgaaacaaggaagtcttaaacaagaagtggaatctttctgttatcagattgtgtctgaatcaaatgatcagaaggttggaatattacaaagtgaagataagcagttgcaaccttcagtttctaaaaaatcagaaggtgagctttccagggtcaaatttatatccaattccaacaaaataacatttagtaaaaaaccaaaaagaagaaaatatgatgaaagttatttgtcttttggatttacttacttcggaaatagagatgcacctcatgctcagtgtgtattatgtaagaaaattttatcaaatagctctttagcccctagtaagcttcgaagacatttggaaactaaacatgctgcatataaagacaaagacataagctttttcaagcaacatctcgattcacctgaaaataataaacccccaacacctaaaattgtgaatacagataatgaaagtgctacagaagcatcatacaatgtaagttaccatatagcgctgagtggagaggctcatactattggagaattgcttatcaaaccttgtgcaaaagatgtagtgatgcggatgtttgatgaacaatatagtaaaaaaatagatgcagtacagctatcaaacagtactgttgcacgtcgaattaaggatctagctgctgacattgaagaagagcttgtttgtagactgaaaatttgcgatgggttttcactgcaactagatgaatcagctgatgtttcaggacttgctgtgctgcttgtgtttgttcgttataggtttaataagtctattgaggaagacctactcctgtgtgaatctttgcaaagtaatgctaccggtgaagaaatattcaactgtatcaacagttttatgcagaaacatgaaattgaatgggaaaaatgtgttgatgtttgtagtgatgcttctagggcagtggatgggaaaattgccgaagctgtcaccttaataaaatatgtggctcccgaaagcaccagtagtcactgcctattatacagacatgcactggcagttaaaataatgcctacatctctaaaaaatgtgctagaccaggcagtacaaatcatcaattatattaaagctcgaccacatcaatccagactattaaaaattttatgtgaggaaatgggtgctcagcacacagcacttcttctaaatacagaggtgaggtggctttctcgaggtaaagttcttgtaagactttttgaacttcgtcgtgaacttttggttttcatggattctgcttttcgactatctgattgtttaacaaattcatcttggctgctaagacttgcatatcttgcagatatttttactaaattaaatgaagttaatttgtcaatgcaaggaaaaaatgtgaccgtttttacagtatttgataaaatgtcgtcattgttaagaaaattggaattttgggcctcatctgtagaagaagaaaactttgattgttttcctacactcagtgattttttgactgaaattaattctacagttgataaagatatttgcagtgccattgtgcagcacctaaggggtttgcgcgctactctgttaaaatactttcctgtaacaaatgacaataatgcttgggttagaaatccatttacagttactgttaaaccagcttcattagtagcacgggactatgagagcctgattgatttaacatctgattctcaagtgaagcaaaattttagtgaactttcactaaatgatttttggagtagcctaattcaggaatacccaagcattgcaaggcgtgcagtgcgtgtacttcttccttttgctacaatgcacctgtgtgaaacggggttttcatattacgctgcaacaaaaacaaaatataggaaaagacttgatgctgcacctcatatgcgaatccgacttagcaatattacacctaatattaagcggatatgtgataaaaagacacaaaaacactgttctcattaaaattggaggagtttgcatgtctcatgataaccaaatgtaagatgaaaataaaagatgatttacttc

SEQ ID NO: 419878 - DNA, 4266 bp, Homo sapiens
gacgttggcggcagaggcggaggcggacggggtcagcccaaagcagaggctcggccatgaacttacccgggacagcggcggcggcggaccttttggccatcttctcgcagagtgctccctgctaacggggacagattttaacattatggcagggaggcatcagaatcgtagttttcctcttccaggagttcagtcaagtggtcaagtacatgcatttggaaattgttcagacagtgatattttggaggaggatgctgaagtgtatgaacttcgatccagaggaaaagagaaagtccgaagaagtacatcaagagatagacttgacgacattatagtattaacaaaagatatacaagaaggagatacattaaatgcaatagcccttcagtactgttgtacggtagcagatatcaagagagttaacaatctcatcagtgatcaagacttttttgcccttaggtctatcaaaattccagtaaaaaagttcagttccttgaccgaaacactttgtcctccaaaaggaagacagacttcacgtcattcatctgttcaatactcttccgaacaacaggaaattttgccagctaatgattctcttgcttacagtgactcagctggtagctttttaaaagaagtagaccgagacatagaacaaatagtaaagtgtacagacaataagagagagaacctcaatgaggtagtatcggccttaacagcacaacaaatgcgttttgaacctgataacaaaaacactcaacgtaaagacccctattatggagcagactggggaatagggtggtggacagctgtagtgataatgttgatagtaggtataataacaccagtgttttatttgttgtattatgaaattttagctaaggtggatgttagtcatcattcaacagtggactcttcacatttacattcaaaaatcacacccccatcacagcagagagaaatggaaaatggaattgtgccaactaaaggaatacatttcagccaacaagatgatcataaactgtatagtcaagattctcagtcacctgctgctcaacaggaaacatagcaattagctcataatcaaatgttagtggtcacatgtgcatctggaatgtggtgaatcagttatatccaataatagcttcaaaggcagaatttagagagattgaggatgcttttgtttttaacaaaagggtttcacactttgaaaattttttgagcaactagttgttgatgttgagagcagttgatccataaatctggtgtgtgaatgtttcaagcagaaattaatttaaatgtgtgtttaggaagtacttaacttggaagatgtatcatttttcttaaaatgcatgtttaaattttatttttttaagtaatttttaaaaagtttattaatgttaaatttatgatgcagaatgatagcatcagatgtctgcagctgaaaaaaatttactactatgaacccccaaaatattcagttgcaagaaaatttgattctaaaattattcatggtaggatacgtaacacaccccttcaaaacttttaaaaaatacatttagcacatgtgctatgaaagcatacgtacaaagagaaaggggaaagtgatttataattcctacaacagaggccaagaaatagattaaaatattttcaagaccccaaaataatgtattatggttgggaagtcagtagaacactggaataggtgaagacctgacagtaatttttgtcttaagaatgctttctttaggacagaccctttaacctcacctctgtgcatctgtttttaaaatgattatatttgcctctgatatttgaaagcacttttgtagttttgatgatgaaaaatatattaaacgtgcatattaccattatttaggaaataattccttatatactgtgataaatcattgctgttacatacagtaacatgccttaattacatttaatgccttactgctttatgtaagtaaatccaagtttcagaattaaaaataagcattatttcatatggtccaatcagattcgttacataggctatataaatttgtctccattttcaccatcaagcacaaataattgggtcaaaactgcctttgaggtctgttgaagaaaatggttcattaagcaaaaaagagtagaggtattttatattagcagtaacagacaaattatttagtaatcccttaacctctgtttttcaaagagaaaatatccaatttagacttttttcctgatctctatatatagcatcaaattgggaaacaaaggccaaaggtgtatagattgcttgaaagggggtggtagtgcctctttttaagatctgttgagtcggctacagtctggctaagtaagaagcatttgcatactgattccatcatttaatctttaaaagtatgtgttttaaaaatgtaaccagaatgattcttcaatagaaatgagatttggtggagtctggattgcctgttttgtatataatatatacttaagatatataataccacctcattttctgggcattatttcctaattgttgatgtttcaggcttttgataagtcattttatatatttcaaatttaactcagaataagtaaatatttatggcaaatgcagttttatgtactttcaggagaagaccatcaggaaaagacaggacaaagaagtcaaacattaaagcccttgcaaatattagaggaccttagacaattaccaaaaagtgtttaatagggaagttgcaaatgattctcttagtaaattaaacatttaaaaagtagttttaatgtgccttgggcatcttgaaaagaagagtgtgatataatttatgcttagtgttaactggtcattttacattgtatttattaagtctgctgaaaaatgaggttttaaggaagaaaatgcagattattttagggtaaacaggccaggtgtcctttgaagaactttgtttacatcaaattgatgaaattacagtcagtgattccttactttttttgctagttgtactttgaaattgttatgggttcgttttccaaaatatgtaacttattttttaaaggaataaggtgtgctgtgtatttgttgattaaaaatcatttgtcttgcagagtatccttttttgaaggaaatatacatccttataacacatcaggtagttttcttttttctgtatttaaattatatatttgaattaattgaatataatttgagttacatataattctatataaaggttacatattgaattatggttctaatctgtttaggaaagaaatgaattttctaagcatttaatacatttggaataattttagtttctaaaaagtactaatgtaagttaagtttatatcaaatgcaaattaccttgtataactaacaagcacagttattgtttaacattatggattttaattgtgttgacacccttctttgaatttgttgctttacatgtgtgtctgtgtgtgtgtctgcatgtgtgcacgcatgtacttgtatgcaatgtaaaagtaacagcagaatcattgcatttggtttacttaaaattttggagttagcaagtaaacaaaaagctgatagttttatgaagtctcggttaaaataaaatttctttgctatctcactcctaggaagttatggagttcatattttcaaaagatatgttaaaaatggttacacactctgctggccacattaaaaattagaagactcatgttaaattatctcctccaaaggactttttatttacagcttttcttttcctggactctacctgcttggttcagtgtcctgaagagttatttaaatgaaccactacttagtaattagttcttttttaaagtatctacttctaaaattacctagttgaaaatatgaaggatatgcttagttttagaaatatcatgaagcaaggatctagtcagtgttacagggtaaaggtggagttttttaaagtctgtatttaaatggtgcactgatggattcatttttaatttgcattacaaaaatgttgctcaggtaatcagtattttcttccacgtatgtgcatattgcactgttagatcatagaaatatctgaatgctttaatttttatgtatgcaaaatctataaatcttttgtataatgtattttatacaaatgtaactgtagaacattgttagcatgtgtatctgtaaaaccagtttttaaaattttttgccccttatttttcatattttgaaagatctccaacatgtaataaagtttctcttattcaatctaaaaaaaaaaa

SEQ ID NO: 419879 - DNA, 3616 bp, Homo sapiens
gacgttggcggcagaggcggaggcggacggggtcagcccaaagcagaggctcggccatgaacttacccgggacagcggcggcggcggaccttttggccatcttctcgcagagtgctccctgctaacggggacagattttaacattatggcagggaggcatcagaatcgtagttttcctcttccaggagttcagtcaagtggtcaagtacatgcatttggaaattgttcagacagtgatattttggaggaggatgctgaagtgtatgaacttcgatccagaggaaaagagaaagtccgaagaagtacatcaagagatagacttgacgacattatagtattaacaaaagatatacaagaaggagatacattaaatgcaatagcccttcagtactgttgtacggtagcagatatcaagagagttaacaatctcatcagtgatcaagacttttttgcccttaggtctatcaaaattccagtaaaaaagttcagttccttgaccgaaacactttgtcctccaaaaggaagacagacttcacgtcattcatctgttcaatactcttccgaacaacaggaaattttgccagctaatgattctcttgcttacagtgactcagctggtagctttttaaaagaagtagaccgagacatagaacaaatagtaaagtgtacagacaataagagagagaacctcaatgaggtagtatcggccttaacagcacaacaaatgcgttttgaacctgataacaaaaacactcaacgtaaagacccctattatggagcagactggggaatagggtggtggacagctgtagtgataatgttgatagtaggtataataacaccagtgttttatttgttgtattatgaaattttagctaaggtggatgttagtcatcattcaacagtggactcttcacatttacattcaaaaatcacacccccatcacagcagagagaaatggaaaatggaattgtgccaactaaaggaatacatttcagccaacaagatgatcataaactgtatagtcaagattctcagtcacctgctgctcaacaggaaacatagcaattagctcataatcaaatgttagtggtcacatgtgcatctggaatgtggtgaatcagttatatccaataatagcttcaaaggcagaatttagagagattgaggatgcttttgtttttaacaaaagggtttcacactttgaaaattttttgagcaactagttgttgatgttgagagcagttgatccataaatctggtgtgtgaatgtttcaagcagaaattaatttaaatgtgtgtttaggaagtacttaacttggaagatgtatcatttttcttaaaatgcatgtttaaattttatttttttaagtaatttttaaaaagtttattaatgttaaatttatgatgcagaatgatagcatcagatgtctgcagctgaaaaaaatttactactatgaacccccaaaatattcagttgcaagaaaatttgattctaaaattattcatggtaggatacgtaacacaccccttcaaaacttttaaaaaatacatttagcacatgtgctatgaaagcatacgtacaaagagaaaggggaaagtgatttataattcctacaacagaggccaagaaatagattaaaatattttcaagaccccaaaataatgtattatggttgggaagtcagtagaacactggaataggtgaagacctgacagtaatttttgtcttaagaatgctttctttaggacagaccctttaacctcacctctgtgcatctgtttttaaaatgattatatttgcctctgatatttgaaagcacttttgtagttttgatgatgaaaaatatattaaacgtgcatattaccattatttaggaaataattccttatatactgtgataaatcattgctgttacatacagtaacatgccttaattacatttaatgccttactgctttatgtaagtaaatccaagtttcagaattaaaaataagcattatttcatatggtccaatcagattcgttacataggctatataaatttgtctccattttcaccatcaagcacaaataattgggtcaaaactgcctttgaggtctgttgaagaaaatggttcattaagcaaaaaagagtagaggtattttatattagcagtaacagacaaattatttagtaatcccttaacctctgtttttcaaagagaaaatatccaatttagacttttttcctgatctctatatatagcatcaaattgggaaacaaaggccaaaggtgtatagattgcttgaaagggggtggtagtgcctctttttaagatctgttgagtcggctacagtctggctaagtaagaagcatttgcatactgattccatcatttaatctttaaaagtatgtgttttaaaaatgtaaccagaatgattcttcaatagaaatgagatttggtggagtctggattgcctgttttgtatataatatatacttaagatatataataccacctcattttctgggcattatttcctaattgttgatgtttcaggcttttgataagtcattttatatatttcaaatttaactcagaataagtaaatatttatggcaaatgcagttttatgtactttcaggagaagaccatcaggaaaagacaggacaaagaagtcaaacattaaagcccttgcaaatattagaggaccttagacaattaccaaaaagtgtttaatagggaagttgcaaatgattctcttagtaaattaaacatttaaaaagtagttttaatgtgccttgggcatcttgaaaagaagagtgtgatataatttatgcttagtgttaactggtcattttacattgtatttattaagtctgctgaaaaatgaggttttaaggaagaaaatgcagattattttagggtaaacaggccaggtgtcctttgaagaactttgtttacatcaaattgatgaaattacagtcagtgattccttactttttttgctagttgtactttgaaattgttatgggttcgttttccaaaatatgtaacttattttttaaaggaataaggtgtgctgtgtatttgttgattaaaaatcatttgtcttgcagagtatccttttttgaaggaaatatacatccttataacacatcaggtagttttcttttttctgtatttaaattatatatttgaattaattgaatataatttgagttacatataattctatataaaggttacatattgaattatggttctaatctgtttaggaaagaaatgaattttctaagcatttaatacatttggaataattttagtttctaaaaagtactaatgtaagttaagtttatatcaaatgcaaattaccttgtataactaacaagcacagttattgtttaacattatggattttaattgtgttgacacccttctttgaatttgttgctttacatgtgtgtctgtgtgtgtgtctgcatgtgtgcacgcatgtacttgtatgcaatgtaaaagtaacagcagaatcattgcatttggtttacttaaaattttggagttagcaagtaaacaaaaagctgatagttttatgaagtctcggttaaaataaaatttctttgctatctc

SEQ ID NO: 419880 - DNA, 4207 bp, Homo sapiens
gacgttggcggcagaggcggaggcggacggggtcagcccaaagcagaggctcggccatgaacttacccgggacagcggcggcggcggaccttttggccatcttctcgcagagtgctccctgctaacggggacagattttaacattatggcagggaggcatcagaatcgtagttttcctcttccaggagttcagtcaagtggtcaagtacatgcatttggaaattgttcagacagtgatattttggaggaggatgctgaagtgtatgaacttcgatccagaggaaaagagaaagtccgaagaagtacatcaagagatagacttgacgacattatagtattaacaaaagatatacaagaaggagatacattaaatgcaatagcccttcagtactgttgtacggtctatcaaaattccagtaaaaaagttcagttccttgaccgaaacactttgtcctccaaaaggaagacagacttcacgtcattcatctgttcaatactcttccgaacaacaggaaattttgccagctaatgattctcttgcttacagtgactcagctggtagctttttaaaagaagtagaccgagacatagaacaaatagtaaagtgtacagacaataagagagagaacctcaatgaggtagtatcggccttaacagcacaacaaatgcgttttgaacctgataacaaaaacactcaacgtaaagacccctattatggagcagactggggaatagggtggtggacagctgtagtgataatgttgatagtaggtataataacaccagtgttttatttgttgtattatgaaattttagctaaggtggatgttagtcatcattcaacagtggactcttcacatttacattcaaaaatcacacccccatcacagcagagagaaatggaaaatggaattgtgccaactaaaggaatacatttcagccaacaagatgatcataaactgtatagtcaagattctcagtcacctgctgctcaacaggaaacatagcaattagctcataatcaaatgttagtggtcacatgtgcatctggaatgtggtgaatcagttatatccaataatagcttcaaaggcagaatttagagagattgaggatgcttttgtttttaacaaaagggtttcacactttgaaaattttttgagcaactagttgttgatgttgagagcagttgatccataaatctggtgtgtgaatgtttcaagcagaaattaatttaaatgtgtgtttaggaagtacttaacttggaagatgtatcatttttcttaaaatgcatgtttaaattttatttttttaagtaatttttaaaaagtttattaatgttaaatttatgatgcagaatgatagcatcagatgtctgcagctgaaaaaaatttactactatgaacccccaaaatattcagttgcaagaaaatttgattctaaaattattcatggtaggatacgtaacacaccccttcaaaacttttaaaaaatacatttagcacatgtgctatgaaagcatacgtacaaagagaaaggggaaagtgatttataattcctacaacagaggccaagaaatagattaaaatattttcaagaccccaaaataatgtattatggttgggaagtcagtagaacactggaataggtgaagacctgacagtaatttttgtcttaagaatgctttctttaggacagaccctttaacctcacctctgtgcatctgtttttaaaatgattatatttgcctctgatatttgaaagcacttttgtagttttgatgatgaaaaatatattaaacgtgcatattaccattatttaggaaataattccttatatactgtgataaatcattgctgttacatacagtaacatgccttaattacatttaatgccttactgctttatgtaagtaaatccaagtttcagaattaaaaataagcattatttcatatggtccaatcagattcgttacataggctatataaatttgtctccattttcaccatcaagcacaaataattgggtcaaaactgcctttgaggtctgttgaagaaaatggttcattaagcaaaaaagagtagaggtattttatattagcagtaacagacaaattatttagtaatcccttaacctctgtttttcaaagagaaaatatccaatttagacttttttcctgatctctatatatagcatcaaattgggaaacaaaggccaaaggtgtatagattgcttgaaagggggtggtagtgcctctttttaagatctgttgagtcggctacagtctggctaagtaagaagcatttgcatactgattccatcatttaatctttaaaagtatgtgttttaaaaatgtaaccagaatgattcttcaatagaaatgagatttggtggagtctggattgcctgttttgtatataatatatacttaagatatataataccacctcattttctgggcattatttcctaattgttgatgtttcaggcttttgataagtcattttatatatttcaaatttaactcagaataagtaaatatttatggcaaatgcagttttatgtactttcaggagaagaccatcaggaaaagacaggacaaagaagtcaaacattaaagcccttgcaaatattagaggaccttagacaattaccaaaaagtgtttaatagggaagttgcaaatgattctcttagtaaattaaacatttaaaaagtagttttaatgtgccttgggcatcttgaaaagaagagtgtgatataatttatgcttagtgttaactggtcattttacattgtatttattaagtctgctgaaaaatgaggttttaaggaagaaaatgcagattattttagggtaaacaggccaggtgtcctttgaagaactttgtttacatcaaattgatgaaattacagtcagtgattccttactttttttgctagttgtactttgaaattgttatgggttcgttttccaaaatatgtaacttattttttaaaggaataaggtgtgctgtgtatttgttgattaaaaatcatttgtcttgcagagtatccttttttgaaggaaatatacatccttataacacatcaggtagttttcttttttctgtatttaaattatatatttgaattaattgaatataatttgagttacatataattctatataaaggttacatattgaattatggttctaatctgtttaggaaagaaatgaattttctaagcatttaatacatttggaataattttagtttctaaaaagtactaatgtaagttaagtttatatcaaatgcaaattaccttgtataactaacaagcacagttattgtttaacattatggattttaattgtgttgacacccttctttgaatttgttgctttacatgtgtgtctgtgtgtgtgtctgcatgtgtgcacgcatgtacttgtatgcaatgtaaaagtaacagcagaatcattgcatttggtttacttaaaattttggagttagcaagtaaacaaaaagctgatagttttatgaagtctcggttaaaataaaatttctttgctatctcactcctaggaagttatggagttcatattttcaaaagatatgttaaaaatggttacacactctgctggccacattaaaaattagaagactcatgttaaattatctcctccaaaggactttttatttacagcttttcttttcctggactctacctgcttggttcagtgtcctgaagagttatttaaatgaaccactacttagtaattagttcttttttaaagtatctacttctaaaattacctagttgaaaatatgaaggatatgcttagttttagaaatatcatgaagcaaggatctagtcagtgttacagggtaaaggtggagttttttaaagtctgtatttaaatggtgcactgatggattcatttttaatttgcattacaaaaatgttgctcaggtaatcagtattttcttccacgtatgtgcatattgcactgttagatcatagaaatatctgaatgctttaatttttatgtatgcaaaatctataaatcttttgtataatgtattttatacaaatgtaactgtagaacattgttagcatgtgtatctgtaaaaccagtttttaaaattttttgccccttatttttcatattttgaaagatctccaacatgtaataaagtttctcttattcaatctaaaaaaaaaaa

SEQ ID NO: 419881 - DNA, 689 bp, Homo sapiens
ttacattgatctagattttttaatgcgactccctataagggaaattgggcccttgaaggccaaaaatttcggcacgaggagggaattaaccactgaaagagacaaagcacacctaaataatgatgaacaaatcaagacctacaagaaatgaacacatagatgctttttaagtgtcattagttatcggaatcaaagaatttgaggtggtgacaactggggattatctgtaactccccaaatttactgttcttgaatgacattctcaaactatttattaatgagttagtctcatccctgctttctgtttcctctctctgcatcttctcttggcataggaagttattttactcatgctgtgttttttaatataagctttacaaaaaaagatgcattcccttcctgttcacactcttaccatgtttttgttcttccttaagaatgattgtgtgtgtgtgtgtgtgtgtgtgtaagtgtgtaagtgtaacatcatgggttttctttcttcacttgtaaagttttatctagaaatacttttacaggttatgttgaggtacacaaagataatgttctaagattgtgtattggatttggattgtgtgtgtgtgtttaaagcatttgataaggtttaaatgttttttatacagagatttttgttcattaaactcaatctgcatcatggaaaaaaaaaa

SEQ ID NO: 419882 - DNA, 3712 bp, Homo sapiens
atgttcgccgggcaggcgaggaaagaggacgccatgattggttggcgctggggcggcggacggtggaagggcctggcgagtctaggttttacgcctgtgctggactttctccttccatgtttccaggccgtggggggctacagagggcgagaagtcggctcagcggaaacctggatttggttctaagccgtggggttgagaaggggtgaccggaagtgatcgtgggactgaccggaagcgaggcctggaggggaaagagagagcgagacctgggagggagggggcctccagcagaaaggggcgggggaaaaggtgcaaaagcagcgtgggagcgccgggctggcttcctgcggctgctgctggtctgactgggaagcagcaagccaccactacgaactctcaagaggagtgggagtgcgggagtccagagctgcctctgggaagtctgcagtagttgagcaaaggggtcctcacgttcctgagagctgggcaggggggattttggaacctggggcagccaagaacgagcagccaagggtacgggagattagttgtgcacagagcagtgctggtcgggcttgggggtggctggtgggcactgcgtgggaaaccttggtttgtagttttcttggtttgcgttactcctgttgggtagaattaccctccgcgcctttgtacaagacacggtgtctcctggggcaaggaaggagccaggatggcctgggctctgaagctgcctctggccgacgaagtgattgaatccgggttggtgcaggactttgatgctagcctgtccgggatcggccaggaactgggtgctggtgcctatagcatgagtgatgtccttgcattgcccatttttaagcaagaagagtcgagtttgcctcctgataatgagaataaaatcctgccttttcaatatgtgctttgtgctgctacctctccagcagtgaaactccatgatgaaaccctaacgtatctcaatcaaggacagtcttatgaaattcgaatgctagacaataggaaacttggagaacttccagaaattaatggcaaattggtgaagagtatattccgtgtggtgttccatgacagaaggcttcagtacactgagcatcagcagctagagggctggaggtggaaccgacctggagacagaattcttgacatagatatcccgatgtctgtgggtataatcgatcctagggctaatccaactcaactaaatacagtggagttcctgtgggaccctgcaaagaggacatctgtgtttattcaggtgcactgtattagcacagagttcactatgaggaaacatggtggagaaaagggggtgccattccgagtacaaatagataccttcaaggagaatgaaaacggggaatatactgagcacttacactcggccagctgccagatcaaagttttcaagcccaaaggtgcagacagaaagcaaaaaacggatagggaaaaaatggagaaacgaacacctcatgaaaaggagaaatatcagccttcctatgagacaaccatactcacagagtgttctccatggcccgagatcacgtatgtcaataactccccatcacctggcttcaacagttcccatagcagtttttctcttggggaaggaaatggttcaccaaaccaccagccagagccaccccctccagtcacagataacctcttaccaacaaccacacctcaggaagctcagcagtggttgcatcgaaatcgtttttctacattcacaaggcttttcacaaacttctcaggggcagatttattgaaattaactagagatgatgtgatccaaatctgtggccctgcagatggaatcagactttttaatgcattaaaaggccggatggtgcgtccaaggttaaccatttatgtttgtcaggaatcactgcagttgagggagcagcaacaacagcagcagcaacagcagcagaagcatgaggatggagactcaaatggtactttcttcgtttaccatgctatctatctagaagaactaacagctgttgaattgacagaaaaaattgctcagcttttcagcatttccccttgccagatcagccagatttacaagcaggggccaacaggaattcatgtgctcatcagtgatgagatgatacagaactttcaggaagaagcatgttttattctggacacaatgaaagcagaaaccaatgatagctatcatatcatactgaagtaggagtgcggcgtttcgtgcccagtggctgctccttccttcacctctgaaaacggccctcttgaagggggatatgaatggagatttgaaggtctgcaagaacctgactcgtctgactgtgtgtggaggagtccaggccatggaggcagaatcctggccctctgtgttggcccaagctcttgtggtacacacagattactgcccaatatgcagttctgcagctgttttagttaaatttctggaccttgttgttgttaaatatcagtagaaactctacataatttagagtgtatgtagggcataatgatgatgggaattgtgtgatgtttaacaggaagatcttaaattttgtgatatggagccctgtaatttttttcttatataaaaatgggtatctatattcataagactaggtcttcaatctctttgtactggtctcaaatgtactggtatctctgctttttgccacagtttgtccctgaaaactttatcagtgaggagaaatacagaattttccttttggttcccctgtaataccacaactaatagtattttcagctaacatttattgaccaggcagtgtgataaattttttgaatgaccatcttgtttaaccccctaatcacactatctgaagtaggtgctatagtgacccccaaccgaagatgaggaaatggagacacacagtggctaagtagcttgctaggtgccaggagctggcaggcagtgatgctgaaatccaaaccaggcaatctggccctccttattcaccctctcataccaccagtgccacccattataacctgtgttcacttcgcttattactgtggcccttctggtgactacaacataacactgagtatgaactgaggaattaaccactgaaagagacaaagcacacctaaataatgatgaacaaatcaagacctacaagaaatgaacacatagatgctttttaagtgtcattagttatcggaatcaaagaatttgaggtggtgacaactggggattatctgtaactccccaaatttactgttcttgaatgacattctcaaactatttattaatgagttagtctcatccctgctttctgtttcctctctctgcatcttctcttggcataggaagttattttactcatgctgtgttttttaatataagctttacaaaaaaagatgcattcccttcctgttcacactcttaccatgtttttgttcttccttaagaatgattgtgtgtgtgtgtgtgtgtgtgtgtaagtgtgtaagtgtaacatcatgggttttctttcttcacttgtaaagttttatctagaaatacttttacaggttatgttgaggtacacaaagataatgttctaagattgtgtattggatttggatttgtgtgtgtgtgtgtgtgtgtgtgtttaaagcatttgataaggtttaaatgttttttatacagagatttttgttcattaaactcaatctgcatcatggaaaaaaaaaa

SEQ ID NO: 419883 - DNA, 3352 bp, Homo sapiens
gcaatggaagatgaaatgaatgaaatgaagcgagaagggaagtttagagaaaaaagaataaaaagaaatgagcaaagcctccagcagaaaggggcgggggaaaaggtgcaaaagcagcgtgggagcgccgggctggcttcctgcggctgctgctggtctgactgggaagcagcaagccaccactacgaactctcaagaggagtgggagtgcgggagtccagagctgcctctgggaagtctgcagtagttgagcaaaggggtcctcacgttcctgagagctgggcaggggggattttggaacctggggcagccaagaacgagcagccaagggtacgggagattagttgtgcacagagcagtgctggtcgggcttgggggtggctggtgggcactgcgtgggaaaccttggtttgtagttttcttggtttgcgttactcctgttgggtagaattaccctccgcgcctttgtacaagacacggtgtctcctggggcaaggaaggagccaggatggcctgggctctgaagctgcctctggccgacgaagtgattgaatccgggttggtgcaggactttgatgctagcctgtccgggatcggccaggaactgggtgctggtgcctatagcatgagtgatgtccttgcattgcccatttttaagcaagaagagtcgagtttgcctcctgataatgagaataaaatcctgccttttcaatatgtgctttgtgctgctacctctccagcagtgaaactccatgatgaaaccctaacgtatctcaatcaaggacagtcttatgaaattcgaatgctagacaataggaaacttggagaacttccagaaattaatggcaaattggtgaagagtatattccgtgtggtgttccatgacagaaggcttcagtacactgagcatcagcagctagagggctggaggtggaaccgacctggagacagaattcttgacatagatatcccgatgtctgtgggtataatcgatcctagggctaatccaactcaactaaatacagtggagttcctgtgggaccctgcaaagaggacatctgtgtttattcagcccaaaggtgcagacagaaagcaaaaaacggatagggaaaaaatggagaaacgaacacctcatgaaaaggagaaatatcagccttcctatgagacaaccatactcacagagtgttctccatggcccgagatcacgtatgtcaataactccccatcacctggcttcaacagttcccatagcagtttttctcttggggaaggaaatggttcaccaaaccaccagccagagccaccccctccagtcacagataacctcttaccaacaaccacacctcaggaagctcagcagtggttgcatcgaaatcgtttttctacattcacaaggcttttcacaaacttctcaggggcagatttattgaaattaactagagatgatgtgatccaaatctgtggccctgcagatggaatcagactttttaatgcattaaaaggccggatggtgcgtccaaggttaaccatttatgtttgtcaggaatcactgcagttgagggagcagcaacaacagcagcagcaacagcagcagaagcatgaggatggagactcaaatggtactttcttcgtttaccatgctatctatctagaagaactaacagctgttgaattgacagaaaaaattgctcagcttttcagcatttccccttgccagatcagccagatttacaagcaggggccaacaggaattcatgtgctcatcagtgatgagatgatacagaactttcaggaagaagcatgttttattctggacacaatgaaagcagaaaccaatgatagctatcatatcatactgaagtaggagtgcggcgtttcgtgcccagtggctgctccttccttcacctctgaaaacggccctcttgaagggggatatgaatggagatttgaaggtctgcaagaacctgactcgtctgactgtgtgtggaggagtccaggccatggaggcagaatcctggccctctgtgttggcccaagctcttgtggtacacacagattactgcccaatatgcagttctgcagctgttttagttaaatttctggaccttgttgttgttaaatatcagtagaaactctacataatttagagtgtatgtagggcataatgatgatgggaattgtgtgatgtttaacaggaagatcttaaattttgtgatatggagccctgtaatttttttcttatataaaaatgggtatctatattcataagactaggtcttcaatctctttgtactggtctcaaatgtactggtatctctgctttttgccacagtttgtccctgaaaactttatcagtgaggagaaatacagaattttccttttggttcccctgtaataccacaactaatagtattttcagctaacatttattgaccaggcagtgtgataaattttttgaatgaccatcttgtttaaccccctaatcacactatctgaagtaggtgctatagtgacccccaaccgaagatgaggaaatggagacacacagtggctaagtagcttgctaggtgccaggagctggcaggcagtgatgctgaaatccaaaccaggcaatctggccctccttattcaccctctcataccaccagtgccacccattataacctgtgttcacttcgcttattactgtggcccttctggtgactacaacataacactgagtatgaactgaggaattaaccactgaaagagacaaagcacacctaaataatgatgaacaaatcaagacctacaagaaatgaacacatagatgctttttaagtgtcattagttatcggaatcaaagaatttgaggtggtgacaactggggattatctgtaactccccaaatttactgttcttgaatgacattctcaaactatttattaatgagttagtctcatccctgctttctgtttcctctctctgcatcttctcttggcataggaagttattttactcatgctgtgttttttaatataagctttacaaaaaaagatgcattcccttcctgttcacactcttaccatgtttttgttcttccttaagaatgattgtgtgtgtgtgtgtgtgtgtgtgtaagtgtgtaagtgtaacatcatgggttttctttcttcacttgtaaagttttatctagaaatacttttacaggttatgttgaggtacacaaagataatgttctaagattgtgtattggatttggatttgtgtgtgtgtgtgtgtgtgtgtgtttaaagcatttgataaggtttaaatgttttttatacagagatttttgttcattaaactcaatctgcatcatggaaaaaaaaaa

SEQ ID NO: 419884 - DNA, 3699 bp, Homo sapiens
atgttcgccgggcaggcgaggaaagaggacgccatgattggttggcgctggggcggcggacggtggaagggcctggcgagtctaggttttacgcctgtgctggactttctccttccatgtttccaggccgtggggggctacagagggcgagaagtcggctcagcggaaacctggatttggttctaagccgtggggttgagaaggggtgaccggaagtgatcgtgggactgaccggaagcgaggcctggaggggaaagagagagcgagacctgggagggagggggcctccagcagaaaggggcgggggaaaaggtgcaaaagcagcgtgggagcgccgggctggcttcctgcggctgctgctggtctgactgggaagcagcaagccaccactacgaactctcaagaggagtgggagtgcgggagtccagagctgcctctgggaagtctgcagtagttgagcaaaggggtcctcacgttcctgagagctgggcaggggggattttggaacctggggcagccaagaacgagcagccaagggtacgggagattagttgtgcacagagcagtgctggtcgggcttgggggtggctggtgggcactgcgtgggaaaccttggtttgtagttttcttggtttgcgttactcctgttgggtagaattaccctccgcgcctttgtacaagacacggtgtctcctggggcaaggaaggagccaggatggcctgggctctgaagctgcctctggccgacgaagtgattgaatccgggttggtgcaggactttgatgctagcctgtccgggatcggccaggaactgggtgctggtgcctatagcatgagtgatgtccttgcattgcccatttttaagcaagaagagtcgagtttgcctcctgataatgagaataaaatcctgccttttcaatatgtgctttgtgctgctacctctccagcagtgaaactccatgatgaaaccctaacgtatctcaatcaaggacagtcttatgaaattcgaatgctagacaataggaaacttggagaacttccagaaattaatggcaaattggtgaagagtatattccgtgtggtgttccatgacagaaggcttcagtacactgagcatcagcagctagagggctggaggtggaaccgacctggagacagaattcttgacatagatatcccgatgtctgtgggtataatcgatcctagggctaatccaactcaactaaatacagtggagttcctgtgggaccctgcaaagaggacatctgtgtttattcaggtgcactgtattagcacagagttcactatgaggaaacatggtggagaaaagggggtgccattccgagtacaaatagataccttcaaggagaatgaaaacggggaatatactgagcacttacactcggccagctgccagatcaaagttttcaagcccaaaggtgcagacagaaagcaaaaaacggatagggaaaaaatggagaaacgaacacctcatgaaaaggagaaatatcagccttcctatgagacaaccatactcacagagtgttctccatggcccgagatcacgtatgtcaataactccccatcacctggcttcaacagttcccatagcagtttttctcttggggaaggaaatggttcaccaaaccaccagccagagccaccccctccagtcacagataacctcttaccaacaaccacacctcaggaagctcagcagtggttgcatcgaaatcgtttttctacattcacaaggcttttcacaaacttctcaggggcagatttattgaaattaactagagatgatgtgatccaaatctgtggccctgcagatggaatcagactttttaatgcattaaaaggccggatggtgcgtccaaggttaaccatttatgtttgtcaggaatcactgcagttgagggagcagcaacaacagcagcagcaacagcagcagaagcatgaggatggagactcaaatggtactttcttcgtttaccatgctatctatctagaagaactaacagctgttgaattgacagaaaaaattgctcagcttttcagcatttccccttgccagatcagccagatttacaagcaggggccaacaggaattcatgtgctcatcagtgatgagatgatacagaactttcaggaagaagcatgttttattctggacacaatgaaagcagaaaccaatgatagctatcatatcatactgaagtaggagtgcggcgtttcgtgcccagtggctgctccttccttcacctctgaaaacggccctcttgaagggggatatgaatggagatttgaaggtctgcaagaacctgactcgtctgactgtgtgtggaggagtccaggccatggaggcagaatcctggccctctgtgttggcccaagctcttgtggtacacacagattactgcccaatatgcagttctgcagctgttttagttaaatttctggaccttgttgttgttaaatatcagtagaaactctacataatttagagtgtatgtagggcataatgatgatgggaattgtgtgatgtttaacaggaagatcttaaattttgtgatatggagccctgtaatttttttcttatataaaaatgggtatctatattcataagactaggtcttcaatctctttgtactggtctcaaatgtactggtatctctgctttttgccacagtttgtccctgaaaactttatcagtgaggagaaatacagaattttccttttggttcccctgtaataccacaactaatagtattttcagctaacatttattgaccaggcagtgtgataaattttttgaatgaccatcttgtttaaccccctaatcacactatctgaagtaggtgctatagtgacccccaaccgaagatgaggaaatggagacacacagtggctaagtagcttgctaggtgccaggagctggcaggcagtgatgctgaaatccaaaccaggcaatctggccctccttattcaccctctcataccaccagtgccacccattataacctgtgttcacttcgcttattactgtggcccttctggtgactacaacataacactgagtatgaactgaggaattaaccactgaaagagacaaagcacacctaaataatgatgaacaaatcaagacctacaagaaatgaacacatagatgctttttaagtgtcattagttatcggaatcaaagaatttgaggtggtgacaactggggattatctgtaactccccaaatttactgttcttgaatgacattctcaaactatttattaatgagttagtctcatccctgctttctgtttcctctctctgcatcttctcttggcataggaagttattttactcatgctgtgttttttaatataagctttacaaaaaaagatgcattcccttcctgttcacactcttaccatgtttttgttcttccttaagaatgattgtgtgtgtgtgtgtgtgtgtgtgtaagtgtgtaagtgtaacatcatgggttttctttcttcacttgtaaagttttatctagaaatacttttacaggttatgttgaggtacacaaagataatgttctaagattgtgtattggatttggattgtgtgtgtgtgtttaaagcatttgataaggtttaaatgttttttatacagagatttttgttcattaaactcaatctgcatcatggaaaaaaaaaa

SEQ ID NO: 419885 - DNA, 2626 bp, Homo sapiens
atgttcgccgggcaggcgaggaaagaggacgccatgattggttggcgctggggcggcggacggtggaagggcctggcgagtctaggttttacgcctgtgctggactttctccttccatgtttccaggccgtggggggctacagagggcgagaagtcggctcagcggaaacctggatttggttctaagccgtggggttgagaaggggtgaccggaagtgatcgtgggactgaccggaagcgaggcctggaggggaaagagagagcgagacctgggagggagggggcctccagcagaaaggggcgggggaaaaggtgcaaaagcagcgtgggagcgccgggctggcttcctgcggctgctgctggtctgactgggaagcagcaagccaccactacgaactctcaagaggagtgggagtgcgggagtccagagctgcctctgggaagtctgcagtagttgagcaaaggggtcctcacgttcctgagagctgggcaggggggattttggaacctggggcagccaagaacgagcagccaagggtacgggagattagttgtgcacagagcagtgctggtcgggcttgggggtggctggtgggcactgcgtgggaaaccttggtttgtagttttcttggtttgcgttactcctgttgggtagaattaccctccgcgcctttgtacaagacacggtgtctcctggggcaaggaaggagccaggatggcctgggctctgaagctgcctctggccgacgaagtgattgaatccgggttggtgcaggactttgatgctagcctgtccgggatcggccaggaactgggtgctggtgcctatagcatgagtgatgtccttgcattgcccatttttaagcaagaagagtcgagtttgcctcctgataatgagaataaaatcctgccttttcaatatgtgctttgtgctgctacctctccagcagtgaaactccatgatgaaaccctaacgtatctcaatcaaggacagtcttatgaaattcgaatgctagacaataggaaacttggagaacttccagaaattaatggcaaattggtgaagagtatattccgtgtggtgttccatgacagaaggcttcagtacactgagcatcagcagctagagggctggaggtggaaccgacctggagacagaattcttgacatagatatcccgatgtctgtgggtataatcgatcctagggctaatccaactcaactaaatacagtggagttcctgtgggaccctgcaaagaggacatctgtgtttattcaggtgcactgtattagcacagagttcactatgaggaaacatggtggagaaaagggggtgccattccgagtacaaatagataccttcaaggagaatgaaaacggggaatatactgagcacttacactcggccagctgccagatcaaagttttcaagcccaaaggtgcagacagaaagcaaaaaacggatagggaaaaaatggagaaacgaacacctcatgaaaaggagaaatatcagccttcctatgagacaaccatactcacagagtgttctccatggcccgagatcacgtatgtcaataactccccatcacctggcttcaacagttcccatagcagtttttctcttggggaaggaaatggttcaccaaaccaccagccagagccaccccctccagtcacagataacctcttaccaacaaccacacctcaggaagctcagcagtggttgcatcgaaatcgtttttctacattcacaaggcttttcacaaacttctcaggggcagatttattgaaattaactagagatgatgtgatccaaatctgtggccctgcagatggaatcagactttttaatgcattaaaaggccggatggtgcgtccaaggttaaccatttatgtttgtcaggaatcactgcagttgagggagcagcaacaacagcagcagcaacagcagcagaagcatgaggatggagactcaaatggtactttcttcgtttaccatgctatctatctagaagaactaacagctgttgaattgacagaaaaaattgctcagcttttcagcatttccccttgccagatcagccagatttacaagcaggggccaacaggaattcatgtgctcatcagtgatgagatgatacagaactttcaggaagaagcatgttttattctggacacaatgaaagcagaaaccaatgatagctatcatatcatactgaagtaggagtgcggcgtttcgtgcccagtggctgctccttccttcacctctgaaaacggccctcttgaagggggatatgaatggagatttgaaggtctgcaagaacctgactcgtctgactgtgtgtggaggagtccaggccatggaggcagaatcctggccctctgtgttggcccaagctcttgtggtacacacagattactgcccaatatgcagttctgcagctgttttagttaaatttctggaccttgttgttgttaaatatcagtagaaactctacataatttagagtgtatgtagggcataatgatgatgggaattgtgtgatgtttaacaggaagatcttaaattttgtgatatggagccctgtaatttttttcttatataaaaatgggtatctatattcat

SEQ ID NO: 419886 - DNA, 2976 bp, Homo sapiens
tggatcccccgggctgcaggattcggcacgagggtgcaggactttgatgctagcctgtccgggatcggccaggaactgggtgctggtgcctatagcatgagtgatgtccttgcattgcccatttttaagcaagaagagtcgagtttgcctcctgataatgagaataaaatcctgccttttcaatatgtgctttgtgctgctacctctccagcagtgaaactccatgatgaaaccctaacgtatctcaatcaaggacagtcttatgaaattcgaatgctagacaataggaaacttggagaacttccagaaattaatggcaaattggtgaagagtatattccgtgtggtgttccatgacagaaggcttcagtacactgagcatcagcagctagagggctggaggtggaaccgacctggagacagaattcttgacatagatatcccgatgtctgtgggtataatcgatcctagggctaatccaactcaactaaatacagtggagttcctgtgggaccctgcaaagaggacatctgtgtttattcaggtgcactgtattagcacagagttcactatgaggaaacatggtggagaaaagggggtgccattccgagtacaaatagataccttcaaggagaatgaaaacggggaatatactgagcacttacactcggccagctgccagatcaaagttttcaagcccaaaggtgcagacagaaagcaaaaaacggatagggaaaaaatggagaaacgaacacctcatgaaaaggagaaatatcagccttcctatgagacaaccatactcacagagtgttctccatggcccgagatcacgtatgtcaataactccccatcacctggcttcaacagttcccatagcagtttttctcttggggaaggaaatggttcaccaaaccaccagccagagccaccccctccagtcacagataacctcttaccaacaaccacacctcaggaagctcagcagtggttgcatcgaaatcgtttttctacattcacaaggcttttcacaaacttctcaggggcagatttattgaaattaactagagatgatgtgatccaaatctgtggccctgcagatggaatcagactttttaatgcattaaaaggccggatggtgcgtccaaggttaaccatttatgtttgtcaggaatcactgcagttgagggagcagcaacaacagcagcagcaacagcagcagaagcatgaggatggagactcaaatggtactttcttcgtttaccatgctatctatctagaagaactaacagctgttgaattgacagaaaaaattgctcagcttttcagcatttccccttgccagatcagccagatttacaagcaggggccaacaggaattcatgtgctcatcagtgatgagatgatacagaactttcaggaagaagcatgttttattctggacacaatgaaagcagaaaccaatgatagctatcatatcatactgaagtaggagtgcggcgtttcgtgcccagtggctgctccttccttcacctctgaaaacggccctcttgaagggggatatgaatggagatttgaaggtctgcaagaacctgactcgtctgactgtgtgtggaggagtccaggccatggaggcagaatcctggccctctgtgttggcccaagctcttgtggtacacacagattactgcccaatatgcagttctgcagctgttttagttaaatttctggaccttgttgttgttaaatatcagtagaaactctacataatttagagtgtatgtagggcataatgatgatgggaattgtgtgatgtttaacaggaagatcttaaattttgtgatatggagccctgtaatttttttcttatataaaaatgggtatctatattcataagactaggtcttcaatctctttgtactggtctcaaatgtactggtatctctgctttttgccacagtttgtccctgaaaactttatcagtgaggagaaatacagaattttccttttggttcccctgtaataccacaactaatagtattttcagctaacatttattgaccaggcagtgtgataaattttttgaatgaccatcttgtttaaccccctaatcacactatctgaagtaggtgctatagtgacccccaaccgaagatgaggaaatggagacacacagtggctaagtagcttgctaggtgccaggagctggcaggcagtgatgctgaaatccaaaccaggcaatctggccctccttattcaccctctcataccaccagtgccacccattataacctgtgttcacttcgcttattactgtggcccttctggtgactacaacataacactgagtatgaactgaggaattaaccactgaaagagacaaagcacacctaaataatgatgaacaaatcaagacctacaagaaatgaacacatagatgctttttaagtgtcattagttatcggaatcaaagaatttgaggtggtgacaactggggattatctgtaactccccaaatttactgttcttgaatgacattctcaaactatttattaatgagttagtctcatccctgctttctgtttcctctctctgcatcttctcttggcataggaagttattttactcatgctgtgttttttaatataagctttacaaaaaaagatgcattcccttcctgttcacactcttaccatgtttttgttcttccttaagaatgattgtgtgtgtgtgtgtgtgtgtgtgtaagtgtgtaagtgtaacatcatgggttttctttcttcacttgtaaagttttatctagaaatacttttacaggttatgttgaggtacacaaagataatgttctaagattgtgtattggatttggatttgtgtgtgtgtgtgtgtgtgtgtgtttaaagcatttgataaggtttaaatgttttttatacagagatttttgttcattaaactcaatctgcatcatggaaaaaaaaaa

SEQ ID NO: 419887 - DNA, 3478 bp, Homo sapiens
atgttcgccgggcaggcgaggaaagaggacgccatgattggttggcgctggggcggcggacggtggaagggcctggcgagtctaggttttacgcctgtgctggactttctccttccatgtttccaggccgtggggggctacagagggcgagaagtcggctcagcggaaacctggatttggttctaagccgtggggttgagaaggggtgaccggaagtgatcgtgggactgaccggaagcgaggcctggaggggaaagagagagcgagacctgggagggagggggcctccagcagaaaggggcgggggaaaaggtgcaaaagcagcgtgggagcgccgggctggcttcctgcggctgctgctggtctgactgggaagcagcaagccaccactacgaactctcaagaggagtgggagtgcgggagtccagagctgcctctgggaagtctgcagtagttgagcaaaggggtcctcacgttcctgagagctgggcaggggggattttggaacctggggcagccaagaacgagcagccaagggtacgggagattagttgtgcacagagcagtgctggtcgggcttgggggtggctggtgggcactgcgtgggaaaccttggtttgtagttttcttggtttgcgttactcctgttgggtagaattaccctccgcgcctttgtacaagacacggtgtctcctggggcaaggaaggagccaggatggcctgggctctgaagctgcctctggccgacgaagtgattgaatccgggttggtgcaggactttgatgctagcctgtccgggatcggccaggaactgggtgctggtgcctatagcatgagtgatgtccttgcattgcccatttttaagcaagaagagtcgagtttgcctcctgataatgagaataaaatcctgccttttcaatatgtgctttgtgctgctacctctccagcagtgaaactccatgatgaaaccctaacgtatctcaatcaaggacagtcttatgaaattcgaatgctagacaataggaaacttggagaacttccagaaattaatggcaaattggtgaagagtatattccgtgtggtgttccatgacagaaggcttcagtacactgagcatcagcagctagagggctggaggtggaaccgacctggagacagaattcttgacatagatatcccgatgtctgtgggtataatcgatcctagggctaatccaactcaactaaatacagtggagttcctgtgggaccctgcaaagaggacatctgtgtttattcaggtgcactgtattagcacagagttcactatgaggaaacatggtggagaaaagggggtgccattccgagtacaaatagataccttcaaggagaatgaaaacggggaatatactgagcacttacactcggccagctgccagatcaaagttttcaagcccaaaggtgcagacagaaagcaaaaaacggatagggaaaaaatggagaaacgaacacctcatgaaaaggagaaatatcagccttcctatgagacaaccatactcacagagtgttctccatggcccgagatcacgtatgtcaataactccccatcacctggcttcaacagttcccatagcagtttttctcttggggaagggatggtgcgtccaaggttaaccatttatgtttgtcaggaatcactgcagttgagggagcagcaacaacagcagcagcaacagcagcagaagcatgaggatggagactcaaatggtactttcttcgtttaccatgctatctatctagaagaactaacagctgttgaattgacagaaaaaattgctcagcttttcagcatttccccttgccagatcagccagatttacaagcaggggccaacaggaattcatgtgctcatcagtgatgagatgatacagaactttcaggaagaagcatgttttattctggacacaatgaaagcagaaaccaatgatagctatcatatcatactgaagtaggagtgcggcgtttcgtgcccagtggctgctccttccttcacctctgaaaacggccctcttgaagggggatatgaatggagatttgaaggtctgcaagaacctgactcgtctgactgtgtgtggaggagtccaggccatggaggcagaatcctggccctctgtgttggcccaagctcttgtggtacacacagattactgcccaatatgcagttctgcagctgttttagttaaatttctggaccttgttgttgttaaatatcagtagaaactctacataatttagagtgtatgtagggcataatgatgatgggaattgtgtgatgtttaacaggaagatcttaaattttgtgatatggagccctgtaatttttttcttatataaaaatgggtatctatattcataagactaggtcttcaatctctttgtactggtctcaaatgtactggtatctctgctttttgccacagtttgtccctgaaaactttatcagtgaggagaaatacagaattttccttttggttcccctgtaataccacaactaatagtattttcagctaacatttattgaccaggcagtgtgataaattttttgaatgaccatcttgtttaaccccctaatcacactatctgaagtaggtgctatagtgacccccaaccgaagatgaggaaatggagacacacagtggctaagtagcttgctaggtgccaggagctggcaggcagtgatgctgaaatccaaaccaggcaatctggccctccttattcaccctctcataccaccagtgccacccattataacctgtgttcacttcgcttattactgtggcccttctggtgactacaacataacactgagtatgaactgaggaattaaccactgaaagagacaaagcacacctaaataatgatgaacaaatcaagacctacaagaaatgaacacatagatgctttttaagtgtcattagttatcggaatcaaagaatttgaggtggtgacaactggggattatctgtaactccccaaatttactgttcttgaatgacattctcaaactatttattaatgagttagtctcatccctgctttctgtttcctctctctgcatcttctcttggcataggaagttattttactcatgctgtgttttttaatataagctttacaaaaaaagatgcattcccttcctgttcacactcttaccatgtttttgttcttccttaagaatgattgtgtgtgtgtgtgtgtgtgtgtgtaagtgtgtaagtgtaacatcatgggttttctttcttcacttgtaaagttttatctagaaatacttttacaggttatgttgaggtacacaaagataatgttctaagattgtgtattggatttggatttgtgtgtgtgtgtgtgtgtgtgtgtttaaagcatttgataaggtttaaatgttttttatacagagatttttgttcattaaactcaatctgcatcatggaaaaaaaaaa

SEQ ID NO: 419888 - DNA, 2721 bp, Homo sapiens
tgacctagaggatccccgtatccgtacaataggaaacttggagaacttccagaaattaatggcaaattggtgaagagtatattccgtgtggtgttccatgacagaaggcttcagtacactgagcatcagcagctagagggctggaggtggaaccgacctggagacagaattcttgacatagatatcccgatgtctgtgggtataatcgatcctagggctaatccaactcaactaaatacagtggagttcctgtgggaccctgcaaagaggacatctgtgtttattcaggtgcactgtattagcacagagttcactatgaggaaacatggtggagaaaagggggtgccattccgagtacaaatagataccttcaaggagaatgaaaacggggaatatactgagcacttacactcggccagctgccagatcaaagttttcaagcccaaaggtgcagacagaaagcaaaaaacggatagggaaaaaatggagaaacgaacacctcatgaaaaggagaaatatcagccttcctatgagacaaccatactcacagagtgttctccatggcccgagatcacgtatgtcaataactccccatcacctggcttcaacagttcccatagcagtttttctcttggggaaggaaatggttcaccaaaccaccagccagagccaccccctccagtcacagataacctcttaccaacaaccacacctcaggaagctcagcagtggttgcatcgaaatcgtttttctacattcacaaggcttttcacaaacttctcaggggcagatttattgaaattaactagagatgatgtgatccaaatctgtggccctgcagatggaatcagactttttaatgcattaaaaggccggatggtgcgtccaaggttaaccatttatgtttgtcaggaatcactgcagttgagggagcagcaacaacagcagcagcaacagcagcagaagcatgaggatggagactcaaatggtactttcttcgtttaccatgctatctatctagaagaactaacagctgttgaattgacagaaaaaattgctcagcttttcagcatttccccttgccagatcagccagatttacaagcaggggccaacaggaattcatgtgctcatcagtgatgagatgatacagaactttcaggaagaagcatgttttattctggacacaatgaaagcagaaaccaatgatagctatcatatcatactgaagtaggagtgcggcgtttcgtgcccagtggctgctccttccttcacctctgaaaacggccctcttgaagggggatatgaatggagatttgaaggtctgcaagaacctgactcgtctgactgtgtgtggaggagtccaggccatggaggcagaatcctggccctctgtgttggcccaagctcttgtggtacacacagattactgcccaatatgcagttctgcagctgttttagttaaatttctggaccttgttgttgttaaatatcagtagaaactctacataatttagagtgtatgtagggcataatgatgatgggaattgtgtgatgtttaacaggaagatcttaaattttgtgatatggagccctgtaatttttttcttatataaaaatgggtatctatattcataagactaggtcttcaatctctttgtactggtctcaaatgtactggtatctctgctttttgccacagtttgtccctgaaaactttatcagtgaggagaaatacagaattttccttttggttcccctgtaataccacaactaatagtattttcagctaacatttattgaccaggcagtgtgataaattttttgaatgaccatcttgtttaaccccctaatcacactatctgaagtaggtgctatagtgacccccaaccgaagatgaggaaatggagacacacagtggctaagtagcttgctaggtgccaggagctggcaggcagtgatgctgaaatccaaaccaggcaatctggccctccttattcaccctctcataccaccagtgccacccattataacctgtgttcacttcgcttattactgtggcccttctggtgactacaacataacactgagtatgaactgaggaattaaccactgaaagagacaaagcacacctaaataatgatgaacaaatcaagacctacaagaaatgaacacatagatgctttttaagtgtcattagttatcggaatcaaagaatttgaggtggtgacaactggggattatctgtaactccccaaatttactgttcttgaatgacattctcaaactatttattaatgagttagtctcatccctgctttctgtttcctctctctgcatcttctcttggcataggaagttattttactcatgctgtgttttttaatataagctttacaaaaaaagatgcattcccttcctgttcacactcttaccatgtttttgttcttccttaagaatgattgtgtgtgtgtgtgtgtgtgtgtgtaagtgtgtaagtgtaacatcatgggttttctttcttcacttgtaaagttttatctagaaatacttttacaggttatgttgaggtacacaaagataatgttctaagattgtgtattggatttggatttgtgtgtgtgtgtgtgtgtgtgtgtttaaagcatttgataaggtttaaatgttttttatacagagatttttgttcattaaactcaatctgcatcatggaaaaaaaaaa

SEQ ID NO: 419889 - DNA, 2694 bp, Homo sapiens
ttggggagaactacagaattcggtaaagacattgggggagacacatcctttcaccaaacttgtggttgatctgacagaaggcttcagtacactgagcatcagcagctagagggctggaggtggaaccgacctggagacagaattcttgacatagatatcccgatgtctgtgggtataatcgatcctagggctaatccaactcaactaaatacagtggagttcctgtgggaccctgcaaagaggacatctgtgtttattcaggtgcactgtattagcacagagttcactatgaggaaacatggtggagaaaagggggtgccattccgagtacaaatagataccttcaaggagaatgaaaacggggaatatactgagcacttacactcggccagctgccagatcaaagttttcaagcccaaaggtgcagacagaaagcaaaaaacggatagggaaaaaatggagaaacgaacacctcatgaaaaggagaaatatcagccttcctatgagacaaccatactcacagagtgttctccatggcccgagatcacgtatgtcaataactccccatcacctggcttcaacagttcccatagcagtttttctcttggggaaggaaatggttcaccaaaccaccagccagagccaccccctccagtcacagataacctcttaccaacaaccacacctcaggaagctcagcagtggttgcatcgaaatcgtttttctacattcacaaggcttttcacaaacttctcaggggcagatttattgaaattaactagagatgatgtgatccaaatctgtggccctgcagatggaatcagactttttaatgcattaaaaggccggatggtgcgtccaaggttaaccatttatgtttgtcaggaatcactgcagttgagggagcagcaacaacagcagcagcaacagcagcagaagcatgaggatggagactcaaatggtactttcttcgtttaccatgctatctatctagaagaactaacagctgttgaattgacagaaaaaattgctcagcttttcagcatttccccttgccagatcagccagatttacaagcaggggccaacaggaattcatgtgctcatcagtgatgagatgatacagaactttcaggaagaagcatgttttattctggacacaatgaaagcagaaaccaatgatagctatcatatcatactgaagtaggagtgcggcgtttcgtgcccagtggctgctccttccttcacctctgaaaacggccctcttgaagggggatatgaatggagatttgaaggtctgcaagaacctgactcgtctgactgtgtgtggaggagtccaggccatggaggcagaatcctggccctctgtgttggcccaagctcttgtggtacacacagattactgcccaatatgcagttctgcagctgttttagttaaatttctggaccttgttgttgttaaatatcagtagaaactctacataatttagagtgtatgtagggcataatgatgatgggaattgtgtgatgtttaacaggaagatcttaaattttgtgatatggagccctgtaatttttttcttatataaaaatgggtatctatattcataagactaggtcttcaatctctttgtactggtctcaaatgtactggtatctctgctttttgccacagtttgtccctgaaaactttatcagtgaggagaaatacagaattttccttttggttcccctgtaataccacaactaatagtattttcagctaacatttattgaccaggcagtgtgataaattttttgaatgaccatcttgtttaaccccctaatcacactatctgaagtaggtgctatagtgacccccaaccgaagatgaggaaatggagacacacagtggctaagtagcttgctaggtgccaggagctggcaggcagtgatgctgaaatccaaaccaggcaatctggccctccttattcaccctctcataccaccagtgccacccattataacctgtgttcacttcgcttattactgtggcccttctggtgactacaacataacactgagtatgaactgaggaattaaccactgaaagagacaaagcacacctaaataatgatgaacaaatcaagacctacaagaaatgaacacatagatgctttttaagtgtcattagttatcggaatcaaagaatttgaggtggtgacaactggggattatctgtaactccccaaatttactgttcttgaatgacattctcaaactatttattaatgagttagtctcatccctgctttctgtttcctctctctgcatcttctcttggcataggaagttattttactcatgctgtgttttttaatataagctttacaaaaaaagatgcattcccttcctgttcacactcttaccatgtttttgttcttccttaagaatgattgtgtgtgtgtgtgtgtgtgtgtgtaagtgtgtaagtgtaacatcatgggttttctttcttcacttgtaaagttttatctagaaatacttttacaggttatgttgaggtacacaaagataatgttctaagattgtgtattggatttggatttgtgtgtgtgtgtgtgtgtgtgtgtttaaagcatttgataaggtttaaatgttttttatacagagatttttgttcattaaactcaatctgcatcatggaaaaaaaaaa

SEQ ID NO: 419890 - DNA, 2032 bp, Homo sapiens
atgttcgccgggcaggcgaggaaagaggacgccatgattggttggcgctggggcggcggacggtggaagggcctggcgagtctaggttttacgcctgtgctggactttctccttccatgtttccaggccgtggggggctacagagggcgagaagtcggctcagcggaaacctggatttggttctaagccgtggggttgagaaggggtgaccggaagtgatcgtgggactgaccggaagcgaggcctggaggggaaagagagagcgagacctgggagggagggggcctccagcagaaaggggcgggggaaaaggtgcaaaagcagcgtgggagcgccgggctggcttcctgcggctgctgctggtctgactgggaagcagcaagccaccactacgaactctcaagaggagtgggagtgcgggagtccagagctgcctctgggaagtctgcagtagttgagcaaaggggtcctcacgttcctgagagctgggcaggggggattttggaacctggggcagccaagaacgagcagccaagggtacgggagattagttgtgcacagagcagtgctggtcgggcttgggggtggctggtgggcactgcgtgggaaaccttggtttgtagttttcttggtttgcgttactcctgttgggtagaattaccctccgcgcctttgtacaagacacggtgtctcctggggcaaggaaggagccaggatggcctgggctctgaagctgcctctggccgacgaagtgattgaatccgggttggtgcaggactttgatgctagcctgtccgggatcggccaggaactgggtgctggtgcctatagcatgagtgatgtccttgcattgcccatttttaagcaagaagagtcgagtttgcctcctgataatgagaataaaatcctgccttttcaatatgtgctttgtgctgctacctctccagcagtgaaactccatgatgaaaccctaacgtatctcaatcaaggacagtcttatgaaattcgaatgctagacaataggaaacttggagaacttccagaaattaatggcaaattggtgaagagtatattccgtgtggtgttccatgacagaaggcttcagtacactgagcatcagcagctagagggctggaggtggaaccgacctggagacagaattcttgacatagatatcccgatgtctgtgggtataatcgatcctagggctaatccaactcaactaaatacagtggagttcctgtgggaccctgcaaagaggacatctgtgtttattcaggtgcactgtattagcacagagttcactatgaggaaacatggtggagaaaagggggtgccattccgagtacaaatagataccttcaaggagaatgaaaacggggaatatactgagcacttacactcggccagctgccagatcaaagttttcaagcccaaaggtgcagacagaaagcaaaaaacggatagggaaaaaatggagaaacgaacacctcatgaaaaggagaaatatcagccttcctatgagacaaccatactcacagagtgttctccatggcccgagatcacgtatgtcaataactccccatcacctggcttcaacagttcccatagcagtttttctcttggggaaggaaatggttcaccaaaccaccagccagagccaccccctccagtcacagataacctcttaccaacaaccacacctcaggaagctcagcagtggttgcatcgaaatcgtttttctacattcacaaggcttttcacaaacttctcaggggcagatttattgaaattaactagagatgatgtgatccaaatctgtggccctgcagatggaatcagactttttaatgcattaaaaggccggatggtgcgtccaaggttaaccatttatgtttgtcaggaatcactgcagttgagggagcagcaacaacagcagcagcaacagcagcagaagcatgaggatggagactcaaatggtactttcttcgtttaccatgctatctatctagaaaagaaaaaaaaacccccc

SEQ ID NO: 419891 - DNA, 1139 bp, Homo sapiens
atgttcgccgggcaggcgaggaaagaggacgccatgattggttggcgctggggcggcggacggtggaagggcctggcgagtctaggttttacgcctgtgctggactttctccttccatgtttccaggccgtggggggctacagagggcgagaagtcggctcagcggaaacctggatttggttctaagccgtggggttgagaaggggtgaccggaagtgatcgtgggactgaccggaagcgaggcctggaggggaaagagagagcgagacctgggagggagggggcctccagcagaaaggggcgggggaaaaggtgcaaaagcagcgtgggagcgccgggctggcttcctgcggctgctgctggtctgactgggaagcagcaagccaccactacgaactctcaagaggagtgggagtgcgggagtccagagctgcctctgggaagtctgcagtagttgagcaaaggggtcctcacgttcctgagagctgggcaggggggattttggaacctggggcagccaagaacgagcagccaagggtacgggagattagttgtgcacagagcagtgctggtcgggcttgggggtggctggtgggcactgcgtgggaaaccttggtttgtagttttcttggtttgcgttactcctgttgggtagaattaccctccgcgcctttgtacaagacacggtgtctcctggggcaaggaaggagccaggatggcctgggctctgaagctgcctctggccgacgaagtgattgaatccgggttggtgcaggactttgatgctagcctgtccgggatcggccaggaactgggtgctggtgcctatagcatgagtgatgtccttgcattgcccatttttaagcaagaagagtcgagtttgcctcctgataatgagaataaaatcctgccttttcaatatgtgctttgtgctgctacctctccagcagtgaaactccatgatgaaaccctaacgtatctcaatcaaggacagtcttatgaaattcgaatgctagacaataggaaacttggagaacttccagaaattaatggcaaattggtgaagagtatattccgtgatccacaatgatagcatctccagcaattgcttctataatgaatagcatgagtcattctgc

SEQ ID NO: 419892 - DNA, 1218 bp, Homo sapiens
atgttcgccgggcaggcgaggaaagaggacgccatgattggttggcgctggggcggcggacggtggaagggcctggcgagtctaggttttacgcctgtgctggactttctccttccatgtttccaggccgtggggggctacagagggcgagaagtcggctcagcggaaacctggatttggttctaagccgtggggttgagaaggggtgaccggaagtgatcgtgggactgaccggaagcgaggcctggaggggaaagagagagcgagacctgggagggagggggcctccagcagaaaggggcgggggaaaaggtgcaaaagcagcgtgggagcgccgggctggcttcctgcggctgctgctggtctgactgggaagcagcaagccaccactacgaactctcaagaggagtgggagtgcgggagtccagagctgcctctgggaagtctgcagtagttgagcaaaggggtcctcacgttcctgagagctgggcaggggggattttggaacctggggcagccaagaacgagcagccaagggtacgggagattagttgtgcacagagcagtgctggtcgggcttgggggtggctggtgggcactgcgtgggaaaccttggtttgtagttttcttggtttgcgttactcctgttgggtagaattaccctccgcgcctttgtacaagacacggtgtctcctggggcaaggaaggagccaggatggcctgggctctgaagctgcctctggccgacgaagtgattgaatccgggttggtgcaggactttgatgctagcctgtccgggatcggccaggaactgggtgctggtgcctatagcatgaggtgagtgagattttcccagaccctacaccttctgaataacaaaggcggatagacactaagaaaaggggttgagtgggaaggaggtgtatagagttttaaaaagctgtttacgattggggaaaagggacttgttcttttgtcgctttgagtagttagtgttgtggaagaaatggaaaaagcgattgtaggcgatatgaagcctgtgcagaatgcagtggaagataggaagtggtccctgattagtaaccagatgaatgttgagaggcttttgtgccaatgtgggagacttggggactgatggtgtatgtgtgggtaagtctgacgttgtgtgaagaagggttacatatagcataggaatggtatctaggaagttgggaaatt

SEQ ID NO: 419893 - DNA, 493 bp, Homo sapiens
tttaagagatggggtcttgctatgttgcccacgcctaacagtcttgaactcctaacagtcgattggcctcaacaatcctcctacctcagcttctcgagtagctgggactacaggcatgttgtgcccagcttagatagtggaaggttatttcaggcagaaagaacaacttgctcattagacatcatcagtatgatgaaagcatagggttaagtggggaggttaattggggggaattgagacgggagaggagctaggagccaggtcatgaagggccttatatgccatgaagaaaattatggattgtaacattctggtaatgaggtgtccttataatacagcccattttaatagtcattaacaaagagaatctttgcctttatcatccattttcttatatttattccaggggcagatttattgaaattaactagagatgatgtgatccaaatctgtggccctgcagatggaatcagactttttaatgcattaaaag

SEQ ID NO: 419894 - DNA, 633 bp, Homo sapiens
ggcttctgattgttgttactaatactaataatattattatactgttgtatattcaaccaactgaattttattctttccgaatctagcaaagttaatttgtggtgaatataatatgtaattactttttcttctaggacagtcttatgaaattcgaatgctagacaataggaaacttggagaacttccagaaattaatggcaaattggtgaaggtaaaacgaataaatcattcttctgtacaatattttttactaatccttttgggattttaaattttgttgttgttgttaatgttcttttgcttccaatggcttaatggtatctcttgcctgcagtaatttgttggcagagtagtaagctgatgtgttatttctttggggtcagagtaagccccagtattcacatgaatttttcagagctgcagaaatagaacgcttaccactccctgtccagggtaatcacccctggctcagtgaagttcttttgggtggagtaaagtaacctccttgagatctttagagaagcctcagtgtcttttttgatacttagtcttatagcaaggaaaacagaagctactttgatgaagagcagttctcttagtctagattaacagttaggattttgataattcaca

SEQ ID NO: 419895 - DNA, 2437 bp, Homo sapiens
atgttcgccgggcaggcgaggaaagaggacgccatgattggttggcgctggggcggcggacggtggaagggcctggcgagtctaggttttacgcctgtgctggactttctccttccatgtttccaggccgtggggggctacagagggcgagaagtcggctcagcggaaacctggatttggttctaagccgtggggttgagaaggggtgaccggaagtgatcgtgggactgaccggaagcgaggcctggaggggaaagagagagcgagacctgggagggagggggcctccagcagaaaggggcgggggaaaaggtgcaaaagcagcgtgggagcgccgggctggcttcctgcggctgctgctggtctgactgggaagcagcaagccaccactacgaactctcaagaggagtgggagtgcgggagtccagagctgcctctgggaagtctgcagtagttgagcaaaggggtcctcacgttcctgagagctgggcaggggggattttggaacctggggcagccaagaacgagcagccaagggtacgggagattagttgtgcacagagcagtgctggtcgggcttgggggtggctggtgggcactgcgtgggaaaccttggtttgtagttttcttggtttgcgttactcctgttgggtagaattaccctccgcgcctttgtacaagacacggtgtctcctggggcaaggaaggagccaggatggcctgggctctgaagctgcctctggccgacgaagtgattgaatccgggttggtgcaggactttgatgctagcctgtccgggatcggccaggaactgggtgctggtgcctatagcatgagtgatgtccttgcattgcccatttttaagcaagaagagtcgagtttgcctcctgataatgagaataaaatcctgccttttcaatatgtgctttgtgctgctacctctccagcagtgaaactccatgatgaaaccctaacgtatctcaatcaaggacagtcttatgaaattcgaatgctagacaataggaaacttggagaacttccagaaattaatggcaaattggtgaagagtatattccgtgtggtgttccatgacagaaggcttcagtacactgagcatcagcagctagagggctggaggtggaaccgacctggagacagaattcttgacatagatatcccgatgtctgtgggtataatcgatcctagggctaatccaactcaactaaatacagtggagttcctgtgggaccctgcaaagaggacatctgtgtttattcaggtgcactgtattagcacagagttcactatgaggaaacatggtggagaaaagggggtgccattccgagtacaaatagataccttcaaggagaatgaaaacggggaatatactgagcacttacactcggccagctgccagatcaaagttttcaagcccaaaggtgcagacagaaagcaaaaaacggatagggaaaaaatggagaaacgaacacctcatgaaaaggagaaatatcagccttcctatgagacaaccatactcacagagtgttctccatggcccgagatcacgtatgtcaataactccccatcacctggcttcaacagttcccatagcagtttttctcttggggaaggaaatggttcaccaaaccaccagccagagccaccccctccagtcacagataacctcttaccaacaaccacacctcaggaagctcagcagtggttgcatcgaaatcgtttttctacattcacaaggcttttcacaaacttctcaggggcagatttattgaaattaactagagatgatgtgatccaaatctgtggccctgcagatggaatcagactttttaatgcattaaaaggccggatggtgcgtccaaggttaaccatttatgtttgtcaggaatcactgcagttgagggagcagcaacaacagcagcagcaacagcagcagaagcatgaggatggagactcaaatggtactttcttcgtttaccatgctatctatctagaagaactaacagctgttgaattgacagaaaaaattgctcagcttttcagcatttccccttgccagatcagccagatttacaagcaggggccaacaggaattcatgtgctcatcagtgatgagatgatacagaactttcaggaagaagcatgttttattctggacacaatgaaagcagaaaccaatgatagctatcatatcatactgaagtaggagtgcggcgtttcgtgcccagtggctgctccttccttcacctctgaaaacggccctcttgaagggggatatgaatggagatttgaaggtctgcaagaacctgactcgtctgactgtgtgtggaggagtccaggccatggaggcagaatcctggccctctgtgttggcccaagctcttgtggtacacgggccaggattctgcctccatggcct

SEQ ID NO: 419896 - DNA, 3606 bp, Homo sapiens
cttgtaaggcagtagaaagtctgattccatctgcagggccacagatttggatcacatcatctctagttaatggcgataaatctgcccctgagaagtttgtgaaaagccttgtgaatgtagaaaaacgaggtcgatgcgaccactgctgagcttcctgaggtgtggttgttggtaagaggttatctgtgactggagggggtggctctggcagctggccgcgtgggagcgccgggctggcttcctgcggctgctgctggtctgactgggaagcagcaagccaccactacgaactctcaagaggagtgggagtgcgggagtccagagctgcctctgggaagtctgcagtagttgagcaaaggggtcctcacgttcctgagagctgggcaggggggattttggaacctggggcagccaagaacgagcagccaagggtacgggagattagttgtgcacagagcagtgctggtcgggcttgggggtggctggtgggcactgcgtgggaaaccttggtttgtagttttcttggtttgcgttactcctgttgggtagaattaccctccgcgcctttgtacaagacacggtgtctcctggggcaaggaaggagccaggatggcctgggctctgaagctgcctctggccgacgaagtgattgaatccgggttggtgcaggactttgatgctagcctgtccgggatcggccaggaactgggtgctggtgcctatagcatgagtgatgtccttgcattgcccatttttaagcaagaagagtcgagtttgcctcctgataatgagaataaaatcctgccttttcaatatgtgctttgtgctgctacctctccagcagtgaaactccatgatgaaaccctaacgtatctcaatcaaggacagtcttatgaaattcgaatgctagacaataggaaacttggagaacttccagaaattaatggcaaattggtgaagagtatattccgtgtggtgttccatgacagaaggcttcagtacactgagcatcagcagctagagggctggaggtggaaccgacctggagacagaattcttgacatagatatcccgatgtctgtgggtataatcgatcctagggctaatccaactcaactaaatacagtggagttcctgtgggaccctgcaaagaggacatctgtgtttattcaggtgcactgtattagcacagagttcactatgaggaaacatggtggagaaaagggggtgccattccgagtacaaatagataccttcaaggagaatgaaaacggggaatatactgagcacttacactcggccagctgccagatcaaagttttcaagcccaaaggtgcagacagaaagcaaaaaacggatagggaaaaaatggagaaacgaacacctcatgaaaaggagaaatatcagccttcctatgagacaaccatactcacagagtgttctccatggcccgagatcacgtatgtcaataactccccatcacctggcttcaacagttcccatagcagtttttctcttggggaaggaaatggttcaccaaaccaccagccagagccaccccctccagtcacagataacctcttaccaacaaccacacctcaggaagctcagcagtggttgcatcgaaatcgtttttctacattcacaaggcttttcacaaacttctcaggggcagatttattgaaattaactagagatgatgtgatccaaatctgtggccctgcagatggaatcagactttttaatgcattaaaaggccggatggtgcgtccaaggttaaccatttatgtttgtcaggaatcactgcagttgagggagcagcaacaacagcagcagcaacagcagcagaagcatgaggatggagactcaaatggtactttcttcgtttaccatgctatctatctagaagaactaacagctgttgaattgacagaaaaaattgctcagcttttcagcatttccccttgccagatcagccagatttacaagcaggggccaacaggaattcatgtgctcatcagtgatgagatgatacagaactttcaggaagaagcatgttttattctggacacaatgaaagcagaaaccaatgatagctatcatatcatactgaagtaggagtgcggcgtttcgtgcccagtggctgctccttccttcacctctgaaaacggccctcttgaagggggatatgaatggagatttgaaggtctgcaagaacctgactcgtctgactgtgtgtggaggagtccaggccatggaggcagaatcctggccctctgtgttggcccaagctcttgtggtacacacagattactgcccaatatgcagttctgcagctgttttagttaaatttctggaccttgttgttgttaaatatcagtagaaactctacataatttagagtgtatgtagggcataatgatgatgggaattgtgtgatgtttaacaggaagatcttaaattttgtgatatggagccctgtaatttttttcttatataaaaatgggtatctatattcataagactaggtcttcaatctctttgtactggtctcaaatgtactggtatctctgctttttgccacagtttgtccctgaaaactttatcagtgaggagaaatacagaattttccttttggttcccctgtaataccacaactaatagtattttcagctaacatttattgaccaggcagtgtgataaattttttgaatgaccatcttgtttaaccccctaatcacactatctgaagtaggtgctatagtgacccccaaccgaagatgaggaaatggagacacacagtggctaagtagcttgctaggtgccaggagctggcaggcagtgatgctgaaatccaaaccaggcaatctggccctccttattcaccctctcataccaccagtgccacccattataacctgtgttcacttcgcttattactgtggcccttctggtgactacaacataacactgagtatgaactgaggaattaaccactgaaagagacaaagcacacctaaataatgatgaacaaatcaagacctacaagaaatgaacacatagatgctttttaagtgtcattagttatcggaatcaaagaatttgaggtggtgacaactggggattatctgtaactccccaaatttactgttcttgaatgacattctcaaactatttattaatgagttagtctcatccctgctttctgtttcctctctctgcatcttctcttggcataggaagttattttactcatgctgtgttttttaatataagctttacaaaaaaagatgcattcccttcctgttcacactcttaccatgtttttgttcttccttaagaatgattgtgtgtgtgtgtgtgtgtgtgtgtaagtgtgtaagtgtaacatcatgggttttctttcttcacttgtaaagttttatctagaaatacttttacaggttatgttgaggtacacaaagataatgttctaagattgtgtattggatttggatttgtgtgtgtgtgtgtgtgtgtgtgtttaaagcatttgataaggtttaaatgttttttatacagagatttttgttcattaaactcaatctgcatcatggaaaaaaaaaa

SEQ ID NO: 419897 - DNA, 3658 bp, Homo sapiens
atgttcgccgggcaggcgaggaaagaggacgccatgattggttggcgctggggcggcggacggtggaagggcctggcgagtctaggttttacgcctgtgctggactttctccttccatgtttccaggccgtggggggctacagagggcgagaagtcggctcagcggaaacctggatttggttctaagccgtggggttgagaaggggtgaccggaagtgatcgtgggactgaccggaagcgaggcctggaggggaaagagagagcgagacctgggagggagggggcctccagcagaaaggggcgggggaaaaggtgcaaaagcagcgtgggagcgccgggctggcttcctgcggctgctgctggtctgactgggaagcagcaagccaccactacgaactctcaagaggagtgggagtgcgggagtccagagctgcctctgggaagtctgcagtagttgagcaaaggggtcctcacgttcctgagagctgggcaggggggattttggaacctggggcagccaagaacgagcagccaagggtacgggagattagttgtgcacagagcagtgctggtcgggcttgggggtggctggtgggcactgcgtgggaaaccttggtttgtagttttcttggtttgcgttactcctgttgggtagaattaccctccgcgcctttgtacaagacacggtgtctcctggggcaaggaaggagccaggatggcctgggctctgaagctgcctctggccgacgaagtgattgaatccgggttggtgcaggactttgatgctagcctgtccgggatcggccaggaactgggtgctggtgcctatagcatgagtgatgtccttgcattgcccatttttaagcaagaagagtcgagtttgcctcctgataatgagaatatccatgatgaaaccctaacgtatctcaatcaaggacagtcttatgaaattcgaatgctagacaataggaaacttggagaacttccagaaattaatggcaaattggtgaagagtatattccgtgtggtgttccatgacagaaggcttcagtacactgagcatcagcagctagagggctggaggtggaaccgacctggagacagaattcttgacatagatatcccgatgtctgtgggtataatcgatcctagggctaatccaactcaactaaatacagtggagttcctgtgggaccctgcaaagaggacatctgtgtttattcaggtgcactgtattagcacagagttcactatgaggaaacatggtggagaaaagggggtgccattccgagtacaaatagataccttcaaggagaatgaaaacggggaatatactgagcacttacactcggccagctgccagatcaaagttttcaagcccaaaggtgcagacagaaagcaaaaaacggatagggaaaaaatggagaaacgaacacctcatgaaaaggagaaatatcagccttcctatgagacaaccatactcacagagtgttctccatggcccgagatcacgtatgtcaataactccccatcacctggcttcaacagttcccatagcagtttttctcttggggaaggaaatggttcaccaaaccaccagccagagccaccccctccagtcacagataacctcttaccaacaaccacacctcaggaagctcagcagtggttgcatcgaaatcgtttttctacattcacaaggcttttcacaaacttctcaggggcagatttattgaaattaactagagatgatgtgatccaaatctgtggccctgcagatggaatcagactttttaatgcattaaaaggccggatggtgcgtccaaggttaaccatttatgtttgtcaggaatcactgcagttgagggagcagcaacaacagcagcagcaacagcagcagaagcatgaggatggagactcaaatggtactttcttcgtttaccatgctatctatctagaagaactaacagctgttgaattgacagaaaaaattgctcagcttttcagcatttccccttgccagatcagccagatttacaagcaggggccaacaggaattcatgtgctcatcagtgatgagatgatacagaactttcaggaagaagcatgttttattctggacacaatgaaagcagaaaccaatgatagctatcatatcatactgaagtaggagtgcggcgtttcgtgcccagtggctgctccttccttcacctctgaaaacggccctcttgaagggggatatgaatggagatttgaaggtctgcaagaacctgactcgtctgactgtgtgtggaggagtccaggccatggaggcagaatcctggccctctgtgttggcccaagctcttgtggtacacacagattactgcccaatatgcagttctgcagctgttttagttaaatttctggaccttgttgttgttaaatatcagtagaaactctacataatttagagtgtatgtagggcataatgatgatgggaattgtgtgatgtttaacaggaagatcttaaattttgtgatatggagccctgtaatttttttcttatataaaaatgggtatctatattcataagactaggtcttcaatctctttgtactggtctcaaatgtactggtatctctgctttttgccacagtttgtccctgaaaactttatcagtgaggagaaatacagaattttccttttggttcccctgtaataccacaactaatagtattttcagctaacatttattgaccaggcagtgtgataaattttttgaatgaccatcttgtttaaccccctaatcacactatctgaagtaggtgctatagtgacccccaaccgaagatgaggaaatggagacacacagtggctaagtagcttgctaggtgccaggagctggcaggcagtgatgctgaaatccaaaccaggcaatctggccctccttattcaccctctcataccaccagtgccacccattataacctgtgttcacttcgcttattactgtggcccttctggtgactacaacataacactgagtatgaactgaggaattaaccactgaaagagacaaagcacacctaaataatgatgaacaaatcaagacctacaagaaatgaacacatagatgctttttaagtgtcattagttatcggaatcaaagaatttgaggtggtgacaactggggattatctgtaactccccaaatttactgttcttgaatgacattctcaaactatttattaatgagttagtctcatccctgctttctgtttcctctctctgcatcttctcttggcataggaagttattttactcatgctgtgttttttaatataagctttacaaaaaaagatgcattcccttcctgttcacactcttaccatgtttttgttcttccttaagaatgattgtgtgtgtgtgtgtgtgtgtgtgtaagtgtgtaagtgtaacatcatgggttttctttcttcacttgtaaagttttatctagaaatacttttacaggttatgttgaggtacacaaagataatgttctaagattgtgtattggatttggatttgtgtgtgtgtgtgtgtgtgtgtgtttaaagcatttgataaggtttaaatgttttttatacagagatttttgttcattaaactcaatctgcatcatggaaaaaaaaaa

SEQ ID NO: 419898 - DNA, 3094 bp, Homo sapiens
atgttcgccgggcaggcgaggaaagaggacgccatgattggttggcgctggggcggcggacggtggaagggcctggcgagtctaggaaggagccaggatggcctgggctctgaagctgcctctggccgacgaagtgattgaatccgggttggtgcaggactttgatgctagcctgtccgggatcggccaggaactgggtgctggtgcctatagcatgagtgatgtccttgcattgcccatttttaagcaagaagagtcgagtttgcctcctgataatgagaataaaatcctgccttttcaatatgtgctttgtgctgctacctctccagcagtgaaactccatgatgaaaccctaacgtatctcaatcaaggacagtcttatgaaattcgaatgctagacaataggaaacttggagaacttccagaaattaatggcaaattggtgaagagtatattccgtgtggtgttccatgacagaaggcttcagtacactgagcatcagcagctagagggctggaggtggaaccgacctggagacagaattcttgacatagatatcccgatgtctgtgggtataatcgatcctagggctaatccaactcaactaaatacagtggagttcctgtgggaccctgcaaagaggacatctgtgtttattcaggtgcactgtattagcacagagttcactatgaggaaacatggtggagaaaagggggtgccattccgagtacaaatagataccttcaaggagaatgaaaacggggaatatactgagcacttacactcggccagctgccagatcaaagttttcaagcccaaaggtgcagacagaaagcaaaaaacggatagggaaaaaatggagaaacgaacacctcatgaaaaggagaaatatcagccttcctatgagacaaccatactcacagagtgttctccatggcccgagatcacgtatgtcaataactccccatcacctggcttcaacagttcccatagcagtttttctcttggggaaggaaatggttcaccaaaccaccagccagagccaccccctccagtcacagataacctcttaccaacaaccacacctcaggaagctcagcagtggttgcatcgaaatcgtttttctacattcacaaggcttttcacaaacttctcaggggcagatttattgaaattaactagagatgatgtgatccaaatctgtggccctgcagatggaatcagactttttaatgcattaaaaggccggatggtgcgtccaaggttaaccatttatgtttgtcaggaatcactgcagttgagggagcagcaacaacagcagcagcaacagcagcagaagcatgaggatggagactcaaatggtactttcttcgtttaccatgctatctatctagaagaactaacagctgttgaattgacagaaaaaattgctcagcttttcagcatttccccttgccagatcagccagatttacaagcaggggccaacaggaattcatgtgctcatcagtgatgagatgatacagaactttcaggaagaagcatgttttattctggacacaatgaaagcagaaaccaatgatagctatcatatcatactgaagtaggagtgcggcgtttcgtgcccagtggctgctccttccttcacctctgaaaacggccctcttgaagggggatatgaatggagatttgaaggtctgcaagaacctgactcgtctgactgtgtgtggaggagtccaggccatggaggcagaatcctggccctctgtgttggcccaagctcttgtggtacacacagattactgcccaatatgcagttctgcagctgttttagttaaatttctggaccttgttgttgttaaatatcagtagaaactctacataatttagagtgtatgtagggcataatgatgatgggaattgtgtgatgtttaacaggaagatcttaaattttgtgatatggagccctgtaatttttttcttatataaaaatgggtatctatattcataagactaggtcttcaatctctttgtactggtctcaaatgtactggtatctctgctttttgccacagtttgtccctgaaaactttatcagtgaggagaaatacagaattttccttttggttcccctgtaataccacaactaatagtattttcagctaacatttattgaccaggcagtgtgataaattttttgaatgaccatcttgtttaaccccctaatcacactatctgaagtaggtgctatagtgacccccaaccgaagatgaggaaatggagacacacagtggctaagtagcttgctaggtgccaggagctggcaggcagtgatgctgaaatccaaaccaggcaatctggccctccttattcaccctctcataccaccagtgccacccattataacctgtgttcacttcgcttattactgtggcccttctggtgactacaacataacactgagtatgaactgaggaattaaccactgaaagagacaaagcacacctaaataatgatgaacaaatcaagacctacaagaaatgaacacatagatgctttttaagtgtcattagttatcggaatcaaagaatttgaggtggtgacaactggggattatctgtaactccccaaatttactgttcttgaatgacattctcaaactatttattaatgagttagtctcatccctgctttctgtttcctctctctgcatcttctcttggcataggaagttattttactcatgctgtgttttttaatataagctttacaaaaaaagatgcattcccttcctgttcacactcttaccatgtttttgttcttccttaagaatgattgtgtgtgtgtgtgtgtgtgtgtgtaagtgtgtaagtgtaacatcatgggttttctttcttcacttgtaaagttttatctagaaatacttttacaggttatgttgaggtacacaaagataatgttctaagattgtgtattggatttggatttgtgtgtgtgtgtgtgtgtgtgtgtttaaagcatttgataaggtttaaatgttttttatacagagatttttgttcattaaactcaatctgcatcatggaaaaaaaaaa

SEQ ID NO: 419899 - DNA, 3547 bp, Homo sapiens
gccaaaccttttcctaaactgttttatgtcattgtacattgctactgacaaaaggatgagagtgtggttttacattcccactgacaaaggatgggtatgtgtctttggtttgcaagtttagataaactgatagatacaaaaagctttttcttagaggaaatggcttgtaggaacatctcaatattagttgttattccacagaatgtaagatgaccttgaaatatatactcgttattgatttgtccttttcacgtggcttctaaggaattgtagaagttattttagtccttatagtaaatcagctgatatggttatatagatagtatagttgttgcctttctgagaatgaagacgttactgaatgtcctagatttatacattttagaactctgtttataatttccacagtccttttaggaacccctgtctatgattcctagaaacattctctttaacacttagtggttttagcagtgaatatctgtcatcacccacactgttgtggtcagggggatatcacagcaggtaatctaaatggaattcttgggatgaaactccaccaaggtgagtaatgtttatggctttccaaagcattgcagttaaatcattcagcaataaacctgcgtttgcaccattgccaggtattaatgtgagtcatttgttttattttagtgatgtccttgcattgcccatttttaagcaagaagagtcgagtttgcctcctgataatgagaataaaatcctgccttttcaatatgtgctttgtgctgctacctctccagcagtgaaactccatgatgaaaccctaacgtatctcaatcaaggacagtcttatgaaattcgaatgctagacaataggaaacttggagaacttccagaaattaatggcaaattggtgaagagtatattccgtgtggtgttccatgacagaaggcttcagtacactgagcatcagcagctagagggctggaggtggaaccgacctggagacagaattcttgacatagatatcccgatgtctgtgggtataatcgatcctagggctaatccaactcaactaaatacagtggagttcctgtgggaccctgcaaagaggacatctgtgtttattcaggtgcactgtattagcacagagttcactatgaggaaacatggtggagaaaagggggtgccattccgagtacaaatagataccttcaaggagaatgaaaacggggaatatactgagcacttacactcggccagctgccagatcaaagttttcaagcccaaaggtgcagacagaaagcaaaaaacggatagggaaaaaatggagaaacgaacacctcatgaaaaggagaaatatcagccttcctatgagacaaccatactcacagagtgttctccatggcccgagatcacgtatgtcaataactccccatcacctggcttcaacagttcccatagcagtttttctcttggggaaggaaatggttcaccaaaccaccagccagagccaccccctccagtcacagataacctcttaccaacaaccacacctcaggaagctcagcagtggttgcatcgaaatcgtttttctacattcacaaggcttttcacaaacttctcaggggcagatttattgaaattaactagagatgatgtgatccaaatctgtggccctgcagatggaatcagactttttaatgcattaaaaggccggatggtgcgtccaaggttaaccatttatgtttgtcaggaatcactgcagttgagggagcagcaacaacagcagcagcaacagcagcagaagcatgaggatggagactcaaatggtactttcttcgtttaccatgctatctatctagaagaactaacagctgttgaattgacagaaaaaattgctcagcttttcagcatttccccttgccagatcagccagatttacaagcaggggccaacaggaattcatgtgctcatcagtgatgagatgatacagaactttcaggaagaagcatgttttattctggacacaatgaaagcagaaaccaatgatagctatcatatcatactgaagtaggagtgcggcgtttcgtgcccagtggctgctccttccttcacctctgaaaacggccctcttgaagggggatatgaatggagatttgaaggtctgcaagaacctgactcgtctgactgtgtgtggaggagtccaggccatggaggcagaatcctggccctctgtgttggcccaagctcttgtggtacacacagattactgcccaatatgcagttctgcagctgttttagttaaatttctggaccttgttgttgttaaatatcagtagaaactctacataatttagagtgtatgtagggcataatgatgatgggaattgtgtgatgtttaacaggaagatcttaaattttgtgatatggagccctgtaatttttttcttatataaaaatgggtatctatattcataagactaggtcttcaatctctttgtactggtctcaaatgtactggtatctctgctttttgccacagtttgtccctgaaaactttatcagtgaggagaaatacagaattttccttttggttcccctgtaataccacaactaatagtattttcagctaacatttattgaccaggcagtgtgataaattttttgaatgaccatcttgtttaaccccctaatcacactatctgaagtaggtgctatagtgacccccaaccgaagatgaggaaatggagacacacagtggctaagtagcttgctaggtgccaggagctggcaggcagtgatgctgaaatccaaaccaggcaatctggccctccttattcaccctctcataccaccagtgccacccattataacctgtgttcacttcgcttattactgtggcccttctggtgactacaacataacactgagtatgaactgaggaattaaccactgaaagagacaaagcacacctaaataatgatgaacaaatcaagacctacaagaaatgaacacatagatgctttttaagtgtcattagttatcggaatcaaagaatttgaggtggtgacaactggggattatctgtaactccccaaatttactgttcttgaatgacattctcaaactatttattaatgagttagtctcatccctgctttctgtttcctctctctgcatcttctcttggcataggaagttattttactcatgctgtgttttttaatataagctttacaaaaaaagatgcattcccttcctgttcacactcttaccatgtttttgttcttccttaagaatgattgtgtgtgtgtgtgtgtgtgtgtgtaagtgtgtaagtgtaacatcatgggttttctttcttcacttgtaaagttttatctagaaatacttttacaggttatgttgaggtacacaaagataatgttctaagattgtgtattggatttggatttgtgtgtgtgtgtgtgtgtgtgtgtttaaagcatttgataaggtttaaatgttttttatacagagatttttgttcattaaactcaatctgcatcatggaaaaaaaaaa

SEQ ID NO: 419900 - DNA, 3663 bp, Homo sapiens
atgttcgccgggcaggcgaggaaagaggacgccatgattggttggcgctggggcggcggacggtggaagggcctggcgagtctaggttttacgcctgtgctggactttctccttccatgtttccaggccgtggggggctacagagggcgagaagtcggctcagcggaaacctggatttggttctaagccgtggggttgagaaggggtgaccggaagtgatcgtgggactgaccggaagcgaggcctggaggggaaagagagagcgagacctgggagggagggggcctccagcagaaaggggcgggggaaaaggtgcaaaagcagcgtgggagcgccgggctggcttcctgcggctgctgctggtctgactgggaagcagcaagccaccactacgaactctcaagaggagtgggagtgcgggagtccagagctgcctctgggaagtctgcagtagttgagcaaaggggtcctcacgttcctgagagctgggcaggggggattttggaacctggggcagccaagaacgagcagccaagggtacgggagattagttgtgcacagagcagtgctggtcgggcttgggggtggctggtgggcactgcgtgggaaaccttggtttgtagttttcttggtttgcgttactcctgttgggtagaattaccctccgcgcctttgtacaagacacggtgtctcctggggcaaggaaggagccaggatggcctgggctctgaagctgcctctggccgacgaagtgattgaatccgggttggtgcaggactttgatgctagcctgtccgggatcggccaggaactgggtgctggtgcctatagcatgagtgatgtccttgcattgcccatttttaagcaagaagagtcgagtttgcctcctgataatgagaataaaatcctgccttttcaatatgtgctttgtgctgctacctctccagcagtgaaactccatgatgaaaccctaacgtatctcaatcaaggacagtcttatgaaattcgaatgctagacaataggaaacttggagaacttccagaaattaatggcaaattggtgaagagtatattccgtgtggtgttccatgacagaaggcttcagtacactgagcatcagcagctagagggctggaggtggaaccgacctggagacagaattcttgacatagatatcccgatgtctgtgggtataatcgatcctagggctaatccaactcaactaaatacagtggagttcctgtgggaccctgcaaagaggacatctgtgtttattcaggtgcactgtattagcacagagttcactatgaggaaacatggtggagaaaagggggtgccattccgagtacaaatagataccttcaaggagaatgaaaacggggaatatactgagcacttacactcggccagctgccagatcaaagttttcaagcccaaaggtgcagacagaaagcaaaaaacggatagggaaaaaatggagaaacgaacacctcatgaaaaggagaaatatcagccttcctatgagacaaccatactcacagagtgttctccatggcccgagatcacgtatgtcaataactccccatcacctggcttcaacagttcccatagcagtttttctcttggggaaggaacctcttaccaacaaccacacctcaggaagctcagcagtggttgcatcgaaatcgtttttctacattcacaaggcttttcacaaacttctcaggggcagatttattgaaattaactagagatgatgtgatccaaatctgtggccctgcagatggaatcagactttttaatgcattaaaaggccggatggtgcgtccaaggttaaccatttatgtttgtcaggaatcactgcagttgagggagcagcaacaacagcagcagcaacagcagcagaagcatgaggatggagactcaaatggtactttcttcgtttaccatgctatctatctagaagaactaacagctgttgaattgacagaaaaaattgctcagcttttcagcatttccccttgccagatcagccagatttacaagcaggggccaacaggaattcatgtgctcatcagtgatgagatgatacagaactttcaggaagaagcatgttttattctggacacaatgaaagcagaaaccaatgatagctatcatatcatactgaagtaggagtgcggcgtttcgtgcccagtggctgctccttccttcacctctgaaaacggccctcttgaagggggatatgaatggagatttgaaggtctgcaagaacctgactcgtctgactgtgtgtggaggagtccaggccatggaggcagaatcctggccctctgtgttggcccaagctcttgtggtacacacagattactgcccaatatgcagttctgcagctgttttagttaaatttctggaccttgttgttgttaaatatcagtagaaactctacataatttagagtgtatgtagggcataatgatgatgggaattgtgtgatgtttaacaggaagatcttaaattttgtgatatggagccctgtaatttttttcttatataaaaatgggtatctatattcataagactaggtcttcaatctctttgtactggtctcaaatgtactggtatctctgctttttgccacagtttgtccctgaaaactttatcagtgaggagaaatacagaattttccttttggttcccctgtaataccacaactaatagtattttcagctaacatttattgaccaggcagtgtgataaattttttgaatgaccatcttgtttaaccccctaatcacactatctgaagtaggtgctatagtgacccccaaccgaagatgaggaaatggagacacacagtggctaagtagcttgctaggtgccaggagctggcaggcagtgatgctgaaatccaaaccaggcaatctggccctccttattcaccctctcataccaccagtgccacccattataacctgtgttcacttcgcttattactgtggcccttctggtgactacaacataacactgagtatgaactgaggaattaaccactgaaagagacaaagcacacctaaataatgatgaacaaatcaagacctacaagaaatgaacacatagatgctttttaagtgtcattagttatcggaatcaaagaatttgaggtggtgacaactggggattatctgtaactccccaaatttactgttcttgaatgacattctcaaactatttattaatgagttagtctcatccctgctttctgtttcctctctctgcatcttctcttggcataggaagttattttactcatgctgtgttttttaatataagctttacaaaaaaagatgcattcccttcctgttcacactcttaccatgtttttgttcttccttaagaatgattgtgtgtgtgtgtgtgtgtgtgtgtaagtgtgtaagtgtaacatcatgggttttctttcttcacttgtaaagttttatctagaaatacttttacaggttatgttgaggtacacaaagataatgttctaagattgtgtattggatttggatttgtgtgtgtgtgtgtgtgtgtgtgtttaaagcatttgataaggtttaaatgttttttatacagagatttttgttcattaaactcaatctgcatcatggaaaaaaaaaa

SEQ ID NO: 419901 - DNA, 2045 bp, Homo sapiens
tggcaggaaccgaaacccggagcggccgaagctcagcgctccgctggggcagagggtcgcggcggctgggaacgccgctccccgacgcaccggccgcccccagcgcagcgcgctccgcggggtgctgatctgcctcttctccaagaaactcaaccactagtgacaatgaccagcctcctgactactccttctccaagaggatggtgcgtccaaggttaaccatttatgtttgtcaggaatcactgcagttgagggagcagcaacaacagcagcagcaacagcagcagaagcatgaggatggagactcaaatggtactttcttcgtttaccatgctatctatctagaagaactaacagctgttgaattgacagaaaaaattgctcagcttttcagcatttccccttgccagatcagccagatttacaagcaggggccaacaggaattcatgtgctcatcagtgatgagatgatacagaactttcaggaagaagcatgttttattctggacacaatgaaagcagaaaccaatgatagctatcatatcatactgaagtaggagtgcggcgtttcgtgcccagtggctgctccttccttcacctctgaaaacggccctcttgaagggggatatgaatggagatttgaaggtctgcaagaacctgactcgtctgactgtgtgtggaggagtccaggccatggaggcagaatcctggccctctgtgttggcccaagctcttgtggtacacacagattactgcccaatatgcagttctgcagctgttttagttaaatttctggaccttgttgttgttaaatatcagtagaaactctacataatttagagtgtatgtagggcataatgatgatgggaattgtgtgatgtttaacaggaagatcttaaattttgtgatatggagccctgtaatttttttcttatataaaaatgggtatctatattcataagactaggtcttcaatctctttgtactggtctcaaatgtactggtatctctgctttttgccacagtttgtccctgaaaactttatcagtgaggagaaatacagaattttccttttggttcccctgtaataccacaactaatagtattttcagctaacatttattgaccaggcagtgtgataaattttttgaatgaccatcttgtttaaccccctaatcacactatctgaagtaggtgctatagtgacccccaaccgaagatgaggaaatggagacacacagtggctaagtagcttgctaggtgccaggagctggcaggcagtgatgctgaaatccaaaccaggcaatctggccctccttattcaccctctcataccaccagtgccacccattataacctgtgttcacttcgcttattactgtggcccttctggtgactacaacataacactgagtatgaactgaggaattaaccactgaaagagacaaagcacacctaaataatgatgaacaaatcaagacctacaagaaatgaacacatagatgctttttaagtgtcattagttatcggaatcaaagaatttgaggtggtgacaactggggattatctgtaactccccaaatttactgttcttgaatgacattctcaaactatttattaatgagttagtctcatccctgctttctgtttcctctctctgcatcttctcttggcataggaagttattttactcatgctgtgttttttaatataagctttacaaaaaaagatgcattcccttcctgttcacactcttaccatgtttttgttcttccttaagaatgattgtgtgtgtgtgtgtgtgtgtgtgtaagtgtgtaagtgtaacatcatgggttttctttcttcacttgtaaagttttatctagaaatacttttacaggttatgttgaggtacacaaagataatgttctaagattgtgtattggatttggatttgtgtgtgtgtgtgtgtgtgtgtgtttaaagcatttgataaggtttaaatgttttttatacagagatttttgttcattaaactcaatctgcatcatggaaaaaaaaaa

SEQ ID NO: 419902 - DNA, 2056 bp, Homo sapiens
atgttcgccgggcaggcgaggaaagaggacgccatgattggttggcgctggggcggcggacggtggaagggcctggcgagtctaggttttacgcctgtgctggactttctccttccatgtttccaggccgtggggggctacagagggcgagaagtcggctcagcggaaacctggatttggttctaagccgtggggttgagaaggggtgaccggaagtgatcgtgggactgaccggaagcgaggcctggaggggaaagagagagcgagacctgggagggagggggcctccagcagaaaggggcgggggaaaaggtgcaaaagcagcgtgggagcgccgggctggcttcctgcggctgctgctggtctgactgggaagcagcaagccaccactacgaactctcaagaggagtgggagtgcgggagtccagagctgcctctgggaagtctgcagtagttgagcaaaggggtcctcacgttcctgagagctgggcaggggggattttggaacctggggcagccaagaacgagcagccaagggtacgggagattagttgtgcacagagcagtgctggtcgggcttgggggtggctggtgggcactgcgtgggaaaccttggtttgtagttttcttggtttgcgttactcctgttgggtagaattaccctccgcgcctttgtacaagacacggtgtctcctggggcaaggaaggagccaggatggcctgggctctgaagctgcctctggccgacgaagtgattgaatccgggttggtgcaggactttgatgctagcctgtccgggatcggccaggaactgggtgctggtgcctatagcatgagtgatgtccttgcattgcccatttttaagcaagaagagtcgagtttgcctcctgataatgagaataaaatcctgccttttcaatatgtgctttgtgctgctacctctccagcagtgaaactccatgatgaaaccctaacgtatctcaatcaaggacagtcttatgaaattcgaatgctagacaataggaaacttggagaacttccagaaattaatggcaaattggtgaagagtatattccgtgtggtgttccatgacagaaggcttcagtacactgagcatcagcagctagagggctggaggtggaaccgacctggagacagaattcttgacatagatatcccgatgtctgtgggtataatcgatcctagggctaatccaactcaactaaatacagtggagttcctgtgggaccctgcaaagaggacatctgtgtttattcaggtgcactgtattagcacagagttcactatgaggaaacatggtggagaaaagggggtgccattccgagtacaaatagataccttcaaggagaatgaaaacggggaatatactgagcacttacactcggccagctgccagatcaaagttttcaagcccaaaggtgcagacagaaagcaaaaaacggatagggaaaaaatggagaaacgaacacctcatgaaaaggagaaatatcagccttcctatgagacaaccatactcacagagtgttctccatggcccgagatcacgtatgtcaataactccccatcacctggcttcaacagttcccatagcagtttttctcttggggaaggaaatggttcaccaaaccaccagccagagccaccccctccagtcacagataacctcttaccaacaaccacacctcaggaagctcagcagtggttgcatcgaaatcgtttttctacattcacaaggcttttcacaaacttctcaggggcagatttattgaaattaactagaatcctggccctctgtgttggcccaagctcttgtggtacacacagattactgcccaatatgcagttctgcagctgttttagttaaatttctggaccttgttgttgttaaatatcagtagaaactctacataatttagagtgtatgtagggcataatgatgatgggaattgtgtgatgtttaacaggaagatcttaaattttgtgatatggagccctgtaatttttttcttatataaaaatgggtatctatattcat

SEQ ID NO: 419903 - DNA, 1429 bp, Homo sapiens
atgttcgccgggcaggcgaggaaagaggacgccatgattggttggcgctggggcggcggacggtggaagggcctggcgagtctaggttttacgcctgtgctggactttctccttccatgtttccaggccgtggggggctacagagggcgagaagtcggctcagcggaaacctggatttggttctaagccgtggggttgagaaggggtgaccggaagtgatcgtgggactgaccggaagcgaggcctggaggggaaagagagagcgagacctgggagggagggggcctccagcagaaaggggcgggggaaaaggtgcaaaagcagcgtgggagcgccgggctggcttcctgcggctgctgctggtctgactgggaagcagcaagccaccactacgaactctcaagaggagtgggagtgcgggagtccagagctgcctctgggaagtctgcagtagttgagcaaaggggtcctcacgttcctgagagctgggcaggggggattttggaacctggggcagccaagaacgagcagccaagggtacgggagattagttgtgcacagagcagtgctggtcgggcttgggggtggctggtgggcactgcgtgggaaaccttggtttgtagttttcttggtttgcgttactcctgttgggtagaattaccctccgcgcctttgtacaagacacggtgtctcctggggcaaggaaggagccaggatggcctgggctctgaagctgcctctggccgacgaagtgattgaatccgggttggtgcaggactttgatgctagcctgtccgggatcggccaggaactgggtgctggtgcctatagcatgagtgatgtccttgcattgcccatttttaagcaagaagagtcgagtttgcctcctgataatgagaataaaatcctgccttttcaatatgtgctttgtgctgctacctctccagcagtgaaactccatgatgaaaccctaacgtatctcaatcaaggacagtcttatgaaattcgaatgctagacaatagggtttcatcatggagtttcactgctggagaggtagcgggaccccgagtgccactccagacctcagcccactgaccagtgccactcctagccagacgccagtgcgtctccgaagacaacagaaccaacgactccttcgagatacggcacggaccacaagccagttatggacgacatccccttgggggagctcacaggacccggtgagctggcacagccatccggcgcaaaactcatcgaagattctgttcactgggcaatccccaaagaagcaagggacctaccgagggaatccatgcacataccttgaagggcggaggcacgtccaggtgcgaagcgtgccaaaacgggaagacctgggagcacagagccatacacccgaagacagggacagctcaggaatcccag

SEQ ID NO: 419904 - DNA, 2475 bp, Homo sapiens
gatagtctcgatctcctgacctcgtgatccgcccgtctcggcctcccaaagtgctgggactgcaggcgtgagccaccgcgcccggccaacgtcattttcttttcaggagtcccttctgttatttagcaagacacactactacaatggagaaaaaagatgccccctccttcaagccctgagatcttcaggactttggcgaaaagtctgcgcccgaagagacccaggaaggattcttggaattgtagtccaaaggcatcccgccttctgcgcagactcacaagtccctgtggacggaattcttgaagtgtagcgccgctcagtccttccaccggaagtgtccgatcggaatcagccctgtccgagaggtgagtccgggtttggggatccagatgtccagccccgtgtccccctccaaacatccagtccctctcatattgcctttgaaattagcagcctctgggtgaccagaccttggccctcagaggaatcccggagaaaggtagaaccagcttcggcgttgggaacgcaggcgcgcttacgcatttagtgagggtttggcggtctccatagttaccgccgccgcgcgtgacgtcatagtggagcgctgagggcttggtggcgtggggtgggggctgtcctactgatcctgaatttggggtcactggtaagaggagttgcccattccagccaggtggaacggggaggggtagccacatgtctcagatctgccattgtctgcgaaaagaaactgctgcgaggaccatccccaatcccctgcttcccttgggaagagtaaccgccgttttgtaggacacttggggacaaccccgcttgtcctgaaatttattgacacggtaaatagtatttcctgtgtgccgaggatgcagttaaaccaacactgaccccctgcccttgagaaacacaagatggctacagaaccaaagaaagctgcagcccagaactctccagaggatgaaggacttctgatagtgaagatagaagaggaagaatttatccatgggcaggacacttgcttacagagaagtgaactccttaagcaggagctctgcaggcagctttttaggcagttctgctaccaggattctcctggacctcgcgaggcactgagccgcctccgggagctctgctgtcagtggctgaagccagagatccataccaaggaacagattctggaactgctggtgctagagcagttcctgaccatcctgccaggagatttgcaggcctgggtacatgaacattacccagagagtggagaggaggcagtgaccatactagaagatttggagagaggcactgatgaagcagtactccaggttcaagcccatgaacatggacaagaaatattccagaaaaaagtgtcacctcctggaccagcacttaatgtcaagttacagccagtggagaccaaggcccattttgattcatcagaaccccagctcctatgggactgtgataatgagagtgaaaacagtagatccatgccaaagctggaaatttttgaaaaaattgaatcacagagaattatatctggaagaatctcaggatacatatcagaagcatctggtgagtctcaagacatctgtaagtctgcaggcagggtaaagagacaatgggaaaaagaatcaggggagtctcagagactctcgtctgcccaggatgaaggttttggtaaaatcctcacccacaaaaatacagtcagaggtgaaataataagccacgatggatgtgagaggagattaaatctgaactcaaatgaattcacacaccagaaatcttgtaaacatggtacctgtgaccagagcttcaaatggaactcagattttattaaccatcaaataatttatgctggagaaaaaaatcaccaatatggaaaatctttcaagagcccaaaacttgctaaacatgcagcagttttcagtggagataaaactcatcagtgtaatgaatgtgggaaagctttcaggcacagctcaaaacttgctaggcatcagagaatccacactggagagagatgctatgaatgtaatgaatgtgggaaaagctttgcagagagctcagatcttactagacatcggcgaattcacactggggaaagaccctttggttgcaaagaatgtgggagagcattcaacctgaactcacatcttatcaggcatcagagaattcacaccagagagaaaccctacgagtgtagtgaatgtgggaaaaccttccgagtgagctcacatcttattcgacactttagaattcacactggagaaaaaccctatgaatgcagtgagtgtggaagagccttcagtcagagctcaaaccttagtcaacaccagagaattcacatgagggaaaacctattaatgtaaggaacttaaatttgtaagtaaatgctgaggaaatggcacaatatgaaaaatattaaataaaaaataaatattgggcaagatggaagactga

SEQ ID NO: 419905 - DNA, 2213 bp, Homo sapiens
gatagtctcgatctcctgacctcgtgatccgcccgtctcggcctcccaaagtgctgggactgcaggcgtgagccaccgcgcccggccaacgtcattttcttttcaggagtcccttctgttatttagcaagacacactactacaatggagaaaaaagatgccccctccttcaagccctgagatcttcaggactttggcgaaaagtctgcgcccgaagagacccaggaaggattcttggaattgtagtccaaaggcatcccgccttctgcgcagactcacaagtccctgtggacggaattcttgaagtgtagcgccgctcagtccttccaccggaagtgtccgatcggaatcagccctgtccgagaggtgagtccgggtttggggatccagatgtccagccccgtgtccccctccaaacatccagtccctctcatattgcctttgaaattagcagcctctgggtgaccagaccttggccctcagaggaatcccggagaaaggtagaaccagcttcggcgttgggaacgcaggcgcgcttacgcatttagtgagggtttggcggtctccatagttaccgccgccgcgcgtgacgtcatagtggagcgctgagggcttggtggcgtggggtgggggctgtcctactgatcctgaatttggggtcactgatggctacagaaccaaagaaagctgcagcccagaactctccagaggatgaaggacttctgatagtgaagatagaagaggaagaatttatccatgggcaggacacttgcttacagagaagtgaactccttaagcaggagctctgcaggcagctttttaggcagttctgctaccaggattctcctggacctcgcgaggcactgagccgcctccgggagctctgctgtcagtggctgaagccagagatccataccaaggaacagattctggaactgctggtgctagagcagttcctgaccatcctgccaggagatttgcaggcctgggtacatgaacattacccagagagtggagaggaggcagtgaccatactagaagatttggagagaggcactgatgaagcagtactccaggttcaagcccatgaacatggacaagaaatattccagaaaaaagtgtcacctcctggaccagcacttaatgtcaagttacagccagtggagaccaaggcccattttgattcatcagaaccccagctcctatgggactgtgataatgagagtgaaaacagtagatccatgccaaagctggaaatttttgaaaaaattgaatcacagagaattatatctggaagaatctcaggatacatatcagaagcatctggtgagtctcaagacatctgtaagtctgcaggcagggtaaagagacaatgggaaaaagaatcaggggagtctcagagactctcgtctgcccaggatgaaggttttggtaaaatcctcacccacaaaaatacagtcagaggtgaaataataagccacgatggatgtgagaggagattaaatctgaactcaaatgaattcacacaccagaaatcttgtaaacatggtacctgtgaccagagcttcaaatggaactcagattttattaaccatcaaataatttatgctggagaaaaaaatcaccaatatggaaaatctttcaagagcccaaaacttgctaaacatgcagcagttttcagtggagataaaactcatcagtgtaatgaatgtgggaaagctttcaggcacagctcaaaacttgctaggcatcagagaatccacactggagagagatgctatgaatgtaatgaatgtgggaaaagctttgcagagagctcagatcttactagacatcggcgaattcacactggggaaagaccctttggttgcaaagaatgtgggagagcattcaacctgaactcacatcttatcaggcatcagagaattcacaccagagagaaaccctacgagtgtagtgaatgtgggaaaaccttccgagtgagctcacatcttattcgacactttagaattcacactggagaaaaaccctatgaatgcagtgagtgtggaagagccttcagtcagagctcaaaccttagtcaacaccagagaattcacatgagggaaaacctattaatgtaaggaacttaaatttgtaagtaaatgctgaggaaatggcacaatatgaaaaatattaaataaaaaataaatattgggcaagatggaagactga

SEQ ID NO: 419906 - DNA, 1914 bp, Homo sapiens
gatagtctcgatctcctgacctcgtgatccgcccgtctcggcctcccaaagtgctgggactgcaggcgtgagccaccgcgcccggccaacgtcattttcttttcaggagtcccttctgttatttagcaagacacactactacaatggagaaaaaagatgccccctccttcaagccctgagatcttcaggactttggcgaaaagtctgcgcccgaagagacccaggaaggattcttggaattgtagtccaaaggcatcccgccttctgcgcagactcacaagtccctgtggacggaattcttgaagtgtagcgccgctcagtccttccaccggaagtgtccgatcggaatcagccctgtccgagagatggctacagaaccaaagaaagctgcagcccagaactctccagaggatgaaggacttctgatagtgaagatagaagaggaagaatttatccatgggcaggacacttgcttacagagaagtgaactccttaagcaggagctctgcaggcagctttttaggcagttctgctaccaggattctcctggacctcgcgaggcactgagccgcctccgggagctctgctgtcagtggctgaagccagagatccataccaaggaacagattctggaactgctggtgctagagcagttcctgaccatcctgccaggagatttgcaggcctgggtacatgaacattacccagagagtggagaggaggcagtgaccatactagaagatttggagagaggcactgatgaagcagtactccaggttcaagcccatgaacatggacaagaaatattccagaaaaaagtgtcacctcctggaccagcacttaatgtcaagttacagccagtggagaccaaggcccattttgattcatcagaaccccagctcctatgggactgtgataatgagagtgaaaacagtagatccatgccaaagctggaaatttttgaaaaaattgaatcacagagaattatatctggaagaatctcaggatacatatcagaagcatctggtgagtctcaagacatctgtaagtctgcaggcagggtaaagagacaatgggaaaaagaatcaggggagtctcagagactctcgtctgcccaggatgaaggttttggtaaaatcctcacccacaaaaatacagtcagaggtgaaataataagccacgatggatgtgagaggagattaaatctgaactcaaatgaattcacacaccagaaatcttgtaaacatggtacctgtgaccagagcttcaaatggaactcagattttattaaccatcaaataatttatgctggagaaaaaaatcaccaatatggaaaatctttcaagagcccaaaacttgctaaacatgcagcagttttcagtggagataaaactcatcagtgtaatgaatgtgggaaagctttcaggcacagctcaaaacttgctaggcatcagagaatccacactggagagagatgctatgaatgtaatgaatgtgggaaaagctttgcagagagctcagatcttactagacatcggcgaattcacactggggaaagaccctttggttgcaaagaatgtgggagagcattcaacctgaactcacatcttatcaggcatcagagaattcacaccagagagaaaccctacgagtgtagtgaatgtgggaaaaccttccgagtgagctcacatcttattcgacactttagaattcacactggagaaaaaccctatgaatgcagtgagtgtggaagagccttcagtcagagctcaaaccttagtcaacaccagagaattcacatgagggaaaacctattaatgtaaggaacttaaatttgtaagtaaatgctgaggaaatggcacaatatgaaaaatattaaataaaaaataaatattgggcaagatggaagactga

SEQ ID NO: 419907 - DNA, 2403 bp, Homo sapiens
gatagtctcgatctcctgacctcgtgatccgcccgtctcggcctcccaaagtgctgggactgcaggcgtgagccaccgcgcccggccaacgtcattttcttttcaggagtcccttctgttatttagcaagacacactactacaatggagaaaaaagatgccccctccttcaagccctgagatcttcaggactttggcgaaaagtctgcgcccgaagagacccaggaaggattcttggaattgtagtccaaaggcatcccgccttctgcgcagactcacaagtccctgtggacggaattcttgaagtgtagcgccgctcagtccttccaccggaagtgtccgatcggaatcagccctgtccgagaggtgagtccgggtttggggatccagatgtccagccccgtgtccccctccaaacatccagtccctctcatattgcctttgaaattagcagcctctgggtgaccagaccttggccctcagaggaatcccggagaaaggtagaaccagcttcggcgttgggaacgcaggcgcgcttacgcatttagtgagggtttggcggtctccatagttaccgccgccgcgcgtgacgtcatagtggagcgctgagggcttggtggcgtggggtgggggctgtcctactgatcctgaatttggggtcactggtaagaggagttgcccattccagccaggtggaacggggaggggtagccacatgtctcagatctgccattgtctgcgaaaagaaactgctgcgaggaccatccccaatcccctgcttcccttgggaagagtaaccgccgttttgtaggacacttggggacaaccccgcttgtcctgaaatttattgacacgatggctacagaaccaaagaaagctgcagcccagaactctccagaggatgaaggacttctgatagtgaagatagaagaggaagaatttatccatgggcaggacacttgcttacagagaagtgaactccttaagcaggagctctgcaggcagctttttaggcagttctgctaccaggattctcctggacctcgcgaggcactgagccgcctccgggagctctgctgtcagtggctgaagccagagatccataccaaggaacagattctggaactgctggtgctagagcagttcctgaccatcctgccaggagatttgcaggcctgggtacatgaacattacccagagagtggagaggaggcagtgaccatactagaagatttggagagaggcactgatgaagcagtactccaggttcaagcccatgaacatggacaagaaatattccagaaaaaagtgtcacctcctggaccagcacttaatgtcaagttacagccagtggagaccaaggcccattttgattcatcagaaccccagctcctatgggactgtgataatgagagtgaaaacagtagatccatgccaaagctggaaatttttgaaaaaattgaatcacagagaattatatctggaagaatctcaggatacatatcagaagcatctggtgagtctcaagacatctgtaagtctgcaggcagggtaaagagacaatgggaaaaagaatcaggggagtctcagagactctcgtctgcccaggatgaaggttttggtaaaatcctcacccacaaaaatacagtcagaggtgaaataataagccacgatggatgtgagaggagattaaatctgaactcaaatgaattcacacaccagaaatcttgtaaacatggtacctgtgaccagagcttcaaatggaactcagattttattaaccatcaaataatttatgctggagaaaaaaatcaccaatatggaaaatctttcaagagcccaaaacttgctaaacatgcagcagttttcagtggagataaaactcatcagtgtaatgaatgtgggaaagctttcaggcacagctcaaaacttgctaggcatcagagaatccacactggagagagatgctatgaatgtaatgaatgtgggaaaagctttgcagagagctcagatcttactagacatcggcgaattcacactggggaaagaccctttggttgcaaagaatgtgggagagcattcaacctgaactcacatcttatcaggcatcagagaattcacaccagagagaaaccctacgagtgtagtgaatgtgggaaaaccttccgagtgagctcacatcttattcgacactttagaattcacactggagaaaaaccctatgaatgcagtgagtgtggaagagccttcagtcagagctcaaaccttagtcaacaccagagaattcacatgagggaaaacctattaatgtaaggaacttaaatttgtaagtaaatgctgaggaaatggcacaatatgaaaaatattaaataaaaaataaatattgggcaagatggaagactga

SEQ ID NO: 419908 - DNA, 841 bp, Homo sapiens
cacacaaggattacttataccaatactttattttaaaatctctggaaatgagaccatctgaaatcagataaatatggcttcagataccagctctggcactactagttgcatgatcatcaatatgttacttctctgtgccttagtttccacatctgaaaattgagggtaagagtccctctctagatttgtgaatgggatgaacacaggattttaagtacggttagccagcatccaagatggcctcaatgatctctgcctctggtatttatgcccttgagtaatcccattccacatgtctcgggttggtctgtgtgtcttatagaatatggcttgaagtgaggttatgtggcttctgaagctatcacaatgtcataaaggacactgtgacttctgtcttgctccatttctggggtcacttgcactagaggaagtcagctactaaattacaaagaaattccagcaaccacaaggagaggtccacaaagtgagagattgaaccctcgagctaacaagcatgtgagtgagacatgttggaagtggattctccagctccagtcaagccttcagatgaatgcagctccagccaacatctcactgcagctttatgagagcctctgagctggagccactaggccaagctgttcccaaattcctgactctcagaaactgtgtgagttactataaatatatttgttgttttatactacaaagttttgggataattactaaggagcaatagataactaacacattaaggaaattagagcctagtactaggttccgttgggtaaaaggttagctattggattattaatttcttccatttgtctctcctgtttcc

SEQ ID NO: 419909 - DNA, 650 bp, Homo sapiens
tccaggctcgggctagccccgcgcagggaggcgagcgggcccggctccccagaggccgaggccggcgcccgtgctccttcagctcggcctctctcccccgacataggcgctccacatgcttcatttccaaaattctcagcaaaactccgcgggagaccctggtcacatgcctttctattgtacttttcggttattggtctctcttagtgccgatctgttactagggaaacgagatcctcacagtctcataggcaggagtcaaagccaatcaagagccacgccttcatccccgagtcagtgcccaattactgttcgaagagccctgaggacgcggtcgggattggtcatcccgtcgcccgacctggccgcaacaagttagggtgagtggcagttatatagaccggcggcggagcacgcgtgtgtgcggacgcagttgcgtgaggggtttgtactatcctcggtgctgtggtgcagagctagttcctctccagctcagccgcgtagggtacgccggggtgtgggcggggcagggaggccagaggactaagccgagccgcagcacttgtgagagggagaagtctgagtggcgctcgcggcggccgcgccagtcgcgtcccccaccccaacccccaccccaacggccgcaggcg

SEQ ID NO: 419910 - DNA, 3207 bp, Homo sapiens
tccaggctcgggctagccccgcgcagggaggcgagcgggcccggctccccagaggccgaggccggcgcccgtgctccttcagctcggcctctctcccccgacataggcgctccacatgcttcatttccaaaattctcagcaaaactccgcgggagaccctggtcacatgcctttctattgtacttttcggttattggtctctcttagtgccgatctgttactagggaaacgagatcctcacagtctcataggcaggagtcaaagccaatcaagagccacgccttcatccccgagtcagtgcccaattactgttcgaagagccctgaggacgcggtcgggattggtcatcccgtcgcccgacctggccgcaacaagttagggtgagtggcagttatatagaccggcggcggagcacgcgtgtgtgcggacgcagttgcgtgaggggtttgtactatcctcggtgctgtggtgcagagctagttcctctccagctcagccgcgtaggtttggacatatttgactcttttccccccaggttgaattgaccaaagcaatggtgatggagaagcctagtcccctgctggtcgggcgggaatttgtgagacagtattacacactgctgaaccaggccccagacatgctgcatagattttatggaaagaactcttcttatgtccatgggggattggattcaaatggaaagccagcagatgcagtctacggacagaaagaaatccacaggaaagtgatgtcacaaaacttcaccaactgccacaccaagattcgccatgttgatgctcatgccacgctaaatgatggtgtggtagtccaggtgatggggcttctctctaacaacaaccaggctttgaggagattcatgcaaacgtttgtccttgctcctgaggggtctgttgcaaataaattctatgttcacaatgatatcttcagataccaagatgaggtctttggtgggtttgtcactgagcctcaggaggagtctgaagaagaagtagaggaacctgaagaaagacagcaaacacctgaggtggtacctgatgattctggaactttctatgatcaggcagttgtcagtaatgacatggaagaacatttagaggagcctgttgctgaaccagagcctgatcctgaaccagaaccagaacaagaacctgtatctgaaatccaagaggaaaagcctgagccagtattagaagaaactgcccctgaggatgctcagaagagttcttctccagcacctgcagacatagctcagacagtacaggaagacttgaggacattttcttgggcatctgtgaccagtaagaatcttccacccagtggagctgttccagttactgggataccacctcatgttgttaaagtaccagcttcacagccccgtccagagtctaagcctgaatctcagattccaccacaaagacctcagcgggatcaaagagtgcgagaacaacgaataaatattcctccccaaaggggacccagaccaatccgtgaggctggtgagcaaggtgacattgaaccccgaagaatggtgagacaccctgacagtcaccaactcttcattggcaacctgcctcatgaagtggacaaatcagagcttaaagatttctttcaaagttatggaaacgtggtggagttgcgcattaacagtggtgggaaattacccaattttggttttgttgtgtttgatgattctgagcctgttcagaaagtccttagcaacaggcccatcatgttcagaggtgaggtccgtctgaatgtcgaagagaagaagactcgagctgccagggaaggcgaccgacgagataatcgccttcggggacctggaggccctcgaggtgggctgggtggtggaatgagaggccctccccgtggaggcatggtgcagaaaccaggatttggagtgggaagggggcttgcgccacggcagtgaatcttcatggatcttcatgcagccatacaaaccctggttccaacagaatggtgaattttcgacagcctttggtatcttggagtatgaccccagtctgttataaactgcttaagtttgtataattttactttttttgtgtgttaatggtgtgtgctccctctccctctcttccctttcctgacctttagtctttcacttccaattttgtggaatgatattttaggaataacggacttttaaagaagcaaaaaaaaagactgaatttccttgcttactttgcatatacagactggattttttttttttttttacagccatttccccaaaggaatgtcttgcatattactgacatttggtatgtttcattcattggaatatttcttattttctacgtgtttgaaaagcctgtaagaaatacaggatttgataatattttgaaggcaggaaaaacccaaattgtttcttctttgagagtcatgactaccttctggtgtggagaaattgccattggaaaatttgacaattttgattctcactggtatgtttaaaaactgaataaaaggaatagaatttttttttgataaaggatcacaaaacaattctaaaacctaactgtttttaccattgaaatttaaattgtgataataggttttaaatgtctagaatgcaactgataggcttttcttgaactgttagtttttttgaagtagttttttcatgtttaatttgtatttgtaaaaaaacaaaaagcaaaaaaattcccaaaacccagataacaaccagagcaaaactgttgtgccttctatttatctttgatttcagtcttggcaattgtttaaaaaaaaaatctagatttgttttattaggttcagagtatgtggggaattatagaatccctctttcatcactttgtgtatgtcttttgttaacatatttgttatgccttattctaaaattgagtctcaaactggaatgcctttgaagacagatgcttctatagaggttctttgacctaaatagttcagcatttgtatttttattctggtatctaatcagattcctaatcatagcccgtaagaaggaatgttactttaatattggactttgctcatgtgctcgtgtccgcatttttttttttcttaaaatcatagccatatggtaaattttctattttgttatggttctcttttattgatgggcatgcagtgggtgttacttggaaatggccaatttttattaaaatatttctggaa

SEQ ID NO: 419911 - DNA, 3229 bp, Homo sapiens
tccaggctcgggctagccccgcgcagggaggcgagcgggcccggctccccagaggccgaggccggcgcccgtgctccttcagctcggcctctctcccccgacataggcgctccacatgcttcatttccaaaattctcagcaaaactccgcgggagaccctggtcacatgcctttctattgtacttttcggttattggtctctcttagtgccgatctgttactagggaaacgagatcctcacagtctcataggcaggagtcaaagccaatcaagagccacgccttcatccccgagtcagtgcccaattactgttcgaagagccctgaggacgcggtcgggattggtcatcccgtcgcccgacctggccgcaacaagttagggtgagtggcagttatatagaccggcggcggagcacgcgtgtgtgcggacgcagttgcgtgaggggtttgtactatcctcggtgctgtggtgcagagctagttcctctccagctcagccgcgtaggtttggacatatttgactcttttccccccaggttgaattgaccaaagcaatggtgatggagaagcctagtcccctgctggtcgggcgggaatttgtgagacagtattacacactgctgaaccaggccccagacatgctgcatagattttatggaaagaactcttcttatgtccatgggggattggattcaaatggaaagccagcagatgcagtctacggacagaaagaaatccacaggaaagtgatgtcacaaaacttcaccaactgccacaccaagattcgccatgttgatgctcatgccacgctaaatgatggtgtggtagtccaggtgatggggcttctctctaacaacaaccaggctttgaggagattcatgcaaacgtttgtccttgctcctgaggggtctgttgcaaataaattctatgttcacaatgatatcttcagataccaagatgaggtctttggtgggtttgtcactgagcctcaggaggagtctgaagaagaagtagaggaacctgaagaaagacagcaaacacctgaggtggtacctgatgattctggaactttctatgatcaggcagttgtcagtaatgacatggaagaacatttagaggagcctgttgctgaaccagagcctgatcctgaaccagaaccagaacaagaacctgtatctgaaatccaagaggaaaagcctgagccagtattagaagaaactgcccctgaggatgctcagaagagttcttctccagcacctgcagacatagctcagacagtacaggaagacttgaggacattttcttgggcatctgtgaccagtaagaatcttccacccagtggagctgttccagttactgggataccacctcatgttgttaaagtaccagcttcacagccccgtccagagtctaagcctgaatctcagattccaccacaaagacctcagcgggatcaaagagtgcgagaacaacgaataaatattcctccccaaaggggacccagaccaatccgtgaggctggtgagcaaggtgacattgaaccccgaagaatggtgagacaccctgacagtcaccaactcttcattggcaacctgcctcatgaagtggacaaatcagagcttaaagatttctttcaaagttatggaaacgtggtggagttgcgcattaacagtggtgggaaattacccaattttggttttgttgtgtttgatgattctgagcctgttcagaaagtccttagcaacaggcccatcatgttcagaggtgaggtccgtctgaatgtcgaagagaagaagactcgagctgccagggaaggcgaccgacgagataatcgccttcggggacctggaggccctcgaggtgggctgggtggtggaatgagaggccctccccgtggaggcatggtgcagaaaccaggatttggagtgggaagggggcttgcgccacggcagtgaatcttcatggatcttcatgcagccatacaaaccctggttccaacagaatggtgaattttcgacagcctttggtatcttggagtatgaccccagtctgttataaactgcttaagtttgtataattttactttttttgtgtgttaatggtgtgtgctccctctccctctcttccctttcctgacctttagtctttcacttccaattttgtggaatgatattttaggaataacggacttttaaagaagcaaaaaaaaagactgaatttccttgcttactttgcatatacagactggattttttttttttttttacagccatttccccaaaggaatgtcttgcatattactgacatttggtatgtttcattcattggaatatttcttattttctacgtgtttgaaaagcctgtaagaaatacaggatttgataatattttgaaggcaggaaaaacccaaattgtttcttctttgagagtcatgactaccttctggtgtggagaaattgccattggaaaatttgacaattttgattctcactggtatgtttaaaaactgaataaaaggaatagaatttttttttgataaaggatcacaaaacaattctaaaacctaactgtttttaccattgaaatttaaattgtgataataggttttaaatgtctagaatgcaactgataggcttttcttgaactgttagtttttttgaagtagttttttcatgtttaatttgtatttgtaaaaaaacaaaaagcaaaaaaattcccaaaacccagataacaaccagagcaaaactgttgtgccttctatttatctttgatttcagtcttggcaattgtttaaaaaaaaaatctagatttgttttattaggttcagagtatgtggggaattatagaatccctctttcatcactttgtgtatgtcttttgttaacatatttgttatgccttattctaaaattgagtctcaaactggaatgcctttgaagacagatgcttctatagaggttctttgacctaaatagttcagcatttgtatttttattctggtatctaatcagattcctaatcatagcccgtaagaaggaatgttactttaatattggactttgctcatgtgctcgtgtccgcatttttttttttcttaaaatcatagccatatggtaaccacttttggcccagatcactgataataggaagaaatacaacttatacttttgtagcttatattaagcatgtggtgggtggaaagaaaagtttagtctgagtcactttggaaa

SEQ ID NO: 419912 - DNA, 3176 bp, Homo sapiens
tccaggctcgggctagccccgcgcagggaggcgagcgggcccggctccccagaggccgaggccggcgcccgtgctccttcagctcggcctctctcccccgacataggcgctccacatgcttcatttccaaaattctcagcaaaactccgcgggagaccctggtcacatgcctttctattgtacttttcggttattggtctctcttagtgccgatctgttactagggaaacgagatcctcacagtctcataggcaggagtcaaagccaatcaagagccacgccttcatccccgagtcagtgcccaattactgttcgaagagccctgaggacgcggtcgggattggtcatcccgtcgcccgacctggccgcaacaagttagggtgagtggcagttatatagaccggcggcggagcacgcgtgtgtgcggacgcagttgcgtgaggggtttgtactatcctcggtgctgtggtgcagagctagttcctctccagctcagccgcgtaggttgaattgaccaaagcaatggtgatggagaagcctagtcccctgctggtcgggcgggaatttgtgagacagtattacacactgctgaaccaggccccagacatgctgcatagattttatggaaagaactcttcttatgtccatgggggattggattcaaatggaaagccagcagatgcagtctacggacagaaagaaatccacaggaaagtgatgtcacaaaacttcaccaactgccacaccaagattcgccatgttgatgctcatgccacgctaaatgatggtgtggtagtccaggtgatggggcttctctctaacaacaaccaggctttgaggagattcatgcaaacgtttgtccttgctcctgaggggtctgttgcaaataaattctatgttcacaatgatatcttcagataccaagatgaggtctttggtgggtttgtcactgagcctcaggaggagtctgaagaagaagtagaggaacctgaagaaagacagcaaacacctgaggtggtacctgatgattctggaactttctatgatcaggcagttgtcagtaatgacatggaagaacatttagaggagcctgttgctgaaccagagcctgatcctgaaccagaaccagaacaagaacctgtatctgaaatccaagaggaaaagcctgagccagtattagaagaaactgcccctgaggatgctcagaagagttcttctccagcacctgcagacatagctcagacagtacaggaagacttgaggacattttcttgggcatctgtgaccagtaagaatcttccacccagtggagctgttccagttactgggataccacctcatgttgttaaagtaccagcttcacagccccgtccagagtctaagcctgaatctcagattccaccacaaagacctcagcgggatcaaagagtgcgagaacaacgaataaatattcctccccaaaggggacccagaccaatccgtgaggctggtgagcaaggtgacattgaaccccgaagaatggtgagacaccctgacagtcaccaactcttcattggcaacctgcctcatgaagtggacaaatcagagcttaaagatttctttcaaagttatggaaacgtggtggagttgcgcattaacagtggtgggaaattacccaattttggttttgttgtgtttgatgattctgagcctgttcagaaagtccttagcaacaggcccatcatgttcagaggtgaggtccgtctgaatgtcgaagagaagaagactcgagctgccagggaaggcgaccgacgagataatcgccttcggggacctggaggccctcgaggtgggctgggtggtggaatgagaggccctccccgtggaggcatggtgcagaaaccaggatttggagtgggaagggggcttgcgccacggcagtgaatcttcatggatcttcatgcagccatacaaaccctggttccaacagaatggtgaattttcgacagcctttggtatcttggagtatgaccccagtctgttataaactgcttaagtttgtataattttactttttttgtgtgttaatggtgtgtgctccctctccctctcttccctttcctgacctttagtctttcacttccaattttgtggaatgatattttaggaataacggacttttaaagaagcaaaaaaaaagactgaatttccttgcttactttgcatatacagactggattttttttttttttttacagccatttccccaaaggaatgtcttgcatattactgacatttggtatgtttcattcattggaatatttcttattttctacgtgtttgaaaagcctgtaagaaatacaggatttgataatattttgaaggcaggaaaaacccaaattgtttcttctttgagagtcatgactaccttctggtgtggagaaattgccattggaaaatttgacaattttgattctcactggtatgtttaaaaactgaataaaaggaatagaatttttttttgataaaggatcacaaaacaattctaaaacctaactgtttttaccattgaaatttaaattgtgataataggttttaaatgtctagaatgcaactgataggcttttcttgaactgttagtttttttgaagtagttttttcatgtttaatttgtatttgtaaaaaaacaaaaagcaaaaaaattcccaaaacccagataacaaccagagcaaaactgttgtgccttctatttatctttgatttcagtcttggcaattgtttaaaaaaaaaatctagatttgttttattaggttcagagtatgtggggaattatagaatccctctttcatcactttgtgtatgtcttttgttaacatatttgttatgccttattctaaaattgagtctcaaactggaatgcctttgaagacagatgcttctatagaggttctttgacctaaatagttcagcatttgtatttttattctggtatctaatcagattcctaatcatagcccgtaagaaggaatgttactttaatattggactttgctcatgtgctcgtgtccgcatttttttttttcttaaaatcatagccatatggtaaattttctattttgttatggttctcttttattgatgggcatgcagtgggtgttacttggaaatggccaatttttattaaaatatttctggaa

SEQ ID NO: 419913 - DNA, 3342 bp, Homo sapiens
cacacaaggattacttataccaatactttattttaaaatctctggaaatgagaccatctgaaatcagataaatatggcttcagataccagctctggcactactagttgcatgatcatcaatatgttacttctctgtgccttagtttccacatctgaaaattgagggtaagagtccctctctagatttgtgaatgggatgaacacaggattttaagtacggttagccagcatccaagatggcctcaatgatctctgcctctggtatttatgcccttgagtaatcccattccacatgtctcgggttggtctgtgtgtcttatagaatatggcttgaagtgaggttatgtggcttctgaagctatcacaatgtcataaaggacactgtgacttctgtcttgctccatttctggggtcacttgcactagaggaagtcagctactaaattacaaagaaattccagcaaccacaaggagaggtccacaaagtgagagattgaaccctcgagctaacaagcatgtgagtgagacatgttggaagtggattctccagctccagtcaagccttcagatgaatgcagctccagccaacatctcactgcagctttatgagagcctctgagctggagccactaggccaagctgttcccaaattcctgactctcagaaactgtgttgaattgaccaaagcaatggtgatggagaagcctagtcccctgctggtcgggcgggaatttgtgagacagtattacacactgctgaaccaggccccagacatgctgcatagattttatggaaagaactcttcttatgtccatgggggattggattcaaatggaaagccagcagatgcagtctacggacagaaagaaatccacaggaaagtgatgtcacaaaacttcaccaactgccacaccaagattcgccatgttgatgctcatgccacgctaaatgatggtgtggtagtccaggtgatggggcttctctctaacaacaaccaggctttgaggagattcatgcaaacgtttgtccttgctcctgaggggtctgttgcaaataaattctatgttcacaatgatatcttcagataccaagatgaggtctttggtgggtttgtcactgagcctcaggaggagtctgaagaagaagtagaggaacctgaagaaagacagcaaacacctgaggtggtacctgatgattctggaactttctatgatcaggcagttgtcagtaatgacatggaagaacatttagaggagcctgttgctgaaccagagcctgatcctgaaccagaaccagaacaagaacctgtatctgaaatccaagaggaaaagcctgagccagtattagaagaaactgcccctgaggatgctcagaagagttcttctccagcacctgcagacatagctcagacagtacaggaagacttgaggacattttcttgggcatctgtgaccagtaagaatcttccacccagtggagctgttccagttactgggataccacctcatgttgttaaagtaccagcttcacagccccgtccagagtctaagcctgaatctcagattccaccacaaagacctcagcgggatcaaagagtgcgagaacaacgaataaatattcctccccaaaggggacccagaccaatccgtgaggctggtgagcaaggtgacattgaaccccgaagaatggtgagacaccctgacagtcaccaactcttcattggcaacctgcctcatgaagtggacaaatcagagcttaaagatttctttcaaagttatggaaacgtggtggagttgcgcattaacagtggtgggaaattacccaattttggttttgttgtgtttgatgattctgagcctgttcagaaagtccttagcaacaggcccatcatgttcagaggtgaggtccgtctgaatgtcgaagagaagaagactcgagctgccagggaaggcgaccgacgagataatcgccttcggggacctggaggccctcgaggtgggctgggtggtggaatgagaggccctccccgtggaggcatggtgcagaaaccaggatttggagtgggaagggggcttgcgccacggcagtgaatcttcatggatcttcatgcagccatacaaaccctggttccaacagaatggtgaattttcgacagcctttggtatcttggagtatgaccccagtctgttataaactgcttaagtttgtataattttactttttttgtgtgttaatggtgtgtgctccctctccctctcttccctttcctgacctttagtctttcacttccaattttgtggaatgatattttaggaataacggacttttaaagaagcaaaaaaaaagactgaatttccttgcttactttgcatatacagactggattttttttttttttttacagccatttccccaaaggaatgtcttgcatattactgacatttggtatgtttcattcattggaatatttcttattttctacgtgtttgaaaagcctgtaagaaatacaggatttgataatattttgaaggcaggaaaaacccaaattgtttcttctttgagagtcatgactaccttctggtgtggagaaattgccattggaaaatttgacaattttgattctcactggtatgtttaaaaactgaataaaaggaatagaatttttttttgataaaggatcacaaaacaattctaaaacctaactgtttttaccattgaaatttaaattgtgataataggttttaaatgtctagaatgcaactgataggcttttcttgaactgttagtttttttgaagtagttttttcatgtttaatttgtatttgtaaaaaaacaaaaagcaaaaaaattcccaaaacccagataacaaccagagcaaaactgttgtgccttctatttatctttgatttcagtcttggcaattgtttaaaaaaaaaatctagatttgttttattaggttcagagtatgtggggaattatagaatccctctttcatcactttgtgtatgtcttttgttaacatatttgttatgccttattctaaaattgagtctcaaactggaatgcctttgaagacagatgcttctatagaggttctttgacctaaatagttcagcatttgtatttttattctggtatctaatcagattcctaatcatagcccgtaagaaggaatgttactttaatattggactttgctcatgtgctcgtgtccgcatttttttttttcttaaaatcatagccatatggtaaattttctattttgttatggttctcttttattgatgggcatgcagtgggtgttacttggaaatggccaatttttattaaaatatttctggaa

SEQ ID NO: 419914 - DNA, 3109 bp, Homo sapiens
tgcgcgtgctgcgtccaacggcctcgcggggcaggagtaagccgcggccgccgcctgggccccagggcggtctctggggccaggggtcccgcgcccagcgtttcccgcccgccaccctctccgccacgcgcccgcggcaccttttcctcccctggccaagggatccagtcggttcggaccagaaggaggctttcgtttagggtgggggcagcactaaagtctgattggagtcttgcggtccgcgcgtcgcagaagcgccttcggttttgcagagagcaaagagggagcagcgagtgcacggagtggtagtaacaaccaatgttctttccacgccctcactgtgtgtccggcactgtgcggagccacttttctgcctttcatttgattcttgcagtgagctggcgaggtttggacatatttgactcttttccccccaggttgaattgaccaaagcaatggtgatggagaagcctagtcccctgctggtcgggcgggaatttgtgagacagtattacacactgctgaaccaggccccagacatgctgcatagattttatggaaagaactcttcttatgtccatgggggattggattcaaatggaaagccagcagatgcagtctacggacagaaagaaatccacaggaaagtgatgtcacaaaacttcaccaactgccacaccaagattcgccatgttgatgctcatgccacgctaaatgatggtgtggtagtccaggtgatggggcttctctctaacaacaaccaggctttgaggagattcatgcaaacgtttgtccttgctcctgaggggtctgttgcaaataaattctatgttcacaatgatatcttcagataccaagatgaggtctttggtgggtttgtcactgagcctcaggaggagtctgaagaagaagtagaggaacctgaagaaagacagcaaacacctgaggtggtacctgatgattctggaactttctatgatcaggcagttgtcagtaatgacatggaagaacatttagaggagcctgttgctgaaccagagcctgatcctgaaccagaaccagaacaagaacctgtatctgaaatccaagaggaaaagcctgagccagtattagaagaaactgcccctgaggatgctcagaagagttcttctccagcacctgcagacatagctcagacagtacaggaagacttgaggacattttcttgggcatctgtgaccagtaagaatcttccacccagtggagctgttccagttactgggataccacctcatgttgttaaagtaccagcttcacagccccgtccagagtctaagcctgaatctcagattccaccacaaagacctcagcgggatcaaagagtgcgagaacaacgaataaatattcctccccaaaggggacccagaccaatccgtgaggctggtgagcaaggtgacattgaaccccgaagaatggtgagacaccctgacagtcaccaactcttcattggcaacctgcctcatgaagtggacaaatcagagcttaaagatttctttcaaagttatggaaacgtggtggagttgcgcattaacagtggtgggaaattacccaattttggttttgttgtgtttgatgattctgagcctgttcagaaagtccttagcaacaggcccatcatgttcagaggtgaggtccgtctgaatgtcgaagagaagaagactcgagctgccagggaaggcgaccgacgagataatcgccttcggggacctggaggccctcgaggtgggctgggtggtggaatgagaggccctccccgtggaggcatggtgcagaaaccaggatttggagtgggaagggggcttgcgccacggcagtgaatcttcatggatcttcatgcagccatacaaaccctggttccaacagaatggtgaattttcgacagcctttggtatcttggagtatgaccccagtctgttataaactgcttaagtttgtataattttactttttttgtgtgttaatggtgtgtgctccctctccctctcttccctttcctgacctttagtctttcacttccaattttgtggaatgatattttaggaataacggacttttaaagaagcaaaaaaaaagactgaatttccttgcttactttgcatatacagactggattttttttttttttttacagccatttccccaaaggaatgtcttgcatattactgacatttggtatgtttcattcattggaatatttcttattttctacgtgtttgaaaagcctgtaagaaatacaggatttgataatattttgaaggcaggaaaaacccaaattgtttcttctttgagagtcatgactaccttctggtgtggagaaattgccattggaaaatttgacaattttgattctcactggtatgtttaaaaactgaataaaaggaatagaatttttttttgataaaggatcacaaaacaattctaaaacctaactgtttttaccattgaaatttaaattgtgataataggttttaaatgtctagaatgcaactgataggcttttcttgaactgttagtttttttgaagtagttttttcatgtttaatttgtatttgtaaaaaaacaaaaagcaaaaaaattcccaaaacccagataacaaccagagcaaaactgttgtgccttctatttatctttgatttcagtcttggcaattgtttaaaaaaaaaatctagatttgttttattaggttcagagtatgtggggaattatagaatccctctttcatcactttgtgtatgtcttttgttaacatatttgttatgccttattctaaaattgagtctcaaactggaatgcctttgaagacagatgcttctatagaggttctttgacctaaatagttcagcatttgtatttttattctggtatctaatcagattcctaatcatagcccgtaagaaggaatgttactttaatattggactttgctcatgtgctcgtgtccgcatttttttttttcttaaaatcatagccatatggtaaattttctattttgttatggttctcttttattgatgggcatgcagtgggtgttacttggaaatggccaatttttattaaaatatttctggaa

SEQ ID NO: 419915 - DNA, 3072 bp, Homo sapiens
tccaggctcgggctagccccgcgcagggaggcgagcgggcccggctccccagaggccgaggccggcgcccgtgctccttcagctcggcctctctcccccgacataggcgctccacatgcttcatttccaaaattctcagcaaaactccgcgggagaccctggtcacatgcctttctattgtacttttcggttattggtctctcttagtgccgatctgttactagggaaacgagatcctcacagtctcataggcaggagtcaaagccaatcaagagccacgccttcatccccgagtcagtgcccaattactgttcgaagagccctgaggacgcggtcgggattggtcatcccgtcgcccgacctggccgcaacaagttagggtgagtggcagttatatagaccggcggcggagcacgcgtgtgtgcggacgcagttgcgtgaggggtttgtactatcctcggtgctgtggtgcagagctagttcctctccagctcagccgcgtaggtttggacatatttgactcttttccccccaggttgaattgaccaaagcaatggtgatggagaagccagcagatgcagtctacggacagaaagaaatccacaggaaagtgatgtcacaaaacttcaccaactgccacaccaagattcgccatgttgatgctcatgccacgctaaatgatggtgtggtagtccaggtgatggggcttctctctaacaacaaccaggctttgaggagattcatgcaaacgtttgtccttgctcctgaggggtctgttgcaaataaattctatgttcacaatgatatcttcagataccaagatgaggtctttggtgggtttgtcactgagcctcaggaggagtctgaagaagaagtagaggaacctgaagaaagacagcaaacacctgaggtggtacctgatgattctggaactttctatgatcaggcagttgtcagtaatgacatggaagaacatttagaggagcctgttgctgaaccagagcctgatcctgaaccagaaccagaacaagaacctgtatctgaaatccaagaggaaaagcctgagccagtattagaagaaactgcccctgaggatgctcagaagagttcttctccagcacctgcagacatagctcagacagtacaggaagacttgaggacattttcttgggcatctgtgaccagtaagaatcttccacccagtggagctgttccagttactgggataccacctcatgttgttaaagtaccagcttcacagccccgtccagagtctaagcctgaatctcagattccaccacaaagacctcagcgggatcaaagagtgcgagaacaacgaataaatattcctccccaaaggggacccagaccaatccgtgaggctggtgagcaaggtgacattgaaccccgaagaatggtgagacaccctgacagtcaccaactcttcattggcaacctgcctcatgaagtggacaaatcagagcttaaagatttctttcaaagttatggaaacgtggtggagttgcgcattaacagtggtgggaaattacccaattttggttttgttgtgtttgatgattctgagcctgttcagaaagtccttagcaacaggcccatcatgttcagaggtgaggtccgtctgaatgtcgaagagaagaagactcgagctgccagggaaggcgaccgacgagataatcgccttcggggacctggaggccctcgaggtgggctgggtggtggaatgagaggccctccccgtggaggcatggtgcagaaaccaggatttggagtgggaagggggcttgcgccacggcagtgaatcttcatggatcttcatgcagccatacaaaccctggttccaacagaatggtgaattttcgacagcctttggtatcttggagtatgaccccagtctgttataaactgcttaagtttgtataattttactttttttgtgtgttaatggtgtgtgctccctctccctctcttccctttcctgacctttagtctttcacttccaattttgtggaatgatattttaggaataacggacttttaaagaagcaaaaaaaaagactgaatttccttgcttactttgcatatacagactggattttttttttttttttacagccatttccccaaaggaatgtcttgcatattactgacatttggtatgtttcattcattggaatatttcttattttctacgtgtttgaaaagcctgtaagaaatacaggatttgataatattttgaaggcaggaaaaacccaaattgtttcttctttgagagtcatgactaccttctggtgtggagaaattgccattggaaaatttgacaattttgattctcactggtatgtttaaaaactgaataaaaggaatagaatttttttttgataaaggatcacaaaacaattctaaaacctaactgtttttaccattgaaatttaaattgtgataataggttttaaatgtctagaatgcaactgataggcttttcttgaactgttagtttttttgaagtagttttttcatgtttaatttgtatttgtaaaaaaacaaaaagcaaaaaaattcccaaaacccagataacaaccagagcaaaactgttgtgccttctatttatctttgatttcagtcttggcaattgtttaaaaaaaaaatctagatttgttttattaggttcagagtatgtggggaattatagaatccctctttcatcactttgtgtatgtcttttgttaacatatttgttatgccttattctaaaattgagtctcaaactggaatgcctttgaagacagatgcttctatagaggttctttgacctaaatagttcagcatttgtatttttattctggtatctaatcagattcctaatcatagcccgtaagaaggaatgttactttaatattggactttgctcatgtgctcgtgtccgcatttttttttttcttaaaatcatagccatatggtaaattttctattttgttatggttctcttttattgatgggcatgcagtgggtgttacttggaaatggccaatttttattaaaatatttctggaa

SEQ ID NO: 419916 - DNA, 2798 bp, Homo sapiens
tccaggctcgggctagccccgcgcagggaggcgagcgggcccggctccccagaggccgaggccggcgcccgtgctccttcagctcggcctctctcccccgacataggcgctccacatgcttcatttccaaaattctcagcaaaactccgcgggagaccctggtcacatgcctttctattgtacttttcggttattggtctctcttagtgccgatctgttactagggaaacgagatcctcacagtctcataggcaggagtcaaagccaatcaagagccacgccttcatccccgagtcagtgcccaattactgttcgaagagccctgaggacgcggtcgggattggtcatcccgtcgcccgacctggccgcaacaagttagggtgagtggcagttatatagaccggcggcggagcacgcgtgtgtgcggacgcagttgcgtgaggggtttgtactatcctcggtgctgtggtgcagagctagttcctctccagctcagccgcgtaggtttggacatatttgactcttttccccccaggttgaattgaccaaagcaatggtgatggagaagcctagtcccctgctggtcgggcgggaatttgtgagacagtattacacactgctgaaccaggccccagacatgctgcatagattttatggaaagaactcttcttatgtccatgggggattggattcaaatggaaagccagcagatgcagtctacggacagaaagaaatccacaggaaagtgatgtcacaaaacttcaccaactgccacaccaagattcgccatgttgatgctcatgccacgctaaatgatggtgtggtagtccaggtgatggggcttctctctaacaacaaccaggctttgaggagattcatgcaaacgtttgtccttgctcctgaggggtctgttgcaaataaattctatgttcacaatgatatcttcagataccaagatgaggtctttggtgggtttgtcactgagcctcaggaggagtctgaagaagaagtagaggaacctgaagaaagacagcaaacacctgaggtggtacctgatgattctggaactttctatgatcaggcagttgtcagtaatgacatggaagaacatttagaggagcctgttgctgaaccagagcctgatcctgaaccagaaccagaacaagaacctgtatctgaaatccaagaggaaaagcctgagccagtattagaagaaactgcccctgaggatgctcagaagagttcttctccagcacctgcagacatagctcagacagtacaggaagacttgaggacattttcttgggcatctgtgaccagtaagaatcttccacccagtggagctgttccagttactgggataccacctcatgttgttaaagtaccagcttcacagccccgtccagagtctaagcctgaatctcagattccaccacaaagacctcagcgggatcaaagagtgcgagaacaacgaataaatattcctccccaaaggggacccagaccaatccgtgaggctggtgagcaaggtgacattgaaccccgaagaatggtgagacaccctgacagtcaccaactcttcattggcaacctgcctcatgaagtggacaaatcagagcttaaagatttctttcaaagttatggaaacgtggtggagttgcgcattaacagtggtgggaaattacccaattttggttttgttgtgtttgatgattctgagcctgttcagaaagtccttagcaacaggcccatcatgttcagaggtgaggtccgtctgaatgtcgaagagaagaagactcgagctgccagggaaggcgaccgacgagataatcgccttcggggacctggaggccctcgagccatttccccaaaggaatgtcttgcatattactgacatttggtatgtttcattcattggaatatttcttattttctacgtgtttgaaaagcctgtaagaaatacaggatttgataatattttgaaggcaggaaaaacccaaattgtttcttctttgagagtcatgactaccttctggtgtggagaaattgccattggaaaatttgacaattttgattctcactggtatgtttaaaaactgaataaaaggaatagaatttttttttgataaaggatcacaaaacaattctaaaacctaactgtttttaccattgaaatttaaattgtgataataggttttaaatgtctagaatgcaactgataggcttttcttgaactgttagtttttttgaagtagttttttcatgtttaatttgtatttgtaaaaaaacaaaaagcaaaaaaattcccaaaacccagataacaaccagagcaaaactgttgtgccttctatttatctttgatttcagtcttggcaattgtttaaaaaaaaaatctagatttgttttattaggttcagagtatgtggggaattatagaatccctctttcatcactttgtgtatgtcttttgttaacatatttgttatgccttattctaaaattgagtctcaaactggaatgcctttgaagacagatgcttctatagaggttctttgacctaaatagttcagcatttgtatttttattctggtatctaatcagattcctaatcatagcccgtaagaaggaatgttactttaatattggactttgctcatgtgctcgtgtccgcatttttttttttcttaaaatcatagccatatggtaaattttctattttgttatggttctcttttattgatgggcatgcagtgggtgttacttggaaatggccaatttttattaaaatatttctggaa

SEQ ID NO: 419917 - DNA, 3116 bp, Homo sapiens
tccaggctcgggctagccccgcgcagggaggcgagcgggcccggctccccagaggccgaggccggcgcccgtgctccttcagctcggcctctctcccccgacataggcgctccacatgcttcatttccaaaattctcagcaaaactccgcgggagaccctggtcacatgcctttctattgtacttttcggttattggtctctcttagtgccgatctgttactagggaaacgagatcctcacagtctcataggcaggagtcaaagccaatcaagagccacgccttcatccccgagtcagtgcccaattactgttcgaagagccctgaggacgcggtcgggattggtcatcccgtcgcccgacctggccgcaacaagttagggtgagtggcagttatatagaccggcggcggagcacgcgtgtgtgcggacgcagttgcgtgaggggtttgtactatcctcggtgctgtggtgcagagctagttcctctccagctcagccgcgtaggtttggacatatttgactcttttccccccaggttgaattgaccaaagcaatggtgatggagaagcctagtcccctgctggtcgggcgggaatttgtgagacagtattacacactgctgaaccaggccccagacatgctgcatagattttatggaaagaactcttcttatgtccatgggggattggattcaaatggaaagccagcagatgcagtctacggacagaaagaaatccacaggaaagtgatgtcacaaaacttcaccaactgccacaccaagattcgccatgttgatgctcatgccacgctaaatgatggtgtggtagtccaggtgatggggcttctctctaacaacaaccaggctttgaggagattcatgcaaacgtttgtccttgctcctgagagtctgaagaagaagtagaggaacctgaagaaagacagcaaacacctgaggtggtacctgatgattctggaactttctatgatcaggcagttgtcagtaatgacatggaagaacatttagaggagcctgttgctgaaccagagcctgatcctgaaccagaaccagaacaagaacctgtatctgaaatccaagaggaaaagcctgagccagtattagaagaaactgcccctgaggatgctcagaagagttcttctccagcacctgcagacatagctcagacagtacaggaagacttgaggacattttcttgggcatctgtgaccagtaagaatcttccacccagtggagctgttccagttactgggataccacctcatgttgttaaagtaccagcttcacagccccgtccagagtctaagcctgaatctcagattccaccacaaagacctcagcgggatcaaagagtgcgagaacaacgaataaatattcctccccaaaggggacccagaccaatccgtgaggctggtgagcaaggtgacattgaaccccgaagaatggtgagacaccctgacagtcaccaactcttcattggcaacctgcctcatgaagtggacaaatcagagcttaaagatttctttcaaagttatggaaacgtggtggagttgcgcattaacagtggtgggaaattacccaattttggttttgttgtgtttgatgattctgagcctgttcagaaagtccttagcaacaggcccatcatgttcagaggtgaggtccgtctgaatgtcgaagagaagaagactcgagctgccagggaaggcgaccgacgagataatcgccttcggggacctggaggccctcgaggtgggctgggtggtggaatgagaggccctccccgtggaggcatggtgcagaaaccaggatttggagtgggaagggggcttgcgccacggcagtgaatcttcatggatcttcatgcagccatacaaaccctggttccaacagaatggtgaattttcgacagcctttggtatcttggagtatgaccccagtctgttataaactgcttaagtttgtataattttactttttttgtgtgttaatggtgtgtgctccctctccctctcttccctttcctgacctttagtctttcacttccaattttgtggaatgatattttaggaataacggacttttaaagaagcaaaaaaaaagactgaatttccttgcttactttgcatatacagactggattttttttttttttttacagccatttccccaaaggaatgtcttgcatattactgacatttggtatgtttcattcattggaatatttcttattttctacgtgtttgaaaagcctgtaagaaatacaggatttgataatattttgaaggcaggaaaaacccaaattgtttcttctttgagagtcatgactaccttctggtgtggagaaattgccattggaaaatttgacaattttgattctcactggtatgtttaaaaactgaataaaaggaatagaatttttttttgataaaggatcacaaaacaattctaaaacctaactgtttttaccattgaaatttaaattgtgataataggttttaaatgtctagaatgcaactgataggcttttcttgaactgttagtttttttgaagtagttttttcatgtttaatttgtatttgtaaaaaaacaaaaagcaaaaaaattcccaaaacccagataacaaccagagcaaaactgttgtgccttctatttatctttgatttcagtcttggcaattgtttaaaaaaaaaatctagatttgttttattaggttcagagtatgtggggaattatagaatccctctttcatcactttgtgtatgtcttttgttaacatatttgttatgccttattctaaaattgagtctcaaactggaatgcctttgaagacagatgcttctatagaggttctttgacctaaatagttcagcatttgtatttttattctggtatctaatcagattcctaatcatagcccgtaagaaggaatgttactttaatattggactttgctcatgtgctcgtgtccgcatttttttttttcttaaaatcatagccatatggtaaattttctattttgttatggttctcttttattgatgggcatgcagtgggtgttacttggaaatggccaatttttattaaaatatttctggaa

SEQ ID NO: 419918 - DNA, 2637 bp, Homo sapiens
tccaggctcgggctagccccgcgcagggaggcgagcgggcccggctccccagaggccgaggccggcgcccgtgctccttcagctcggcctctctcccccgacataggcgctccacatgcttcatttccaaaattctcagcaaaactccgcgggagaccctggtcacatgcctttctattgtacttttcggttattggtctctcttagtgccgatctgttactagggaaacgagatcctcacagtctcataggcaggagtcaaagccaatcaagagccacgccttcatccccgagtcagtgcccaattactgttcgaagagccctgaggacgcggtcgggattggtcatcccgtcgcccgacctggccgcaacaagttagggtgagtggcagttatatagaccggcggcggagcacgcgtgtgtgcggacgcagttgcgtgaggggtttgtactatcctcggtgctgtggtgcagagctagttcctctccagctcagccgcgtaggtttggacatatttgactcttttccccccaggttgaattgaccaaagcaatggtgatggagaagcctagtcccctgctggtcgggcgggaatttgtgagacagtattacacactgctgaaccaggccccagacatgctgcatagattttatggaaagaactcttcttatgtccatgggggattggattcaaatggaaagccagcagatgcagtctacggacagaaagaaatccacaggaaagtgatgtcacaaaacttcaccaactgccacaccaagattcgccatgttgatgctcatgttgttaaagtaccagcttcacagccccgtccagagtctaagcctgaatctcagattccaccacaaagacctcagcgggatcaaagagtgcgagaacaacgaataaatattcctccccaaaggggacccagaccaatccgtgaggctggtgagcaaggtgacattgaaccccgaagaatggtgagacaccctgacagtcaccaactcttcattggcaacctgcctcatgaagtggacaaatcagagcttaaagatttctttcaaagttatggaaacgtggtggagttgcgcattaacagtggtgggaaattacccaattttggttttgttgtgtttgatgattctgagcctgttcagaaagtccttagcaacaggcccatcatgttcagaggtgaggtccgtctgaatgtcgaagagaagaagactcgagctgccagggaaggcgaccgacgagataatcgccttcggggacctggaggccctcgaggtgggctgggtggtggaatgagaggccctccccgtggaggcatggtgcagaaaccaggatttggagtgggaagggggcttgcgccacggcagtgaatcttcatggatcttcatgcagccatacaaaccctggttccaacagaatggtgaattttcgacagcctttggtatcttggagtatgaccccagtctgttataaactgcttaagtttgtataattttactttttttgtgtgttaatggtgtgtgctccctctccctctcttccctttcctgacctttagtctttcacttccaattttgtggaatgatattttaggaataacggacttttaaagaagcaaaaaaaaagactgaatttccttgcttactttgcatatacagactggattttttttttttttttacagccatttccccaaaggaatgtcttgcatattactgacatttggtatgtttcattcattggaatatttcttattttctacgtgtttgaaaagcctgtaagaaatacaggatttgataatattttgaaggcaggaaaaacccaaattgtttcttctttgagagtcatgactaccttctggtgtggagaaattgccattggaaaatttgacaattttgattctcactggtatgtttaaaaactgaataaaaggaatagaatttttttttgataaaggatcacaaaacaattctaaaacctaactgtttttaccattgaaatttaaattgtgataataggttttaaatgtctagaatgcaactgataggcttttcttgaactgttagtttttttgaagtagttttttcatgtttaatttgtatttgtaaaaaaacaaaaagcaaaaaaattcccaaaacccagataacaaccagagcaaaactgttgtgccttctatttatctttgatttcagtcttggcaattgtttaaaaaaaaaatctagatttgttttattaggttcagagtatgtggggaattatagaatccctctttcatcactttgtgtatgtcttttgttaacatatttgttatgccttattctaaaattgagtctcaaactggaatgcctttgaagacagatgcttctatagaggttctttgacctaaatagttcagcatttgtatttttattctggtatctaatcagattcctaatcatagcccgtaagaaggaatgttactttaatattggactttgctcatgtgctcgtgtccgcatttttttttttcttaaaatcatagccatatggtaaattttctattttgttatggttctcttttattgatgggcatgcagtgggtgttacttggaaatggccaatttttattaaaatatttctggaa

SEQ ID NO: 419919 - DNA, 2649 bp, Homo sapiens
tgcgcgtgctgcgtccaacggcctcgcggggcaggagtaagccgcggccgccgcctgggccccagggcggtctctggggccaggggtcccgcgcccagcgtttcccgcccgccaccctctccgccacgcgcccgcggcaccttttcctcccctggccaagggatccagtcggttcggaccagaaggaggctttcgtttagggtgggggcagcactaaagtctgattggagtcttgcggtccgcgcgtcgcagaagcgccttcggttttgcagagagcaaagagggagcagcgagtgcacggagtggtagtaacaaccaatgttctttccacgccctcactgtgtgtccggcactgtgcggagccacttttctgcctttcatttgattcttgcagtgagctggcgaggtttggacatatttgactcttttccccccaggttgaattgaccaaagcaatggtgatggagaagcctagtcccctgctggtcgggcgggaatttgtgagacagtattacacactgctgaaccaggccccagacatgctgcatagattttatggaaagaactcttcttatgtccatgggggattggattcaaatggaaagccagcagatgcagtctacggacagaaagaaatccacaggaaagtgatgtcacaaaacttcaccaactgccacaccaagattcgccatgttgatgctcatgccacgctaaatgatggtgtggtagtccaggtgatggggcttctctctaacaacaaccaggctttgaggagattcatgcaaacgtttgtccttgctcctgaggggtctgttgcaaataaattctatgttcacaaccccgtccagagtctaagcctgaatctcagattccaccacaaagacctcagcgggatcaaagagtgcgagaacaacgaataaatattcctccccaaaggggacccagaccaatccgtgaggctggtgagcaaggtgacattgaaccccgaagaatggtgagacaccctgacagtcaccaactcttcattggcaacctgcctcatgaagtggacaaatcagagcttaaagatttctttcaaagttatggaaacgtggtggagttgcgcattaacagtggtgggaaattacccaattttggttttgttgtgtttgatgattctgagcctgttcagaaagtccttagcaacaggcccatcatgttcagaggtgaggtccgtctgaatgtcgaagagaagaagactcgagctgccagggaaggcgaccgacgagataatcgccttcggggacctggaggccctcgaggtgggctgggtggtggaatgagaggccctccccgtggaggcatggtgcagaaaccaggatttggagtgggaagggggcttgcgccacggcagtgaatcttcatggatcttcatgcagccatacaaaccctggttccaacagaatggtgaattttcgacagcctttggtatcttggagtatgaccccagtctgttataaactgcttaagtttgtataattttactttttttgtgtgttaatggtgtgtgctccctctccctctcttccctttcctgacctttagtctttcacttccaattttgtggaatgatattttaggaataacggacttttaaagaagcaaaaaaaaagactgaatttccttgcttactttgcatatacagactggattttttttttttttttacagccatttccccaaaggaatgtcttgcatattactgacatttggtatgtttcattcattggaatatttcttattttctacgtgtttgaaaagcctgtaagaaatacaggatttgataatattttgaaggcaggaaaaacccaaattgtttcttctttgagagtcatgactaccttctggtgtggagaaattgccattggaaaatttgacaattttgattctcactggtatgtttaaaaactgaataaaaggaatagaatttttttttgataaaggatcacaaaacaattctaaaacctaactgtttttaccattgaaatttaaattgtgataataggttttaaatgtctagaatgcaactgataggcttttcttgaactgttagtttttttgaagtagttttttcatgtttaatttgtatttgtaaaaaaacaaaaagcaaaaaaattcccaaaacccagataacaaccagagcaaaactgttgtgccttctatttatctttgatttcagtcttggcaattgtttaaaaaaaaaatctagatttgttttattaggttcagagtatgtggggaattatagaatccctctttcatcactttgtgtatgtcttttgttaacatatttgttatgccttattctaaaattgagtctcaaactggaatgcctttgaagacagatgcttctatagaggttctttgacctaaatagttcagcatttgtatttttattctggtatctaatcagattcctaatcatagcccgtaagaaggaatgttactttaatattggactttgctcatgtgctcgtgtccgcatttttttttttcttaaaatcatagccatatggtaaattttctattttgttatggttctcttttattgatgggcatgcagtgggtgttacttggaaatggccaatttttattaaaatatttctggaa

SEQ ID NO: 419920 - DNA, 2624 bp, Homo sapiens
tccaggctcgggctagccccgcgcagggaggcgagcgggcccggctccccagaggccgaggccggcgcccgtgctccttcagctcggcctctctcccccgacataggcgctccacatgcttcatttccaaaattctcagcaaaactccgcgggagaccctggtcacatgcctttctattgtacttttcggttattggtctctcttagtgccgatctgttactagggaaacgagatcctcacagtctcataggcaggagtcaaagccaatcaagagccacgccttcatccccgagtcagtgcccaattactgttcgaagagccctgaggacgcggtcgggattggtcatcccgtcgcccgacctggccgcaacaagttagggtgagtggcagttatatagaccggcggcggagcacgcgtgtgtgcggacgcagttgcgtgaggggtttgtactatcctcggtgctgtggtgcagagctagttcctctccagctcagccgcgtaggtttggacatatttgactcttttccccccaggttgaattgaccaaagcaatggtgatggagaagcctagtcccctgctggtcgggcgggaatttgtgagacagtattacacactgctgaaccaggccccagacatgctgcatagattttatggaaagaactcttcttatgtccatgggggattggattcaaatggaaagccagcagatgcagtctacggacagaaagaaatccacaggaaagtgatgtcacaaaacttcaccaactgccacaccaagattcgccatgttgatgctcatgccacgctaaatgatggtgtggtagtccaggtgatggggcttctctctaacaacaaccaggctttgaggagattcatgcaaacgtttgtccttgctcctgaggggtctgttgcaaataaattctatgttcacaatgatatcttcagataccaagatgaggtctttggtgggtttgtcactgagcctcaggaggagtctgaagaagaagtagaggaacctgaagaaagacagcaaacacctgaggtggtacctgatgattctggaactttctatgatcaggcagttgtcagtaatgacatggaagaacatttagaggagcctgttgctgaaccagagcctgatcctgaaccagaaccagaacaagaacctgtatctgaaatccaagaggaaaagcctgagccagtattagaagaaactgcccctgaggatgctcagaagagttcttctccagcacctgcagacatagctcagacagtacaggaagacttgaggacattttcttgggcatctgtgaccagtaagaatcttccacccagtggagctgttccagttactgggataccacctcatgttgttaaagtaccagcttcacagccccgtccagagtctaagcctgaatctcagattccaccacaaagacctcagcgggatcaaagagtgcgagaacaacgaataaatattcctccccaaaggggacccagaccaatccgtgaggctggtgagcaaggtgacattgaaccccgaagaatggtgagacaccctgacagtcaccaactcttcattggcaacctgcctcatgaagtggacaaatcagagcttaaagatttctttcaaagttatggaaacgtggtggagttgcgcattaacagtggtgggaaattacccaattttggttttgttgtgtttgatgattctgagcctgttcagaaagtccttagcaacaggcccatcatgttcagaggtgaggtccgtctgaatgtcgaagagaagaagactcgagctgccagggaaggcgaccgacgagataatcgccttcggggacctggaggccctcgagccatttccccaaaggaatgtcttgcatattactgacatttggtatgtttcattcattggaatatttcttattttctacgtgtttgaaaagcctgtaagaaatacaggatttgataatattttgaaggcaggaaaaacccaaattgtttcttctttgagagtcatgactaccttctggtgtggagaaattgccattggaaaatttgacaattttgattctcactggtatgtttaaaaactgaataaaaggaatagaatttttttttgataaaggatcacaaaacaattctaaaacctaactgtttttaccattgaaatttaaattgtgataataggttttaaatgtctagaatgcaactgataggcttttcttgaactgttagtttttttgaagtagttttttcatgtttaatttgtatttgtaaaaaaacaaaaagcaaaaaaattcccaaaacccagataacaaccagagcaaaactgttgtgccttctatttatctttgatttcagtcttggcaattgtttaaaaaaaaaatctagatttgttttattaggttcagagtatgtggggaattatagaatccctctttcatcactttgtgtatggtcctcggtccttttgttgcgtttttcaattgtgttccccggatgccttgaaacatgctctagggtcttggccacatgtccctggtttttcggctccagagctataacggagagtgttttgggtgcctgtcgccattttacacacagactgcgcttgggcg

SEQ ID NO: 419921 - DNA, 2178 bp, Homo sapiens
tccaggctcgggctagccccgcgcagggaggcgagcgggcccggctccccagaggccgaggccggcgcccgtgctccttcagctcggcctctctcccccgacataggcgctccacatgcttcatttccaaaattctcagcaaaactccgcgggagaccctggtcacatgcctttctattgtacttttcggttattggtctctcttagtgccgatctgttactagggaaacgagatcctcacagtctcataggcaggagtcaaagccaatcaagagccacgccttcatccccgagtcagtgcccaattactgttcgaagagccctgaggacgcggtcgggattggtcatcccgtcgcccgacctggccgcaacaagttagggtgagtggcagttatatagaccggcggcggagcacgcgtgtgtgcggacgcagttgcgtgaggggtttgtactatcctcggtgctgtggtgcagagctagttcctctccagctcagccgcgtaggtttggacatatttgactcttttccccccaggttgaattgaccaaagcaatggtgatggagaagcctagtcccctgctggtcgggcgggaatttgtgagacagtattacacactgctgaaccaggccccagacatgctgcatagattttatggaaagaactcttcttatgtccatgggggattggattcaaatggaaagccagcagatgcagtctacggacagaaagaaatccacaggaaagtgatgtcacaaaacttcaccaactgccacaccaagattcgccatgttgatgctcatgccacgctaaatgatggtgtggtagtccaggtgatggggcttctctctaacaacaaccaggctttgaggagattcatgcaaacgtttgtccttgctcctgaggggtctgttgcaaataaattctatgttcacaatgatatcttcagataccaagatgaggtctttggtgggtttgtcactgagcctcaggaggagtctgaagaagaagtagaggaacctgaagaaagacagcaaacacctgaggtggtacctgatgattctggaactttctatgatcaggcagttgtcagtaatgacatggaagaacatttagaggagcctgttgctgaaccagagcctgatcctgaaccagaaccagaacaagaacctgtatctgaaatccaagaggaaaagcctgagccagtattagaagaaactgcccctgaggatgctcagaagagttcttctccagcacctgcagacatagctcagacagtacaggaagacttgaggacattttcttgggcatctgtgaccagtaagaatcttccacccagtggagctgttccagttactgggataccacctcatgttgttaaagtaccagcttcacagccccgtccagagtctaagcctgaatctcagattccaccacaaagacctcagcgggatcaaagagtgcgagaacaacgaataaatattcctccccaaaggggacccagaccaatccgtgaggctggtgagcaaggtgacattgaaccccgaagaatggtgagacaccctgacagtcaccaactcttcattggcaacctgcctcatgaagtggacaaatcagagcttaaagatttctttcaaagttatggaaacgtggtggagttgcgcattaacagtggtgggaaattacccaattttggttttgttgtgtttgatgattctgagcctgttcagaaagtccttagcaacaggcccatcatgttcagaggtgaggtccgtctgaatgtcgaagagaagaagactcgagctgccagggaaggcgaccgacgagataatcgccttcggggacctggaggccctcgaggtgggctgggtggtggaatgagaggccctccccgtggaggcatggtgcagaaaccaggatttggagtgggaagggggcttgcgccaagggaaaagaaaattaaggggagcttgaggcaggcatacaaaaacgggaatcaaaaaggaagggggaaatttatagagagagcttgggggaaacggggagagaggaacgagagaccggggaaaaaaagggataaagggagggaaaaaaagaaaacaaggagggggaggggaaaaaagggaggggaagaacaccaaaatggatgggaataagcaatgtaacggagaaagtaagg

SEQ ID NO: 419922 - DNA, 1666 bp, Homo sapiens
agacagtgtctcactatgttgcccagactggattcaaactcctaggctccagtgatcagctggcttcagcctcccaaagtgctgggattacaggcatgagtcaccgtgcccagcctctgctggttcattattacagctttctttatctttgatagtgatagccagctcatcagtactcttaagtctggtcaccttgattcttacagcccatcatgttcagaggtgaggtccgtctgaatgtcgaagagaagaagactcgagctgccagggaaggcgaccgacgagataatcgccttcggggacctggaggccctcgaggtgggctgggtggtggaatgagaggccctccccgtggaggcatggtgcagaaaccaggatttggagtgggaagggggcttgcgccacggcagtgaatcttcatggatcttcatgcagccatacaaaccctggttccaacagaatggtgaattttcgacagcctttggtatcttggagtatgaccccagtctgttataaactgcttaagtttgtataattttactttttttgtgtgttaatggtgtgtgctccctctccctctcttccctttcctgacctttagtctttcacttccaattttgtggaatgatattttaggaataacggacttttaaagaagcaaaaaaaaagactgaatttccttgcttactttgcatatacagactggattttttttttttttttacagccatttccccaaaggaatgtcttgcatattactgacatttggtatgtttcattcattggaatatttcttattttctacgtgtttgaaaagcctgtaagaaatacaggatttgataatattttgaaggcaggaaaaacccaaattgtttcttctttgagagtcatgactaccttctggtgtggagaaattgccattggaaaatttgacaattttgattctcactggtatgtttaaaaactgaataaaaggaatagaatttttttttgataaaggatcacaaaacaattctaaaacctaactgtttttaccattgaaatttaaattgtgataataggttttaaatgtctagaatgcaactgataggcttttcttgaactgttagtttttttgaagtagttttttcatgtttaatttgtatttgtaaaaaaacaaaaagcaaaaaaattcccaaaacccagataacaaccagagcaaaactgttgtgccttctatttatctttgatttcagtcttggcaattgtttaaaaaaaaaatctagatttgttttattaggttcagagtatgtggggaattatagaatccctctttcatcactttgtgtatgtcttttgttaacatatttgttatgccttattctaaaattgagtctcaaactggaatgcctttgaagacagatgcttctatagaggttctttgacctaaatagttcagcatttgtatttttattctggtatctaatcagattcctaatcatagcccgtaagaaggaatgttactttaatattggactttgctcatgtgctcgtgtccgcatttttttttttcttaaaatcatagccatatggtaaattttctattttgttatggttctcttttattgatgggcatgcagtgggtgttacttggaaatggccaatttttattaaaatatttctggaa

SEQ ID NO: 419923 - DNA, 1971 bp, Homo sapiens
tccaggctcgggctagccccgcgcagggaggcgagcgggcccggctccccagaggccgaggccggcgcccgtgctccttcagctcggcctctctcccccgacataggcgctccacatgcttcatttccaaaattctcagcaaaactccgcgggagaccctggtcacatgcctttctattgtacttttcggttattggtctctcttagtgccgatctgttactagggaaacgagatcctcacagtctcataggcaggagtcaaagccaatcaagagccacgccttcatccccgagtcagtgcccaattactgttcgaagagccctgaggacgcggtcgggattggtcatcccgtcgcccgacctggccgcaacaagttagggtgagtggcagttatatagaccggcggcggagcacgcgtgtgtgcggacgcagttgcgtgaggggtttgtactatcctcggtgctgtggtgcagagctagttcctctccagctcagccgcgtaggtttggacatatttgactcttttccccccaggttgaattgaccaaagcaatggtgatggagaagcctagtcccctgctggtcgggcgggaatttgtgagacagtattacacactgctgaaccaggccccagacatgctgcatagattttatggaaagaactcttcttatgtccatgggggattggattcaaatggaaagccagcagatgcagtctacggacagaaagaaatccacaggaaagtgatgtcacaaaacttcaccaactgccacaccaagattcgccatgttgatgctcatgccacgctaaatgatggtgtggtagtccaggtgatggggcttctctctaacaacaaccaggctttgaggagattcatgcaaacgtttgtccttgctcctgaggggtctgttgcaaataaattctatgttcacaatgatatcttcagataccaagatgaggtctttggtgggtttgtcactgagcctcaggaggagtctgaagaagaagtagaggaacctgaagaaagacagcaaacacctgaggtggtacctgatgattctggaactttctatgatcaggcagttgtcagtaatgacatggaagaacatttagaggagcctgttgctgaaccagagcctgatcctgaaccagaaccagaacaagaacctgtatctgaaatccaagaggaaaagcctgagccagtattagaagaaactgcccctgaggatgctcagaagagttcttctccagcacctgcagacatagctcagacagtacaggaagacttgaggacattttcttgggcatctgtgaccagtaagaatcttccacccagtggagctgttccagttactgggataccacctcatgttgttaaagtaccagcttcacagccccgtccagagtctaagcctgaatctcagattccaccacaaagacctcagcgggatcaaagagtgcgagaacaacgaataaatattcctccccaaaggggacccagaccaagtaagagctcagaagggcgatttctcgtttgggggattttgaggtgagagcttattttgggagggcagttgatatttatatactttaaaataaaaatattgtagggttgatggaattacctgtttttagtgtagagggaaaactattgaatgtgagcagtcattgaaagatgtcttctttctcttgtctttcattgatgtttttgtctccttttaagtccgtgaggctggtgagcaaggtgacattgaaccccgaagaatggtgagacaccctgacagtcaccaactcttcattggcaacctgcctcatgaagtggacaaatcagagcttaaagatttctttcaaagtaggttattgagttttgaacactaaattcatctagtgtctctctagcactgtccagtagcaatagaaaatgagccacatatgtaattataaattttctagtagtcatggttaaaaa

SEQ ID NO: 419924 - DNA, 1740 bp, Homo sapiens
tccaggctcgggctagccccgcgcagggaggcgagcgggcccggctccccagaggccgaggccggcgcccgtgctccttcagctcggcctctctcccccgacataggcgctccacatgcttcatttccaaaattctcagcaaaactccgcgggagaccctggtcacatgcctttctattgtacttttcggttattggtctctcttagtgccgatctgttactagggaaacgagatcctcacagtctcataggcaggagtcaaagccaatcaagagccacgccttcatccccgagtcagtgcccaattactgttcgaagagccctgaggacgcggtcgggattggtcatcccgtcgcccgacctggccgcaacaagttagggtgagtggcagttatatagaccggcggcggagcacgcgtgtgtgcggacgcagttgcgtgaggggtttgtactatcctcggtgctgtggtgcagagctagttcctctccagctcagccgcgtaggttgaattgaccaaagcaatggtgatggagaagcctagtcccctgctggtcgggcgggaatttgtgagacagtattacacactgctgaaccaggccccagacatgctgcatagattttatggaaagaactcttcttatgtccatgggggattggattcaaatggaaagccagcagatgcagtctacggacagaaagaaatccacaggaaagtgatgtcacaaaacttcaccaactgccacaccaagattcgccatgttgatgctcatgccacgctaaatgatggtgtggtagtccagccatttccccaaaggaatgtcttgcatattactgacatttggtatgtttcattcattggaatatttcttattttctacgtgtttgaaaagcctgtaagaaatacaggatttgataatattttgaaggcaggaaaaacccaaattgtttcttctttgagagtcatgactaccttctggtgtggagaaattgccattggaaaatttgacaattttgattctcactggtatgtttaaaaactgaataaaaggaatagaatttttttttgataaaggatcacaaaacaattctaaaacctaactgtttttaccattgaaatttaaattgtgataataggttttaaatgtctagaatgcaactgataggcttttcttgaactgttagtttttttgaagtagttttttcatgtttaatttgtatttgtaaaaaaacaaaaagcaaaaaaattcccaaaacccagataacaaccagagcaaaactgttgtgccttctatttatctttgatttcagtcttggcaattgtttaaaaaaaaaatctagatttgttttattaggttcagagtatgtggggaattatagaatccctctttcatcactttgtgtatgtcttttgttaacatatttgttatgccttattctaaaattgagtctcaaactggaatgcctttgaagacagatgcttctatagaggttctttgacctaaatagttcagcatttgtatttttattctggtatctaatcagattcctaatcatagcccgtaagaaggaatgttactttaatattggactttgctcatgtgctcgtgtccgcatttttttttttcttaaaatcatagccatatggtaaattttctattttgttatggttctcttttattgatgggcatgcagtgggtgttacttggaaatggccaatttttattaaaatatttctggaa

SEQ ID NO: 419925 - DNA, 1519 bp, Homo sapiens
tccaggctcgggctagccccgcgcagggaggcgagcgggcccggctccccagaggccgaggccggcgcccgtgctccttcagctcggcctctctcccccgacataggcgctccacatgcttcatttccaaaattctcagcaaaactccgcgggagaccctggtcacatgcctttctattgtacttttcggttattggtctctcttagtgccgatctgttactagggaaacgagatcctcacagtctcataggcaggagtcaaagccaatcaagagccacgccttcatccccgagtcagtgcccaattactgttcgaagagccctgaggacgcggtcgggattggtcatcccgtcgcccgacctggccgcaacaagttagggtgagtggcagttatatagaccggcggcggagcacgcgtgtgtgcggacgcagttgcgtgaggggtttgtactatcctcggtgctgtggtgcagagctagttcctctccagctcagccgcgtaggtttggacatatttgactcttttccccccaggttgaattgaccaaagcaatggtgatggagaagcctagtcccctgctggtcgggcgggaatttgtgagacagtattacacactgctgaaccaggccccagacatgctgcatagattttatggaaagaactcttcttatgtccatgggggattggattcaaatggaaagccagcagatgcagtctacggacagaaagaaatccacaggaaagtgatgtcacaaaacttcaccaactgccacaccaagattcgccatgttgatgctcatgccacgctaaatgatggtgtggtagtccaggtgatggggcttctctctaacaacaaccaggctttgaggagattcatgcaaacgtttgtccttgctcctgaggggtctgttgcaaataaattctatgttcacaatgatatcttcagataccaagatgaggtctttggtgggtttgtcactgagcctcaggaggagtctgaagaagaagtagaggaacctgaagaaagacagcaaacacctgaggtggtacctgatgattctggaactttctatgatcaggcagttgtcaggtaagaagattttgttcacatgtccggggctgcataagaacttgcattgtctagtctttccctttgttggagggcatttacatattctgagaattacctcaaaataataatttctcagaagaatggttttgtttctggtaattttgactaaacaaaaatatgtaacttgtttgttaatagtaaattgtactatgaaggcaatctactattgcttagtttaaatagtatcagtttctttttggtttagttttttcttggtgttaagtgaaaacttgcatattgtttatcaagagttgaatgtattgaggtattaaatgctttgagggaatatgaagtggacagagacctatttaattagagatcgggcataaattgatataaataccaatatgtgagttaagtagcaataaagaatttcattacgtta

SEQ ID NO: 419926 - DNA, 1511 bp, Homo sapiens
tccaggctcgggctagccccgcgcagggaggcgagcgggcccggctccccagaggccgaggccggcgcccgtgctccttcagctcggcctctctcccccgacataggcgctccacatgcttcatttccaaaattctcagcaaaactccgcgggagaccctggtcacatgcctttctattgtacttttcggttattggtctctcttagtgccgatctgttactagggaaacgagatcctcacagtctcataggcaggagtcaaagccaatcaagagccacgccttcatccccgagtcagtgcccaattactgttcgaagagccctgaggacgcggtcgggattggtcatcccgtcgcccgacctggccgcaacaagttagggtgagtggcagttatatagaccggcggcggagcacgcgtgtgtgcggacgcagttgcgtgaggggtttgtactatcctcggtgctgtggtgcagagctagttcctctccagctcagccgcgtaggtttggacatatttgactcttttccccccaggttgaattgaccaaagcaatggtgatggagaagcctagtcccctgctggtcgggcgggaatttgtgagacagtattacacactgctgaaccaggccccagacatgctgcatagattttatggaaagaactcttcttatgtccatgggggattggattcaaatggaaagccagcagatgcagtctacggacagaaagaaatccacaggaaagtgatgtcacaaaacttcaccaactgccacaccaagattcgccatgttgatgctcatgccacgctaaatgatggtgtggtagtccaggtgatggggcttctctctaacaacaaccaggctttgaggagattcatgcaaacgtttgtccttgctcctgaggggtctgttgcaaataaattctatgttcacaaccccgtccagagtctaagcctgaatctcagattccaccacaaagacctcagcgggatcaaagagtgcgagaacaacgaataaatattcctccccaaaggggacccagaccaagtaagagctcagaagggcgatttctcgtttgggggattttgaggtgagagcttattttgggagggcagttgatatttatatactttaaaataaaaatattgtagggttgatggaattacctgtttttagtgtagagggaaaactattgaatgtgagcagtcattgaaagatgtcttctttctcttgtctttcattgatgtttttgtctccttttaagtccgtgaggctggtgagcaaggtgacattgaaccccgaagaatggtgagacaccctgacagtcaccaactcttcattggcaacctgcctcatgaagtggacaaatcagagcttaaagatttctttcaaagtaggttattgagttttgaacactaaattcatctagtgtctctctagcactgtccagtagcaatagaaaatgagccacatatgtaattataaattttctagtagtcatggttaaaaa

SEQ ID NO: 419927 - DNA, 537 bp, Homo sapiens
tgacatataggacggaagagaagggtataagatggtttttaatgatttttcttgtgagggaattgtccattttgtagtttaaaacttgttagctaagaaacttcattaagaaaaaggataagcctgctttgttttaacacaaaagttaacttaaaatttttcagccccgtccagagtctaagcctgaatctcagattccaccacaaagacctcagcgggatcaaagagtgcgagaacaacgaataaatattcctccccaaaggggacccagaccaagtaagagctcagaagggcgatttctcgtttgggggattttgaggtgagagcttattttgggagggcagttgatatttatatactttaaaataaaaatattgtagggttgatggaattacctgtttttagtgtagagggaaaactattgaatgtgagcagtcattgaaagatgtcttctttctcttgtctttcattgatgtttttgtctccttttaagtccgtgaggctggtgagcaaggtgacattgaaccccgaagaatg

SEQ ID NO: 419928 - DNA, 512 bp, Homo sapiens
aaagagtgcgagaacaacgaataaatattcctccccaaaggggacccagaccaagtaagagctcagaagggcgatttctcgtttgggggattttgaggtgagagcttattttgggagggcagttgatatttatatactttaaaataaaaatattgtagggttgatggaattacctgtttttagtgtagagggaaaactattgaatgtgagcagtcattgaaagatgtcttctttctcttgtctttcattgatgtttttgtctccttttaagtccgtgaggctggtgagcaaggtgacattgaaccccgaagaatggtgagacaccctgacagtcaccaactcttcattggcaacctgcctcatgaagtggacaaatcagagcttaaagatttctttcaaagtaggttattgagttttgaacactaaattcatctagtgtctctctagcactgtccagtagcaatagaaaatgagccacatatgtaattataaattttctagtagtcatggtt

SEQ ID NO: 419929 - DNA, 458 bp, Homo sapiens
ttattggctactttgagtatcagtcaaagaactgctcactcgcctttctattgtacttttcggttattggtctctcttagtgccgatctgttactagggaaacgagatcctcacagtctcataggcaggagtcaaagccaatcaagagccacgccttcatccccgagtcagtgcccaattactgttcgaagagccctgaggacgcggtcgggattggtcatcccgtcgcccgacctggccgcaacaagttagggtgagtggcagttatatagaccggcggcggagcacgcgtgtgtgcggacgcagttgcgtgaggggtttgtactatcctcggtgctgtggtgcagagctagttcctctccagctcagccgcgtagggtacgccggggtgtgggcggggcagggaggccagaggactaagccgagccgcagcacttgtgagagggagaagtctgagt

SEQ ID NO: 419930 - DNA, 867 bp, Homo sapiens
gcggccgcctcgcagcgcccgccaagaagcgcctggcggaagggcgcactctcaggccttccaccggcgaccttccggcgggagcctgcgggcggcgcaggaacgaccctccttcctctgccccgcagcagtgctgagtaatggtgagagcagcaaggcccttggccgccgcacgttgaattgaccaaagcaatggtgatggagaagcctagtcccctgctggtcgggcgggaatttgtgagacagtattacacactgctgaaccaggccccagacatgctgcatagattttatggaaagaactcttcttatgtccatgggggattggattcaaatggaaagccagcagatgcagtctacggacagaaagaaatccacaggaaagtgatgtcacaaaacttcaccaactgccacaccaagattcgccatgttgatgctcatgccacgctaaatgatggtgtggtagtccaggtgatggggcttctctctaacaacaaccaggctttgaggagattcatgcaaacgtttgtccttgctcctgaggtatgtgtaggaatgattattttgtagtgatccaatacatgaaaaaagaaacaatgaactgttgtgcatatctttaaaaacacttgaaatttcagacttacagaaaacttggaataatagtacactaactcctatatactccttacctagagcagctgtcaccacttgcccacatgtgtataattctttctctaaaatagtttagtgggcatttcctaagaataattctcttccattctgtagtacagttatcaaattcaggaaatgttgatgcaatataatctataatccatttttaaaatttggaaattatctcaataatgt

SEQ ID NO: 419931 - DNA, 3722 bp, Homo sapiens
tccaggctcgggctagccccgcgcagggaggcgagcgggcccggctccccagaggccgaggccggcgcccgtgctccttcagctcggcctctctcccccgacataggcgctccacatgcttcatttccaaaattctcagcaaaactccgcgggagaccctggtcacatgcctttctattgtacttttcggttattggtctctcttagtgccgatctgttactagggaaacgagatcctcacagtctcataggcaggagtcaaagccaatcaagagccacgccttcatccccgagtcagtgcccaattactgttcgaagagccctgaggacgcggtcgggattggtcatcccgtcgcccgacctggccgcaacaagttagggtgagtggcagttatatagaccggcggcggagcacgcgtgtgtgcggacgcagttgcgtgaggggtttgtactatcctcggtgctgtggtgcagagctagttcctctccagctcagccgcgtaggtttggacatatttgactcttttccccccaggttgaattgaccaaagcaatggtgatggagaagcctagtcccctgctggtcgggcgggaatttgtgagacagtattacacactgctgaaccaggccccagacatgctgcatagattttatggaaagaactcttcttatgtccatgggggattggattcaaatggaaagccagcagatgcagtctacggacagaaagaaatccacaggaaagtgatgtcacaaaacttcaccaactgccacaccaagattcgccatgttgatgctcatgccacgctaaatgatggtgtggtagtccaggtgatggggcttctctctaacaacaaccaggctttgaggagattcatgcaaacgtttgtccttgctcctgaggggtctgttgcaaataaattctatgttcacaatgatatcttcagataccaagatgaggtctttggtgggtttgtcactgagcctcaggaggagtctgaagaagaagtagaggaacctgaagaaagacagcaaacacctgaggtggtacctgatgattctggaactttctatgatcaggcagttgtcagtaatgacatggaagaacatttagaggagcctgttgctgaaccagagcctgatcctgaaccagaaccagaacaagaacctgtatctgaaatccaagaggaaaagcctgagccagtattagaagaaactgcccctgaggatgctcagaagagttcttctccagcacctgcagacatagctcagacagtacaggaagacttgaggacattttcttgggcatctgtgaccagtaagaatcttccacccagtggagctgttccagttactgggataccacctcatgttgttaaagtaccagcttcacagccccgtccagagtctaagcctgaatctcagattccaccacaaagacctcagcgggatcaaagagtgcgagaacaacgaataaatattcctccccaaaggggacccagaccaatccgtgaggctggtgagcaaggtgacattgaaccccgaagaatggtgagacaccctgacagtcaccaactcttcattggcaacctgcctcatgaagtggacaaatcagagcttaaagatttctttcaaagttatggaaacgtggtggagttgcgcattaacagtggtgggaaattacccaattttggttttgttgtgtttgatgattctgagcctgttcagaaagtccttagcaacaggcccatcatgttcagaggtgaggtccgtctgaatgtcgaagagaagaagactcgagctgccagggaaggcgaccgacgagataatcgccttcggggacctggaggccctcgaggtgggctgggtggtggaatgagaggccctccccgtggaggcatggtgcagaaaccaggatttggagtgggaagggggcttgcgccacggcagtgaatcttcatggatcttcatgcagccatacaaaccctggttccaacagaatggtgaattttcgacagcctttggtatcttggagtatgaccccagtctgttataaactgcttaagtttgtataattttactttttttgtgtgttaatggtgtgtgctccctctccctctcttccctttcctgacctttagtctttcacttccaattttgtggaatgatattttaggaataacggacttttaaagaagcaaaaaaaaagactgaatttccttgcttactttgcatatacagactggattttttttttttttttacagccatttccccaaaggaatgtcttgcatattactgacatttggtatgtttcattcattggaatatttcttattttctacgtgtttgaaaagcctgtaagaaatacaggatttgataatattttgaaggcaggaaaaacccaaattgtttcttctttgagagtcatgactaccttctggtgtggagaaattgccattggaaaatttgacaattttgattctcactggtatgtttaaaaactgaataaaaggaatagaatttttttttgataaaggatcacaaaacaattctaaaacctaactgtttttaccattgaaatttaaattgtgataataggttttaaatgtctagaatgcaactgataggcttttcttgaactgttagtttttttgaagtagttttttcatgtttaatttgtatttgtaaaaaaacaaaaagcaaaaaaattcccaaaacccagataacaaccagagcaaaactgttgtgccttctatttatctttgatttcagtcttggcaattgtttaaaaaaaaaatctagatttgttttattaggttcagagtatgtggggaattatagaatccctctttcatcactttgtgtatgtcttttgttaacatatttgttatgccttattctaaaattgagtctcaaactggaatgcctttgaagacagatgcttctatagaggttctttgacctaaatagttcagcatttgtatttttattctggtatctaatcagattcctaatcatagcccgtaagaaggaatgttactttaatattggactttgctcatgtgctcgtgtccgcatttttttttttcttaaaatcatagccatatggtaaattttctattttgttatggttctcttttattgatgggcatgcagtgggtgttacttggaaatggccaatttttattaaaatatttctggaagaaaatttaatctggcaatatagactaatactcgtttcacatatgtgttatttgttgagtgctgtgtgtgagatgggtgaaggttttgtttacacgtgtgaaacaaacttttgtgtgattgtcattactaattgaagggcaaccaggttgtaaaattcagcgtatttattttcttaacagtattcatctttaggactgtcgtttgaggatagcataggaatatttggtttgcattactgagaaactctaggtttgctgtgatggttaagaccacagtgaagttggtattaccagtttggttccagttcctcaaatatttgaaaattggcagcatctcctttacataaacttaatgtaactgaatcacatggcttttttgtagggttaaagtaactttggtaaccacttttggcccagatcactgataataggaagaaatacaacttatacttttgtagcttatattaagcatgtggtgggtggaaagaaaagtttagtctgagtcactttggaaa

SEQ ID NO: 419932 - DNA, 3237 bp, Homo sapiens
tccaggctcgggctagccccgcgcagggaggcgagcgggcccggctccccagaggccgaggccggcgcccgtgctccttcagctcggcctctctcccccgacataggcgctccacatgcttcatttccaaaattctcagcaaaactccgcgggagaccctggtcacatgcctttctattgtacttttcggttattggtctctcttagtgccgatctgttactagggaaacgagatcctcacagtctcataggcaggagtcaaagccaatcaagagccacgccttcatccccgagtcagtgcccaattactgttcgaagagccctgaggacgcggtcgggattggtcatcccgtcgcccgacctggccgcaacaagttagggtgagtggcagttatatagaccggcggcggagcacgcgtgtgtgcggacgcagttgcgtgaggggtttgtactatcctcggtgctgtggtgcagagctagttcctctccagctcagccgcgtaggtttggacatatttgactcttttccccccaggttgaattgaccaaagcaatggtgatggagaagcctagtcccctgctggtcgggcgggaatttgtgagacagtattacacactgctgaaccaggccccagacatgctgcatagattttatggaaagaactcttcttatgtccatgggggattggattcaaatggaaagccagcagatgcagtctacggacagaaagaaatccacaggaaagtgatgtcacaaaacttcaccaactgccacaccaagattcgccatgttgatgctcatgccacgctaaatgatggtgtggtagtccaggtgatggggcttctctctaacaacaaccaggctttgaggagattcatgcaaacgtttgtccttgctcctgaggggtctgttgcaaataaattctatgttcacaatgatatcttcagataccaagatgaggtctttggtgggtttgtcactgagcctcaggaggagtctgaagaagaagtagaggaacctgaagaaagacagcaaacacctgaggtggtacctgatgattctggaactttctatgatcaggcagttgtcagaatgatatttctcaaattttcctgtcaaagtaatgacatggaagaacatttagaggagcctgttgctgaaccagagcctgatcctgaaccagaaccagaacaagaacctgtatctgaaatccaagaggaaaagcctgagccagtattagaagaaactgcccctgaggatgctcagaagagttcttctccagcacctgcagacatagctcagacagtacaggaagacttgaggacattttcttgggcatctgtgaccagtaagaatcttccacccagtggagctgttccagttactgggataccacctcatgttgttaaagtaccagcttcacagccccgtccagagtctaagcctgaatctcagattccaccacaaagacctcagcgggatcaaagagtgcgagaacaacgaataaatattcctccccaaaggggacccagaccaatccgtgaggctggtgagcaaggtgacattgaaccccgaagaatggtgagacaccctgacagtcaccaactcttcattggcaacctgcctcatgaagtggacaaatcagagcttaaagatttctttcaaagttatggaaacgtggtggagttgcgcattaacagtggtgggaaattacccaattttggttttgttgtgtttgatgattctgagcctgttcagaaagtccttagcaacaggcccatcatgttcagaggtgaggtccgtctgaatgtcgaagagaagaagactcgagctgccagggaaggcgaccgacgagataatcgccttcggggacctggaggccctcgaggtgggctgggtggtggaatgagaggccctccccgtggaggcatggtgcagaaaccaggatttggagtgggaagggggcttgcgccacggcagtgaatcttcatggatcttcatgcagccatacaaaccctggttccaacagaatggtgaattttcgacagcctttggtatcttggagtatgaccccagtctgttataaactgcttaagtttgtataattttactttttttgtgtgttaatggtgtgtgctccctctccctctcttccctttcctgacctttagtctttcacttccaattttgtggaatgatattttaggaataacggacttttaaagaagcaaaaaaaaagactgaatttccttgcttactttgcatatacagactggattttttttttttttttacagccatttccccaaaggaatgtcttgcatattactgacatttggtatgtttcattcattggaatatttcttattttctacgtgtttgaaaagcctgtaagaaatacaggatttgataatattttgaaggcaggaaaaacccaaattgtttcttctttgagagtcatgactaccttctggtgtggagaaattgccattggaaaatttgacaattttgattctcactggtatgtttaaaaactgaataaaaggaatagaatttttttttgataaaggatcacaaaacaattctaaaacctaactgtttttaccattgaaatttaaattgtgataataggttttaaatgtctagaatgcaactgataggcttttcttgaactgttagtttttttgaagtagttttttcatgtttaatttgtatttgtaaaaaaacaaaaagcaaaaaaattcccaaaacccagataacaaccagagcaaaactgttgtgccttctatttatctttgatttcagtcttggcaattgtttaaaaaaaaaatctagatttgttttattaggttcagagtatgtggggaattatagaatccctctttcatcactttgtgtatgtcttttgttaacatatttgttatgccttattctaaaattgagtctcaaactggaatgcctttgaagacagatgcttctatagaggttctttgacctaaatagttcagcatttgtatttttattctggtatctaatcagattcctaatcatagcccgtaagaaggaatgttactttaatattggactttgctcatgtgctcgtgtccgcatttttttttttcttaaaatcatagccatatggtaaattttctattttgttatggttctcttttattgatgggcatgcagtgggtgttacttggaaatggccaatttttattaaaatatttctggaa

SEQ ID NO: 419933 - DNA, 2815 bp, Homo sapiens
gcggccgcctcgcagcgcccgccaagaagcgcctggcggaagggcgcactctcaggccttccaccggcgaccttccggcgggagcctgcgggcggcgcaggaacgaccctccttcctctgccccgcagcagtgctgagtaatggttgaattgaccaaagcaatggtgatggagaagcctagtcccctgctggtcgggcgggaatttgtgagacagtattacacactgctgaaccaggccccagacatgctgcatagattttatggaaagaactcttcttatgtccatgggggattggattcaaatggaaagccagcagatgcagtctacggacagaaagaaatccacaggaaagtgatgtcacaaaacttcaccaactgccacaccaagattcgccatgttgatgctcatgccacgctaaatgatggtgtggtagtccaggtgatggggcttctctctaacaacaaccaggctttgaggagattcatgcaaacgtttgtccttgctcctgaggggtctgttgcaaataaattctatgttcacaatgatatcttcagataccaagatgaggtctttggtgggtttgtcactgagcctcaggaggagtctgaagaagaagtagaggaacctgaagaaagacagcaaacacctgaggtggtacctgatgattctggaactttctatgatcaggcagttgtcagtaatgacatggaagaacatttagaggagcctgttgctgaaccagagcctgatcctgaaccagaaccagaacaagaacctgtatctgaaatccaagaggaaaagcctgagccagtattagaagaaactgcccctgaggatgctcagaagagttcttctccagcacctgcagacatagctcagacagtacaggaagacttgaggacattttcttgggcatctgtgaccagtaagaatcttccacccagtggagctgttccagttactgggataccacctcatgttgttaaagtaccagcttcacagccccgtccagagtctaagcctgaatctcagattccaccacaaagacctcagcgggatcaaagagtgcgagaacaacgaataaatattcctccccaaaggggacccagaccaatccgtgaggctggtgagcaaggtgacattgaaccccgaagaatggtgagacaccctgacagtcaccaactcttcattggcaacctgcctcatgaagtggacaaatcagagcttaaagatttctttcaaagttatggaaacgtggtggagttgcgcattaacagtggtgggaaattacccaattttggttttgttgtgtttgatgattctgagcctgttcagaaagtccttagcaacaggcccatcatgttcagaggtgaggtccgtctgaatgtcgaagagaagaagactcgagctgccagggaaggcgaccgacgagataatcgccttcggggacctggaggccctcgaggtgggctgggtggtggaatgagaggccctccccgtggaggcatggtgcagaaaccaggatttggagtgggaagggggcttgcgccacggcagtgaatcttcatggatcttcatgcagccatacaaaccctggttccaacagaatggtgaattttcgacagcctttggtatcttggagtatgaccccagtctgttataaactgcttaagtttgtataattttactttttttgtgtgttaatggtgtgtgctccctctccctctcttccctttcctgacctttagtctttcacttccaattttgtggaatgatattttaggaataacggacttttaaagaagcaaaaaaaaagactgaatttccttgcttactttgcatatacagactggattttttttttttttttacagccatttccccaaaggaatgtcttgcatattactgacatttggtatgtttcattcattggaatatttcttattttctacgtgtttgaaaagcctgtaagaaatacaggatttgataatattttgaaggcaggaaaaacccaaattgtttcttctttgagagtcatgactaccttctggtgtggagaaattgccattggaaaatttgacaattttgattctcactggtatgtttaaaaactgaataaaaggaatagaatttttttttgataaaggatcacaaaacaattctaaaacctaactgtttttaccattgaaatttaaattgtgataataggttttaaatgtctagaatgcaactgataggcttttcttgaactgttagtttttttgaagtagttttttcatgtttaatttgtatttgtaaaaaaacaaaaagcaaaaaaattcccaaaacccagataacaaccagagcaaaactgttgtgccttctatttatctttgatttcagtcttggcaattgtttaaaaaaaaaatctagatttgttttattaggttcagagtatgtggggaattatagaatccctctttcatcactttgtgtatgtcttttgttaacatatttgttatgccttattctaaaattgagtctcaaactggaatgcctttgaagacagatgcttctatagaggttctttgacctaaatagttcagcatttgtatttttattctggtatctaatcagattcctaatcatagcccgtaagaaggaatgttactttaatattggactttgctcatgtgctcgtgtccgcatttttttttttcttaaaatcatagccatatggtaaattttctattttgttatggttctcttttattgatgggcatgcagtgggtgttacttggaaatggccaatttttattaaaatatttctggaa

SEQ ID NO: 419934 - DNA, 2996 bp, Homo sapiens
tgcgcgtgctgcgtccaacggcctcgcggggcaggagtaagccgcggccgccgcctgggccccagggcggtctctggggccaggggtcccgcgcccagcgtttcccgcccgccaccctctccgccacgcgcccgcggcaccttttcctcccctggccaagggatccagtcggttcggaccagaaggaggctttcgtttagggtgggggcagcactaaagtctgattggagtcttgcggtccgcgcgtcgcagaagcgccttcggttttgcagagagcaaagagggagcagcgagtgcacggagtggtagtaacaaccaatgttctttccacgccctcactgtgtgtccggcactgtgcggagccacttttctgcctttcatttgattcttgcagtgagctggcgaggttgaattgaccaaagcaatggtgatggagaagcctagtcccctgctggtcgggcgggaatttgtgagacagtattacacactgctgaaccaggccccagacatgctgcataggaaatccacaggaaagtgatgtcacaaaacttcaccaactgccacaccaagattcgccatgttgatgctcatgccacgctaaatgatggtgtggtagtccaggtgatggggcttctctctaacaacaaccaggctttgaggagattcatgcaaacgtttgtccttgctcctgaggggtctgttgcaaataaattctatgttcacaatgatatcttcagataccaagatgaggtctttggtgggtttgtcactgagcctcaggaggagtctgaagaagaagtagaggaacctgaagaaagacagcaaacacctgaggtggtacctgatgattctggaactttctatgatcaggcagttgtcagtaatgacatggaagaacatttagaggagcctgttgctgaaccagagcctgatcctgaaccagaaccagaacaagaacctgtatctgaaatccaagaggaaaagcctgagccagtattagaagaaactgcccctgaggatgctcagaagagttcttctccagcacctgcagacatagctcagacagtacaggaagacttgaggacattttcttgggcatctgtgaccagtaagaatcttccacccagtggagctgttccagttactgggataccacctcatgttgttaaagtaccagcttcacagccccgtccagagtctaagcctgaatctcagattccaccacaaagacctcagcgggatcaaagagtgcgagaacaacgaataaatattcctccccaaaggggacccagaccaatccgtgaggctggtgagcaaggtgacattgaaccccgaagaatggtgagacaccctgacagtcaccaactcttcattggcaacctgcctcatgaagtggacaaatcagagcttaaagatttctttcaaagttatggaaacgtggtggagttgcgcattaacagtggtgggaaattacccaattttggttttgttgtgtttgatgattctgagcctgttcagaaagtccttagcaacaggcccatcatgttcagaggtgaggtccgtctgaatgtcgaagagaagaagactcgagctgccagggaaggcgaccgacgagataatcgccttcggggacctggaggccctcgaggtgggctgggtggtggaatgagaggccctccccgtggaggcatggtgcagaaaccaggatttggagtgggaagggggcttgcgccacggcagtgaatcttcatggatcttcatgcagccatacaaaccctggttccaacagaatggtgaattttcgacagcctttggtatcttggagtatgaccccagtctgttataaactgcttaagtttgtataattttactttttttgtgtgttaatggtgtgtgctccctctccctctcttccctttcctgacctttagtctttcacttccaattttgtggaatgatattttaggaataacggacttttaaagaagcaaaaaaaaagactgaatttccttgcttactttgcatatacagactggattttttttttttttttacagccatttccccaaaggaatgtcttgcatattactgacatttggtatgtttcattcattggaatatttcttattttctacgtgtttgaaaagcctgtaagaaatacaggatttgataatattttgaaggcaggaaaaacccaaattgtttcttctttgagagtcatgactaccttctggtgtggagaaattgccattggaaaatttgacaattttgattctcactggtatgtttaaaaactgaataaaaggaatagaatttttttttgataaaggatcacaaaacaattctaaaacctaactgtttttaccattgaaatttaaattgtgataataggttttaaatgtctagaatgcaactgataggcttttcttgaactgttagtttttttgaagtagttttttcatgtttaatttgtatttgtaaaaaaacaaaaagcaaaaaaattcccaaaacccagataacaaccagagcaaaactgttgtgccttctatttatctttgatttcagtcttggcaattgtttaaaaaaaaaatctagatttgttttattaggttcagagtatgtggggaattatagaatccctctttcatcactttgtgtatgtcttttgttaacatatttgttatgccttattctaaaattgagtctcaaactggaatgcctttgaagacagatgcttctatagaggttctttgacctaaatagttcagcatttgtatttttattctggtatctaatcagattcctaatcatagcccgtaagaaggaatgttactttaatattggactttgctcatgtgctcgtgtccgcatttttttttttcttaaaatcatagccatatggtaaattttctattttgttatggttctcttttattgatgggcatgcagtgggtgttacttggaaatggccaatttttattaaaatatttctggaa

SEQ ID NO: 419935 - DNA, 2044 bp, Homo sapiens
caactactgtactggctgagctatgtctgcaggtgctggagaagaactcttctgagcatcctcaggggcagcttcttctagggctggctcaggcttttcctcttgcatttcagatacaggaagacttgaggacattttcttgggcatctgtgaccagtaagaatcttccacccagtggagctgttccagttactgggataccacctcatgttgttaaagtaccagcttcacagccccgtccagagtctaagcctgaatctcagattccaccacaaagacctcagcgggatcaaagagtgcgagaacaacgaataaatattcctccccaaaggggacccagaccaatccgtgaggctggtgagcaaggtgacattgaaccccgaagaatggtgagacaccctgacagtcaccaactcttcattggcaacctgcctcatgaagtggacaaatcagagcttaaagatttctttcaaagttatggaaacgtggtggagttgcgcattaacagtggtgggaaattacccaattttggttttgttgtgtttgatgattctgagcctgttcagaaagtccttagcaacaggcccatcatgttcagaggtgaggtccgtctgaatgtcgaagagaagaagactcgagctgccagggaaggcgaccgacgagataatcgccttcggggacctggaggccctcgaggtgggctgggtggtggaatgagaggccctccccgtggaggcatggtgcagaaaccaggatttggagtgggaagggggcttgcgccacggcagtgaatcttcatggatcttcatgcagccatacaaaccctggttccaacagaatggtgaattttcgacagcctttggtatcttggagtatgaccccagtctgttataaactgcttaagtttgtataattttactttttttgtgtgttaatggtgtgtgctccctctccctctcttccctttcctgacctttagtctttcacttccaattttgtggaatgatattttaggaataacggacttttaaagaagcaaaaaaaaagactgaatttccttgcttactttgcatatacagactggattttttttttttttttacagccatttccccaaaggaatgtcttgcatattactgacatttggtatgtttcattcattggaatatttcttattttctacgtgtttgaaaagcctgtaagaaatacaggatttgataatattttgaaggcaggaaaaacccaaattgtttcttctttgagagtcatgactaccttctggtgtggagaaattgccattggaaaatttgacaattttgattctcactggtatgtttaaaaactgaataaaaggaatagaatttttttttgataaaggatcacaaaacaattctaaaacctaactgtttttaccattgaaatttaaattgtgataataggttttaaatgtctagaatgcaactgataggcttttcttgaactgttagtttttttgaagtagttttttcatgtttaatttgtatttgtaaaaaaacaaaaagcaaaaaaattcccaaaacccagataacaaccagagcaaaactgttgtgccttctatttatctttgatttcagtcttggcaattgtttaaaaaaaaaatctagatttgttttattaggttcagagtatgtggggaattatagaatccctctttcatcactttgtgtatgtcttttgttaacatatttgttatgccttattctaaaattgagtctcaaactggaatgcctttgaagacagatgcttctatagaggttctttgacctaaatagttcagcatttgtatttttattctggtatctaatcagattcctaatcatagcccgtaagaaggaatgttactttaatattggactttgctcatgtgctcgtgtccgcatttttttttttcttaaaatcatagccatatggtaaattttctattttgttatggttctcttttattgatgggcatgcagtgggtgttacttggaaatggccaatttttattaaaatatttctggaa

SEQ ID NO: 419936 - DNA, 2491 bp, Homo sapiens
tccaggctcgggctagccccgcgcagggaggcgagcgggcccggctccccagaggccgaggccggcgcccgtgctccttcagctcggcctctctcccccgacataggcgctccacatgcttcatttccaaaattctcagcaaaactccgcgggagaccctggtcacatgcctttctattgtacttttcggttattggtctctcttagtgccgatctgttactagggaaacgagatcctcacagtctcataggcaggagtcaaagccaatcaagagccacgccttcatccccgagtcagtgcccaattactgttcgaagagccctgaggacgcggtcgggattggtcatcccgtcgcccgacctggccgcaacaagttagggtgagtggcagttatatagaccggcggcggagcacgcgtgtgtgcggacgcagttgcgtgaggggtttgtactatcctcggtgctgtggtgcagagctagttcctctccagctcagccgcgtaggtttggacatatttgactcttttccccccaggttgaattgaccaaagcaatggtgatggagaagcctagtcccctgctggtcgggcgggaatttgtgagacagtattacacactgctgaaccaggccccagacatgctgcatagattttatggaaagaactcttcttatgtccatgggggattggattcaaatggaaagccagcagatgcagtctacggacagaaagaaatccacaggaaagtgatgtcacaaaacttcaccaactgccacaccaagattcgccatgttgatgctcatgccacgctaaatgatggtgtggtagtccaggtgatggggcttctctctaacaacaaccaggctttgaggagattcatgcaaacgtttgtccttgctcctgaggggtctgttgcaaataaattctatgttcacaatgatatcttcagataccaagatgaggtctttggtgggtttgtcactgagcctcaggaggagtctgaagaagaagtagaggaacctgaagaaagacagcaaacacctgaggtggtacctgatgattctggaactttctatgatcaggcagttgtcagtaatgacatggaagaacatttagaggagcctgttgctgaaccagagcctgatcctgaaccagaaccagaacaagaacctgtatctgaaatccaagaggaaaagcctgagccagtattagaagaaactgcccctgaggatgctcagaagagttcttctccagcacctgcagacatagctcagacagtacaggaagacttgaggacattttcttgggcatctgtgaccagtaagaatcttccacccagtggagctgttccagttactgggataccacctcatgttgttaaagtaccagcttcacagccccgtccagagtctaagcctgaatctcagattccaccacaaagacctcagcgggatcaaagagtgcgagaacaacgaataaatattcctccccaaaggggacccagaccaatccgtgaggctggtgagcaaggtgacattgaaccccgaagaatgccatttccccaaaggaatgtcttgcatattactgacatttggtatgtttcattcattggaatatttcttattttctacgtgtttgaaaagcctgtaagaaatacaggatttgataatattttgaaggcaggaaaaacccaaattgtttcttctttgagagtcatgactaccttctggtgtggagaaattgccattggaaaatttgacaattttgattctcactggtatgtttaaaaactgaataaaaggaatagaatttttttttgataaaggatcacaaaacaattctaaaacctaactgtttttaccattgaaatttaaattgtgataataggttttaaatgtctagaatgcaactgataggcttttcttgaactgttagtttttttgaagtagttttttcatgtttaatttgtatttgtaaaaaaacaaaaagcaaaaaaattcccaaaacccagataacaaccagagcaaaactgttgtgccttctatttatctttgatttcagtcttggcaattgtttaaaaaaaaaatctagatttgttttattaggttcagagtatgtggggaattatagaatccctctttcatcactttgtgtatgtcttttgttaacatatttgttatgccttattctaaaattgagtctcaaactggaatgcctttgaagacagatgcttctatagaggttctttgacctaaatagttcagcatttgtatttttattctggtatctaatcagattcctaatcatagcccgtaagaaggaatgttactttaatattggactttgctcatgtgctcgtgtccgcatttttttttttcttaaaatcatagccatatggtaaattttctattttgttatggttctcttttattgatgggcatgcagtgggtgttacttggaaatggccaatttttattaaaatatttctggaa

SEQ ID NO: 419937 - DNA, 2723 bp, Homo sapiens
tccaggctcgggctagccccgcgcagggaggcgagcgggcccggctccccagaggccgaggccggcgcccgtgctccttcagctcggcctctctcccccgacataggcgctccacatgcttcatttccaaaattctcagcaaaactccgcgggagaccctggtcacatgcctttctattgtacttttcggttattggtctctcttagtgccgatctgttactagggaaacgagatcctcacagtctcataggcaggagtcaaagccaatcaagagccacgccttcatccccgagtcagtgcccaattactgttcgaagagccctgaggacgcggtcgggattggtcatcccgtcgcccgacctggccgcaacaagttagggtgagtggcagttatatagaccggcggcggagcacgcgtgtgtgcggacgcagttgcgtgaggggtttgtactatcctcggtgctgtggtgcagagctagttcctctccagctcagccgcgtaggtttggacatatttgactcttttccccccaggttgaattgaccaaagcaatggtgatggagaagcctagtcccctgctggtcgggcgggaatttgtgagacagtattacacactgctgaaccaggccccagacatgctgcatagattttatggaaagaactcttcttatgtccatgggggattggattcaaatggaaagccagcagatgcagtctacggacagaaagaaatccacaggaaagtgatgtcacaaaacttcaccaactgccacaccaagattcgccatgttgatgctcatgccacgctaaatgatggtgtggtagtccaggtgatggggcttctctctaacaacaaccaggctttgaggagattcatgcaaacgtttgtccttgctcctgaggggtctgttgcaaataaattctatgttcacaatgatatcttcagataccaagacctcagcgggatcaaagagtgcgagaacaacgaataaatattcctccccaaaggggacccagaccaatccgtgaggctggtgagcaaggtgacattgaaccccgaagaatggtgagacaccctgacagtcaccaactcttcattggcaacctgcctcatgaagtggacaaatcagagcttaaagatttctttcaaagttatggaaacgtggtggagttgcgcattaacagtggtgggaaattacccaattttggttttgttgtgtttgatgattctgagcctgttcagaaagtccttagcaacaggcccatcatgttcagaggtgaggtccgtctgaatgtcgaagagaagaagactcgagctgccagggaaggcgaccgacgagataatcgccttcggggacctggaggccctcgaggtgggctgggtggtggaatgagaggccctccccgtggaggcatggtgcagaaaccaggatttggagtgggaagggggcttgcgccacggcagtgaatcttcatggatcttcatgcagccatacaaaccctggttccaacagaatggtgaattttcgacagcctttggtatcttggagtatgaccccagtctgttataaactgcttaagtttgtataattttactttttttgtgtgttaatggtgtgtgctccctctccctctcttccctttcctgacctttagtctttcacttccaattttgtggaatgatattttaggaataacggacttttaaagaagcaaaaaaaaagactgaatttccttgcttactttgcatatacagactggattttttttttttttttacagccatttccccaaaggaatgtcttgcatattactgacatttggtatgtttcattcattggaatatttcttattttctacgtgtttgaaaagcctgtaagaaatacaggatttgataatattttgaaggcaggaaaaacccaaattgtttcttctttgagagtcatgactaccttctggtgtggagaaattgccattggaaaatttgacaattttgattctcactggtatgtttaaaaactgaataaaaggaatagaatttttttttgataaaggatcacaaaacaattctaaaacctaactgtttttaccattgaaatttaaattgtgataataggttttaaatgtctagaatgcaactgataggcttttcttgaactgttagtttttttgaagtagttttttcatgtttaatttgtatttgtaaaaaaacaaaaagcaaaaaaattcccaaaacccagataacaaccagagcaaaactgttgtgccttctatttatctttgatttcagtcttggcaattgtttaaaaaaaaaatctagatttgttttattaggttcagagtatgtggggaattatagaatccctctttcatcactttgtgtatgtcttttgttaacatatttgttatgccttattctaaaattgagtctcaaactggaatgcctttgaagacagatgcttctatagaggttctttgacctaaatagttcagcatttgtatttttattctggtatctaatcagattcctaatcatagcccgtaagaaggaatgttactttaatattggactttgctcatgtgctcgtgtccgcatttttttttttcttaaaatcatagccatatggtaaattttctattttgttatggttctcttttattgatgggcatgcagtgggtgttacttggaaatggccaatttttattaaaatatttctggaa

SEQ ID NO: 419938 - DNA, 1754 bp, Homo sapiens
tccaggctcgggctagccccgcgcagggaggcgagcgggcccggctccccagaggccgaggccggcgcccgtgctccttcagctcggcctctctcccccgacataggcgctccacatgcttcatttccaaaattctcagcaaaactccgcgggagaccctggtcacatgcctttctattgtacttttcggttattggtctctcttagtgccgatctgttactagggaaacgagatcctcacagtctcataggcaggagtcaaagccaatcaagagccacgccttcatccccgagtcagtgcccaattactgttcgaagagccctgaggacgcggtcgggattggtcatcccgtcgcccgacctggccgcaacaagttagggtgagtggcagttatatagaccggcggcggagcacgcgtgtgtgcggacgcagttgcgtgaggggtttgtactatcctcggtgctgtggtgcagagctagttcctctccagctcagccgcgtaggtttggacatatttgactcttttccccccaggttgaattgaccaaagcaatggtgatggagaagcctagtcccctgctggtcgggcgggaatttgtgagacagtattacacactgctgaaccaggccccagacatgctgcatagattttatggaaagaactcttcttatgtccatgggggattggattcaaatggaaagccagcagatgcagtctacggacagaaagaaatccacaggaaagtgatgtcacaaaacttcaccaactgccacaccaagattcgccatgttgatgctcatgccacgctaaatgatggtgtggtagtccaggtgatggggcttctctctaacaacaaccaggctttgaggagattcatgcaaacgtttgtccttgctcctgaggggtctgttgcaaataaattctatgttcacaatgatatcttcagataccaagatgaggtctttggtgggtttgtcactgagcctcaggaggagtctgaagaagaagtagaggaacctgaagaaagacagcaaacacctgaggtggtacctgatgattctggaactttctatgatcaggcagttgtcagtaatgacatggaagaacatttagaggagcctgttgctgaaccagagcctgatcctgaaccagaaccagaacaagaacctgtatctgaaatccaagaggaaaagcctgagccagtattagaagaaactgcccctgaggatgctcagaagagttcttctccagcacctgcagacatagctcagacagtacaggaagacttgaggacattttcttgggcatctgtgaccagtaagaatcttccacccagtggagctgttccagttactgggataccacctcatgttgttaaagtaccagcttcacagccccgtccagagtctaagcctgaatctcagattccaccacaaagacctcagcgggatcaaagagtgcgagaacaacgaataaatattcctccccaaaggggacccagaccaatccgtgaggctggtgagcaaggtgacattgaaccccgaagaatggtgagacaccctgacagtcaccaactcttcattggcaacctgcctcatgaagtggacaaatcagagcttaaagatttctttcaaagtaggttattgagttttgaacactaaattcatctagtgtctctctagcactgtccagtagcaatagaaaatgagccacatatgtaattataaattttctagtagtcatggttaaaaa

SEQ ID NO: 419939 - DNA, 2163 bp, Homo sapiens
tccaggctcgggctagccccgcgcagggaggcgagcgggcccggctccccagaggccgaggccggcgcccgtgctccttcagctcggcctctctcccccgacataggcgctccacatgcttcatttccaaaattctcagcaaaactccgcgggagaccctggtcacatgcctttctattgtacttttcggttattggtctctcttagtgccgatctgttactagggaaacgagatcctcacagtctcataggcaggagtcaaagccaatcaagagccacgccttcatccccgagtcagtgcccaattactgttcgaagagccctgaggacgcggtcgggattggtcatcccgtcgcccgacctggccgcaacaagttagggtgagtggcagttatatagaccggcggcggagcacgcgtgtgtgcggacgcagttgcgtgaggggtttgtactatcctcggtgctgtggtgcagagctagttcctctccagctcagccgcgtaggtttggacatatttgactcttttccccccaggttgaattgaccaaagcaatggtgatggagaagcctagtcccctgctggtcgggcgggaatttgtgagacagtattacacactgctgaaccaggccccagacatgctgcatagattttatggaaagaactcttcttatgtccatgggggattggattcaaatggaaagccagcagatgcagtctacggacagaaagaaatccacaggaaagtgatgtcacaaaacttcaccaactgccacaccaagattcgccatgttgatgctcatgccacgctaaatgatggtgtggtagtccaggtgatggggcttctctctaacaacaaccaggctttgaggagattcatgcaaacgtttgtccttgctcctgaggggtctgttgcaaataaattctatgttcacaatgatatcttcagataccaagatgaggtctttggtgggtttgtcactgagcctcaggaggagtctgaagaagaagtagaggaacctgaagaaagacagcaaacacctgaggtggtacctgatgattctggaactttctatgatcaggcagttgtcagtaatgacatggaagaacatttagaggagcctgttgctgaaccagagcctgatcctgaaccagaaccagaacaagaacctgtatctgaaatccaagaggaaaagcctgagccagtattagaagaaactgcccctgaggatgctcagaagagttcttctccagcacctgcagacatagctcagacagtacaggaagacttgaggacattttcttgggcatctgtgaccagtaagaatcttccacccagtggagctgttccagttactgggataccacctcatgttgttaaagtaccagcttcacagccccgtccagagtctaagcctgaatctcagattccaccacaaagacctcagcgggatcaaagagtgcgagaacaacgaataaatattcctccccaaaggggacccagaccaatccgtgcaggctggtgagaccagcgctgacagtttgaagcccccggaacacatgcgctgagacaacccctgaccagatcacacaaacatcctatcactatgggacaacactgcacatacactagacacgatgcgaacaacactcaaggacagcttaagagaatacatactcaaaagctcaatggacacacgccgcgaggaaaacaacacggaagaaccaccaagccaaacgaacacgacaaagggaccaccaaacccaagacgctccagacaccacaaaaccacacaacgatccacccagcaacactcgccaccacaccacgcacacaaaacacaaaacaacggcaccaccccaacaaccgcccggccaagaccgaccgaacacgaaaccacacaccccacacaaagagaacggcaacagacacgggacaacgcaagacgcaggccgagaccgacgcgcgcaacagagaacgagcagaaacacgaggcgagaaacaagcacggaacaacaaaggacccgaacagacgacagggaagccgaagccacagacagcggacagggagacgaagagggaagatcacaaaggagacacagacgacgaagggaacaagagaggaagagagacaagacgagacagagaaaagcacaaagccga

SEQ ID NO: 419940 - DNA, 1935 bp, Homo sapiens
tccaggctcgggctagccccgcgcagggaggcgagcgggcccggctccccagaggccgaggccggcgcccgtgctccttcagctcggcctctctcccccgacataggcgctccacatgcttcatttccaaaattctcagcaaaactccgcgggagaccctggtcacatgcctttctattgtacttttcggttattggtctctcttagtgccgatctgttactagggaaacgagatcctcacagtctcataggcaggagtcaaagccaatcaagagccacgccttcatccccgagtcagtgcccaattactgttcgaagagccctgaggacgcggtcgggattggtcatcccgtcgcccgacctggccgcaacaagttagggtgagtggcagttatatagaccggcggcggagcacgcgtgtgtgcggacgcagttgcgtgaggggtttgtactatcctcggtgctgtggtgcagagctagttcctctccagctcagccgcgtagccatttccccaaaggaatgtcttgcatattactgacatttggtatgtttcattcattggaatatttcttattttctacgtgtttgaaaagcctgtaagaaatacaggatttgataatattttgaaggcaggaaaaacccaaattgtttcttctttgagagtcatgactaccttctggtgtggagaaattgccattggaaaatttgacaattttgattctcactggtatgtttaaaaactgaataaaaggaatagaatttttttttgataaaggatcacaaaacaattctaaaacctaactgtttttaccattgaaatttaaattgtgataataggttttaaatgtctagaatgcaactgataggcttttcttgaactgttagtttttttgaagtagttttttcatgtttaatttgtatttgtaaaaaaacaaaaagcaaaaaaattcccaaaactgttgtgccttctatttatctttgatttcagtcttggcaattgtttaaaaaaaaaatctagatttgttttattaggttcagagtatgtggggaattatagaatccctctttcatcactttgtgtatgtcttttgttaacatatttgttatgccttattctaaaattgagtctcaaactggaatgcctttgaagacagatgcttctatagaggttctttgacctaaatagttcagcatttgtatttttattctggtatctaatcagattcctaatcatagcccgtaagaaggaatgttactttaatattggactttgctcatgtgctcgtgtccgcatttttttttttcttaaaatcatagccatatggtaaattttctattttgttatggttctcttttattgatgggcatgcagtgggtgttacttggaaatggccaatttttattaaaatatttctggaagaaaatttaatctggcaatatagactaatactcgtttcacatatgtgttatttgttgagtgctgtgtgtgagatgggtgaaggttttgtttacacgtgtgaaacaaacttttgtgtgattgtcattactaattgaagggcaaccaggttgtaaaattcagcgtatttattttcttaacagtattcatctttaggactgtcgtttgaggatagcataggaatatttggtttgcattactgagaaactctaggtttgctgtgatggttaagaccacagtgaagttggtattaccagtttggttccagttcctcaaatatttgaaaattggcagcatctcctttacataaacttaatgtaactgaatcacatggcttttttgtagggttaaagtaactttggtaaccacttttggcccagatcactgataataggaagaaatacaacttatacttttgtagcttatattaagcatgtggtgggtggaaagaaaagtttagtctgagtcactttggaaa

SEQ ID NO: 419941 - DNA, 1228 bp, Homo sapiens
tccaggctcgggctagccccgcgcagggaggcgagcgggcccggctccccagaggccgaggccggcgcccgtgctccttcagctcggcctctctcccccgacataggcgctccacatgcttcatttccaaaattctcagcaaaactccgcgggagaccctggtcacatgcctttctattgtacttttcggttattggtctctcttagtgccgatctgttactagggaaacgagatcctcacagtctcataggcaggagtcaaagccaatcaagagccacgccttcatccccgagtcagtgcccaattactgttcgaagagccctgaggacgcggtcgggattggtcatcccgtcgcccgacctggccgcaacaagttagggtgagtggcagttatatagaccggcggcggagcacgcgtgtgtgcggacgcagttgcgtgaggggtttgtactatcctcggtgctgtggtgcagagctagttcctctccagctcagccgcgtaggtttggacatatttgactcttttccccccaggttgaattgaccaaagcaatggtgatggagaagcctagtcccctgctggtcgggcgggaatttgtgagacagtattacacactgctgaaccaggccccagacatgctgcatagattttatggaaagaactcttcttatgtccatgggggattggattcaaatggaaagccagcagatgcagtctacggacagaaagaaatccacaggaaagtgatgtcacaaaacttcaccaactgccacaccaagattcgccatgttgatgctcatgccacgctaaatgatggtgtggtagtccaggtgatggggcttctctctaacaacaaccaggctttgaggagattcatgcaaacgtttgtccttgctcctgaggtatgtgtaggaatgattattttgtagtgatccaatacatgaaaaaagaaacaatgaactgttgtgcatatctttaaaaacacttgaaatttcagacttacagaaaacttggaataatagtacactaactcctatatactccttacctagagcagctgtcaccacttgcccacatgtgtataattctttctctaaaatagtttagtgggcatttcctaagaataattctcttccattctgtagtacagttatcaaattcaggaaatgttgatgcaatataatctataatccatttttaaaatttggaaattatctcaataatgt

SEQ ID NO: 419942 - DNA, 2770 bp, Homo sapiens
gtagcggggagaagactggagctccgaggagctgcatctgcggcaacctgtgtgctgacgctacgttcctcctggctccgacgtagctcgcagctccccagtctcactccattccttccccacctggcgcgcacctgctcaagaccagggtcctgccaagcgctaggagggcgcgtgccaggggcgctagggaactgcggagcgcgcgcgccatggggccgccgcctggggccggggtctcctgccgcggtggctgcggcttttccagattgctggcatggtgcttcctgctggccctgagtccgcaggcacccggttcccggggggctgaagcagtgtggaccgcgtacctcaacgtgtcctggcgggttccgcacacgggagtgaaccgtacggtgtgggagctgagcgaggagggcgtgtacggccaggactcgccgctggagcctgtggctggggtcctggtaccgcccgacgggcccggggcgcttaacgcctgtaacccgcacacgaatttcacggtgcccacggtttggggaagcaccgtgcaagtctcttggttggccctcatccaacgcggcgggggctgcaccttcgcagacaagatccatctggcttatgagagaggggcgtctggagccgtcatctttaacttccccgggacccgcaatgaggtcatccccatgtctcacccgggtgcagtagacattgttgcaatcatgatcggcaatctgaaaggcacaaaaattctgcaatctattcaaagaggcatacaagtgacaatggtcatagaagtagggaaaaaacatggcccttgggtgaatcactattcaatttttttcgtttctgtgtccttttttattattacggcggcaactgtgggctattttatcttttattctgctcgaaggctacggaatgcaagagctcaaagcaggaagcagaggcaattaaaggcagatgctaaaaaagctattggaaggcttcaactacgcacactgaaacaaggagacaaggaaattggccctgatggagatagttgtgctgtgtgcattgaattgtataaaccaaatgatttggtacgcatcttaacgtgcaaccatattttccataagacatgtgttgacccatggctgttagaacacaggacttgccccatgtgcaaatgtgacatactcaaagcttgggaattgaggtggatgttgaagatggatcagtgtctttacaagtccctgtatccaatgaaatatctaatagtgcctcctcccatgaagaggataatcgcagcgagaccgcatcatctggatatgcttcagtacagggaacagatgaaccgcctctggaggaacacgtgcagtcaacaaatgaaagtctacagctggtaaaccatgaagcaaattctgtggcagtggatgttattcctcatgttgacaacccaacctttgaagaagacgaaactcctaatcaagagactgctgttcgagaaattaaatcttaaaatctgtgtaaatagaaaacttgaaccattagtaataacagaactgccaatcagggcctagtttctattaataaattggataaatttaataaaataagagtgatactgaaagtgctcagatgactaatattatgctatagttaaatggcttaaaatatttaacctgttaacttttttccacaaactcattataatatttttcataggcaagtttcctctcagtagtgataacaacatttttagacattcaaaactgtcttcaagaagtcacgtttttcatttataacaattttcttataaaaacatgttgcttttaaaatgtggagtagctgtaatcactttattttatgatagtatcttaatgaaaaatactacttctttagcttgggctacatgtgtcagggtttttctccaggtgcttatattgatctggaattgtaatgtaaaaagcaatgcaaacttaggcgagtacttcttgaaatgtctatttaagctgctttaagttaatagaaaagattaaagcaaaatattcatttttactttttcttatttttaaaattaggctgaatgtacttcatgtgatttgtcaaccatagtttatcagagattatggacttaattgattggtatattagtgacatcaacttgacacaagattagacaaaaaattccttacaaaaatactgtgtaaaagctcagtatatgaatcatcatactgtttgaaattgctaatgacagagtaagtaacactaatattggtcattgatcttcgttcatgaattagtctacagaaaaaaaatgttctgtaaaattagtctgttgaaaatgttttccaaacaatgttactttgaaaattgagtttatgtttgacctaaatgggctaaaattacattagataaactaaaattctgtccgtgtaactataaattttgtgaatgcattttcctggtgtttgaaaaagaagggggggagaattccaggtgccttaatataaagtttgaagcttcatccaccaaagttaaatagagctatttaaaaatgcactttatttgtactctgtgtggcttttgttttagaattttgttcaaattatagcagaatttaggcaaaaataaaacagacatgtatttttgtttgctgaatggatgaaaccattgcattcttgtacactgatttgaaatgctgtaaatatgtcccaatttgtattgattctctttaaatataaaatgtaaataaaatattccaataaaagtttgtgtctggtgttagttt

SEQ ID NO: 419943 - DNA, 2799 bp, Homo sapiens
gtagcggggagaagactggagctccgaggagctgcatctgcggcaacctgtgtgctgacgctacgttcctcctggctccgacgtagctcgcagctccccagtctcactccattccttccccacctggcgcgcacctgctcaagaccagggtcctgccaagcgctaggagggcgcgtgccaggggcgctagggaactgcggagcgcgcgcgccatggggccgccgcctggggccggggtctcctgccgcggtggctgcggcttttccagattgctggcatggtgcttcctgctggccctgagtccgcaggcacccggttcccggggggctgaagcagtgtggaccgcgtacctcaacgtgtcctggcgggttccgcacacgggagtgaaccgtacggtgtgggagctgagcgaggagggcgtgtacggccaggactcgccgctggagcctgtggctggggtcctggtaccgcccgacgggcccggggcgcttaacgcctgtaacccgcacacgaatttcacggtgcccacggtttggggaagcaccgtgcaagtctcttggttggccctcatccaacgcggcgggggctgcaccttcgcagacaagatccatctggcttatgagagaggggcgtctggagccgtcatctttaacttccccgggacccgcaatgaggtcatccccatgtctcacccgggtgcagtagacattgttgcaatcatgatcggcaatctgaaaggcacaaaaattctgcaatctattcaaagaggcatacaagtgacaatggtcatagaagtagggaaaaaacatggcccttgggtgaatcactattcaatttttttcgtttctgtgtccttttttattattacggcggcaactgtgggctattttatcttttattctgctcgaaggctacggaatgcaagagctcaaagcaggaagcagaggcaattaaaggcagatgctaaaaaagctattggaaggcttcaactacgcacactgaaacaaggagacaaggaaattggccctgatggagatagttgtgctgtgtgcattgaattgtataaaccaaatgatttggtacgcatcttaacgtgcaaccatattttccataagacatgtgttgacccatggctgttagaacacaggacttgccccatgtgcaaatgtgacatactcaaagcttgggaattgaggtggatgttgaagatggatcagtgtctttacaagtccctgtatccaatgaaatatctaatagtgcctcctcccatgaagaggataatcgcagcgagaccgcatcatctggatatgcttcagtacagggaacagatgaaccgcctctggaggaacacgtgcagtcaacaaatgaaagtctacagctggtaaaccatgaagcaaattctgtggcagtggatgttattcctcatgttgacaacccaacctttgaagaagacgaaactcctaatcaagagactgctgttcgagaaattaaatcttaaaatctgtgtaaatagaaaacttgaaccattagtaataacagaactgccaatcagggcctagtttctattaataaattggataaatttaataaaataagagtgatactgaaagtgctcagatgactaatattatgctatagttaaatggcttaaaatatttaacctgttaacttttttccacaaactcattataatatttttcataggcaagtttcctctcagtagtgataacaacatttttagacattcaaaactgtcttcaagaagtcacgtttttcatttataacaattttcttataaaaacatgttgcttttaaaatgtggagtagctgtaatcactttattttatgatagtatcttaatgaaaaatactacttctttagcttgggctacatgtgtcagggtttttctccaggtgcttatattgatctggaattgtaatgtaaaaagcaatgcaaacttaggcgagtacttcttgaaatgtctatttaagctgctttaagttaatagaaaagattaaagcaaaatattcatttttactttttcttatttttaaaattaggctgaatgtacttcatgtgatttgtcaaccatagtttatcagagattatggacttaattgattggtatattagtgacatcaacttgacacaagattagacaaaaaattccttacaaaaatactgtgtaactatttctcaaacttgtgggatttttcaaaagctcagtatatgaatcatcatactgtttgaaattgctaatgacagagtaagtaacactaatattggtcattgatcttcgttcatgaattagtctacagaaaaaaaatgttctgtaaaattagtctgttgaaaatgttttccaaacaatgttactttgaaaattgagtttatgtttgacctaaatgggctaaaattacattagataaactaaaattctgtccgtgtaactataaattttgtgaatgcattttcctggtgtttgaaaaagaagggggggagaattccaggtgccttaatataaagtttgaagcttcatccaccaaagttaaatagagctatttaaaaatgcactttatttgtactctgtgtggcttttgttttagaattttgttcaaattatagcagaatttaggcaaaaataaaacagacatgtatttttgtttgctgaatggatgaaaccattgcattcttgtacactgatttgaaatgctgtaaatatgtcccaatttgtattgattctctttaaatataaaatgtaaataaaatattccaataaaagtttgtgtctggtgttagttt

SEQ ID NO: 419944 - DNA, 413 bp, Homo sapiens
tgtggggaagagggtgctggggcatggcaggctgggtgaccgactacccccgtccctttgctgtgtgttctggggcaacctactaatcctctctgcaagtcggtctccttatccccccaaatggaaattgtatttgccttctccactttgggaggctcccacttcttgggagggttacattttttaagtcttaatcatttgtgacatatgtatctatacatccgtatcttttaatgatccgtgtgtaccatctttgtgattatttccttaatattttttctttaagtcagttcattttcgttgaaatacatttatttaaagaaaaatctttgttactctgtaaatgaaaaaacccattttcgctataaataaaaggtaactgtacaaaataagtacaatgcaacaaaaaagtg

SEQ ID NO: 419945 - DNA, 4065 bp, Homo sapiens
tgtgactctagaggatcccctggatcctgcccatgtatcctcagcctcttcctccggccgcccccacgccctgcctgagatcagaccctacattaatatcaccatcctgaaggggcttccttcctcggctccaccctgtggatgtaatggcggcccctgctctgtcctggcgtctgcccctcctcatcctcctcctgcccctggctacctcttgggcatctgcagcggtgaatggcacttcccagttcacatgcttctacaactcgagagccaacatctcctgtgtctggagccaagatggggctctgcaggacacttcctgccaagtccatgcctggccggacagacggcggtggaaccaaacctgtgagctgctccccgtgagtcaagcatcctgggcctgcaacctgatcctcggagccccagattctcagaaactgaccacagttgacatcgtcaccctgagggtgctgtgccgtgagggggtgcgatggagggtgatggccatccaggacttcaagccctttgagaaccttcgcctgatggcccccatctccctccaagttgtccacgtggagacccacagatgcaacataagctgggaaatctcccaagcctcccactactttgaaagacacctggagttcgaggcccggacgctgtccccaggccacacctgggaggaggcccccctgctgactctcaagcagaagcaggaatggatctgcctggagacgctcaccccagacacccagtatgagtttcaggtgcgggtcaagcctctgcaaggcgagttcacgacctggagcccctggagccagcccctggccttcaggacaaagcctgcagcccttgggaaggacaccattccgtggctcggccacctcctcgtgggcctcagcggggcttttggcttcatcatcttagtgtacttgctgatcaactgcaggaacaccgggccatggctgaagaaggtcctgaagtgtaacaccccagacccctcgaagttcttttcccagctgagctcagagcatggaggagacgtccagaagtggctctcttcgcccttcccctcatcgtccttcagccctggcggcctggcacctgagatctcgccactagaagtgctggagagggacaaggtgacgcagctgctcctgcagcaggacaaggtgcctgagcccgcatccttaagcagcaaccactcgctgaccagctgcttcaccaaccagggttacttcttcttccacctcccggatgccttggagatagaggcctgccaggtgtactttacttacgacccctactcagaggaagaccctgatgagggtgtggccggggcacccacagggtcttccccccaacccctgcagcctctgtcaggggaggacgacgcctactgcaccttcccctccagggatgacctgctgctcttctcccccagtctcctcggtggccccagccccccaagcactgcccctgggggcagtggggccggtgaagagaggatgcccccttctttgcaagaaagagtccccagagactgggacccccagcccctggggcctcccaccccaggagtcccagacctggtggattttcagccaccccctgagctggtgctgcgagaggctggggaggaggtccctgacgctggccccagggagggagtcagtttcccctggtccaggcctcctgggcagggggagttcagggcccttaatgctcgcctgcccctgaacactgatgcctacttgtccctccaagaactccagggtcaggacccaactcacttggtgtagacagatggccagggtgggaggcaggcagctgcctgctctgcgccgagcctcagaaggaccctgttgagggtcctcagtccactgctgaggacactcagtgtccagttgcagctggacttctccacccggatggcccccacccagtcctgcacacttggtccatccatttccaaacctccactgctgctcccgggtcctgctgcccgagccaggaactgtgtgtgttgcaggggggcagtaactccccaactccctcgttaatcacaggatcccacgaatttaggctcagaagcatcgctcctctccagccctgcagctattcaccaatatcagtcctcgcggctctccagggctccctgccctgacctcttccctgggttttctgccccagcctcctccttccctcccctccccgtccacagggcagcctgagcgtgctttccaaaacccaaatatggccacgctccccctcggttcaaaaccttgcacaggtcccactgccctcagccccacttctcagcctggtacttgtacctccggtgtcgtgtggggacatccccttctgcaatcctccctaccgtcctcctgagccactcagagctccctcacaccccctctgttgcacatgctattccctggggctgctgtgcgctccccctcatctaggtgacaaacttccctgactcttcaagtgccggttttgcttctcctggagggaagcactgcctcccttaatctgccagaaacttctagcgtcagtgctggagggagaagctgtcagggacccagggcgcctggagaaagaggccctgttactattcctttgggatctctgaggcctcagagtgcttggctgctgtatctttaatgctggggcccaagtaagggcacagatccccccacaaagtggatgcctgctgcatcttcccacagtggcttcacagacccacaagagaagctgatggggagtaaaccctggagtccgaggcccaggcagcagccccgcctagtggtgggccctgatgctgccaggcctgggacctcccactgccccctccactggaggggtctcctctgcagctcagggactggcacactggcctccagaagggcagctccacagggcagggcctcattatttttcactgccccagacacagtgcccaacaccccgtcgtataccctggatgaacgaattaattacctggcaccacctcgtctgggctccctgcgcctgacattcacacagagaggcagagtcccgtgcccattaggtctggcatgccccctcctgcaaggggctcaaccccctaccccgacccctccacgtatctttcctaggcagatcacgttgcaatggctcaaacaacattccaccccagcaggacagtgaccccagtcccagctaactctgacctgggagccctcaggcacctgcacttacaggccttgctcacagctgattgggcacctgaccacacgcccccacaggctctgaccagcagcctatgagggggtttggcaccaagctctgtccaatcaggtaggctgggcctgaactagccaatcagatcaactctgtcttgggcgtttgaactcagggagggaggcccttgggagcaggtgcttgtggacaaggctccacaagcgttgagccttggaaaggtagacaagcgttgagccactaagcagaggaccttgggttcccaatacaaaaatacctactgctgagagggctgctgaccatttggtcaggattcctgttgcctttatatccaaaataaactcccctttcttgaggttgtctgagtcttgggtctatgccttgaaaaaagctgaattattggacagtctcacctcctgccatagggtcctgaatgtttcagaccacaaggggctccacacctttgctgtgtgttctggggcaacctactaatcctctctgcaagtcggtctccttatccccccaaatggaaattgtatttgccttctccactttgggaggctcccacttcttgggagggttacattttttaagtcttaatcatttgtgacatatgtatctatacatccgtatcttttaatgatccgtgtgtaccatctttgtgattatttccttaatattttttctttaagtcagttcattttcgttgaaatacatttatttaaagaaaaatctttgttactctgtaaatgaaaaaacccattttcgctataaataaaaggtaactgtacaaaataagtacaatgcaacaaaaaagtg

SEQ ID NO: 419946 - DNA, 3215 bp, Homo sapiens
gcagccagagctcagcagggccctggagagatggccacggtcccagcaccggggaggactggagagcgcgcgctgccaccgccccatgtctcagccagggcttccttcctcggctccaccctgtggatgtaatggcggcccctgctctgtcctggcgtctgcccctcctcatcctcctcctgcccctggctacctcttgggcatctgcagcggtgaatggcacttcccagttcacatgcttctacaactcgagagccaacatctcctgtgtctggagccaagatggggctctgcaggacacttcctgccaagtccatgcctggccggacagacggcggtggaaccaaacctgtgagctgctccccgtgagtcaagcatcctgggcctgcaacctgatcctcggagccccagattctcagaaactgaccacagttgacatcgtcaccctgagggtgctgtgccgtgagggggtgcgatggagggtgatggccatccaggacttcaagccctttgagaaccttcgcctgatggcccccatctccctccaagttgtccacgtggagacccacagatgcaacataagctgggaaatctcccaagcctcccactactttgaaagacacctggagttcgaggcccggacgctgtccccaggccacacctgggaggaggcccccctgctgactctcaagcagaagcaggaatggatctgcctggagacgctcaccccagacacccagtatgagtttcaggtgcgggtcaagcctctgcaaggcgagttcacgacctggagcccctggagccagcccctggccttcaggacaaagcctgcagcccttgggaaggacaccattccgtggctcggccacctcctcgtgggcctcagcggggcttttggcttcatcatcttagtgtacttgctgatcaactgcaggaacaccgggccatggctgaagaaggtcctgaagtgtaacaccccagacccctcgaagttcttttcccagctgagctcagagcatggaggagacgtccagaagtggctctcttcgcccttcccctcatcgtccttcagccctggcggcctggcacctgagatctcgccactagaagtgctggagagggacaaggtgacgcagctgctcctgcagcaggacaaggtgcctgagcccgcatccttaagcagcaaccactcgctgaccagctgcttcaccaaccagggttacttcttcttccacctcccggatgccttggagatagaggcctgccaggtgtactttacttacgacccctactcagaggaagaccctgatgagggtgtggccggggcacccacagggtcttccccccaacccctgcagcctctgtcaggggaggacgacgcctactgcaccttcccctccagggatgacctgctgctcttctcccccagtctcctcggtggccccagccccccaagcactgcccctgggggcagtggggccggtgaagagaggatgcccccttctttgcaagaaagagtccccagagactgggacccccagcccctggggcctcccaccccaggagtcccagacctggtggattttcagccaccccctgagctggtgctgcgagaggctggggaggaggtccctgacgctggccccagggagggagtcagtttcccctggtccaggcctcctgggcagggggagttcagggcccttaatgctcgcctgcccctgaacactgatgcctacttgtccctccaagaactccagggtcaggacccaactcacttggtgtagacagatggccagggtgggaggcaggcagctgcctgctctgcgccgagcctcagaaggaccctgttgagggtcctcagtccactgctgaggacactcagtgtccagttgcagctggacttctccacccggatggcccccacccagtcctgcacacttggtccatccatttccaaacctccactgctgctcccgggtcctgctgcccgagccaggaactgtgtgtgttgcaggggggcagtaactccccaactccctcgttaatcacaggatcccacgaatttaggctcagaagcatcgctcctctccagccctgcagctattcaccaatatcagtcctcgcggctctccagggctccctgccctgacctcttccctgggttttctgccccagcctcctccttccctcccctccccgtccacagggcagcctgagcgtgctttccaaaacccaaatatggccacgctccccctcggttcaaaaccttgcacaggtcccactgccctcagccccacttctcagcctggtacttgtacctccggtgtcgtgtggggacatccccttctgcaatcctccctaccgtcctcctgagccactcagagctccctcacaccccctctgttgcacatgctattccctggggctgctgtgcgctccccctcatctaggtgacaaacttccctgactcttcaagtgccggttttgcttctcctggagggaagcactgcctcccttaatctgccagaaacttctagcgtcagtgctggagggagaagctgtcagggacccagggcgcctggagaaagaggccctgttactattcctttgggatctctgaggcctcagagtgcttggctgctgtatctttaatgctggggcccaagtaagggcacagatccccccacaaagtggatgcctgctgcatcttcccacagtggcttcacagacccacaagagaagctgatggggagtaaaccctggagtccgaggcccaggcagcagccccgcctagtggtgggccctgatgctgccaggcctgggacctcccactgccccctccactggaggggtctcctctgcagctcagggactggcacactggcctccagaagggcagctccacagggcagggcctcattatttttcactgccccagacacagtgcccaacaccccgtcgtataccctggatgaacgaattaattacctggcaccacctcgtctgggctccctgcgcctgacattcacacagagaggcagagtcccgtgcccattaggtctggcatgccccctcctgcaaggggctcaaccccctaccccgacccctccacgtatctttcctaggcagggcctcattatttttcactgccccagacacagtgcccaacaccccgtcgtataccctggatgaacgaattaattacctggcac

SEQ ID NO: 419947 - DNA, 4050 bp, Homo sapiens
gcagccagagctcagcagggccctggagagatggccacggtcccagcaccggggaggactggagagcgcgcgctgccaccgccccatgtctcagccagggcttccttcctcggctccaccctgtggatgtaatggcggcccctgctctgtcctggcgtctgcccctcctcatcctcctcctgcccctggctacctcttgggcatctgcagcggtgaatggcacttcccagttcacatgcttctacaactcgagagccaacatctcctgtgtctggagccaagatggggctctgcaggacacttcctgccaagtccatgcctggccggacagacggcggtggaaccaaacctgtgagctgctccccgtgagtcaagcatcctgggcctgcaacctgatcctcggagccccagattctcagaaactgaccacagttgacatcgtcaccctgagggtgctgtgccgtgagggggtgcgatggagggtgatggccatccaggacttcaagccctttgagaaccttcgcctgatggcccccatctccctccaagttgtccacgtggagacccacagatgcaacataagctgggaaatctcccaagcctcccactactttgaaagacacctggagttcgaggcccggacgctgtccccaggccacacctgggaggaggcccccctgctgactctcaagcagaagcaggaatggatctgcctggagacgctcaccccagacacccagtatgagtttcaggtgcgggtcaagcctctgcaaggcgagttcacgacctggagcccctggagccagcccctggccttcaggacaaagcctgcagcccttgggaaggacaccattccgtggctcggccacctcctcgtgggcctcagcggggcttttggcttcatcatcttagtgtacttgctgatcaactgcaggaacaccgggccatggctgaagaaggtcctgaagtgtaacaccccagacccctcgaagttcttttcccagctgagctcagagcatggaggagacgtccagaagtggctctcttcgcccttcccctcatcgtccttcagccctggcggcctggcacctgagatctcgccactagaagtgctggagagggacaaggtgacgcagctgctcctgcagcaggacaaggtgcctgagcccgcatccttaagcagcaaccactcgctgaccagctgcttcaccaaccagggttacttcttcttccacctcccggatgccttggagatagaggcctgccaggtgtactttacttacgacccctactcagaggaagaccctgatgagggtgtggccggggcacccacagggtcttccccccaacccctgcagcctctgtcaggggaggacgacgcctactgcaccttcccctccagggatgacctgctgctcttctcccccagtctcctcggtggccccagccccccaagcactgcccctgggggcagtggggccggtgaagagaggatgcccccttctttgcaagaaagagtccccagagactgggacccccagcccctggggcctcccaccccaggagtcccagacctggtggattttcagccaccccctgagctggtgctgcgagaggctggggaggaggtccctgacgctggccccagggagggagtcagtttcccctggtccaggcctcctgggcagggggagttcagggcccttaatgctcgcctgcccctgaacactgatgcctacttgtccctccaagaactccagggtcaggacccaactcacttggtgtagacagatggccagggtgggaggcaggcagctgcctgctctgcgccgagcctcagaaggaccctgttgagggtcctcagtccactgctgaggacactcagtgtccagttgcagctggacttctccacccggatggcccccacccagtcctgcacacttggtccatccatttccaaacctccactgctgctcccgggtcctgctgcccgagccaggaactgtgtgtgttgcaggggggcagtaactccccaactccctcgttaatcacaggatcccacgaatttaggctcagaagcatcgctcctctccagccctgcagctattcaccaatatcagtcctcgcggctctccagggctccctgccctgacctcttccctgggttttctgccccagcctcctccttccctcccctccccgtccacagggcagcctgagcgtgctttccaaaacccaaatatggccacgctccccctcggttcaaaaccttgcacaggtcccactgccctcagccccacttctcagcctggtacttgtacctccggtgtcgtgtggggacatccccttctgcaatcctccctaccgtcctcctgagccactcagagctccctcacaccccctctgttgcacatgctattccctggggctgctgtgcgctccccctcatctaggtgacaaacttccctgactcttcaagtgccggttttgcttctcctggagggaagcactgcctcccttaatctgccagaaacttctagcgtcagtgctggagggagaagctgtcagggacccagggcgcctggagaaagaggccctgttactattcctttgggatctctgaggcctcagagtgcttggctgctgtatctttaatgctggggcccaagtaagggcacagatccccccacaaagtggatgcctgctgcatcttcccacagtggcttcacagacccacaagagaagctgatggggagtaaaccctggagtccgaggcccaggcagcagccccgcctagtggtgggccctgatgctgccaggcctgggacctcccactgccccctccactggaggggtctcctctgcagctcagggactggcacactggcctccagaagggcagctccacagggcagggcctcattatttttcactgccccagacacagtgcccaacaccccgtcgtataccctggatgaacgaattaattacctggcaccacctcgtctgggctccctgcgcctgacattcacacagagaggcagagtcccgtgcccattaggtctggcatgccccctcctgcaaggggctcaaccccctaccccgacccctccacgtatctttcctaggcagatcacgttgcaatggctcaaacaacattccaccccagcaggacagtgaccccagtcccagctaactctgacctgggagccctcaggcacctgcacttacaggccttgctcacagctgattgggcacctgaccacacgcccccacaggctctgaccagcagcctatgagggggtttggcaccaagctctgtccaatcaggtaggctgggcctgaactagccaatcagatcaactctgtcttgggcgtttgaactcagggagggaggcccttgggagcaggtgcttgtggacaaggctccacaagcgttgagccttggaaaggtagacaagcgttgagccactaagcagaggaccttgggttcccaatacaaaaatacctactgctgagagggctgctgaccatttggtcaggattcctgttgcctttatatccaaaataaactcccctttcttgaggttgtctgagtcttgggtctatgccttgaaaaaagctgaattattggacagtctcacctcctgccatagggtcctgaatgtttcagaccacaaggggctccacacctttgctgtgtgttctggggcaacctactaatcctctctgcaagtcggtctccttatccccccaaatggaaattgtatttgccttctccactttgggaggctcccacttcttgggagggttacattttttaagtcttaatcatttgtgacatatgtatctatacatccgtatcttttaatgatccgtgtgtaccatctttgtgattatttccttaatattttttctttaagtcagttcattttcgttgaaatacatttatttaaagaaaaatctttgttactctgtaaatgaaaaaacccattttcgctataaataaaaggtaactgtacaaaataagtacaatgcaacaaaaaagtg

SEQ ID NO: 419948 - DNA, 2293 bp, Homo sapiens
gagtacctcggagctgcgacctccagttcacaataccacctgcctcacacccgggctcatcttttcatcccacacccaccacccccctctccgttcacggtgtcccgggaggctgcgacctgcgtagatgatttagcagactgcccctgcccatgctcctgctcctgctcctcctcctcctcttccccgctctctccctctcgcctcctcttccagtccaggcgcccagactcggcgaacgcagcgccttgccaccagcggtgcctcgggctgcccggcgcgccgcgctcccaggttctgtctcgccgcaccccggcgggcactggcgcgggcaaggacgctggcggggagaacgccctgggctcaacgtactccagaatcgaatgttgagagaagcagtgctctgatccagctcaggagaaaaaggagcgggttccgagtgagacttctggagccagctggacgtgccggtttgcccagtgcggcgcggctgcacgcaccgtccacaagagtctcagtcgcccaggctggagtgcagcagcacagtctcacctcattgcaacctccgcctcccgggttcgcgggttctccgcctcagcttcctagtagctgggattgcaggcactcaccaccatgcccggctaattttttgaatttttagtggagacgggatttcaccatgttggccatgctggtcttgaacccccgacctcggatgattcgcccgcctcggcctcccaaagtgctggaattacaggcgaaccttcactcagaagaaatgctgtggcccttccctttaccaacagaaaatggaacacaagagaccacatagctgaacaaattatagcctccttacaagtgagaaaccttcgaggctacatagttttcagccaaaggaaaataaccaacagcttctccacagtgtagactgaaacaagggaaacatgaacatcacaaactgtaccacagaggccagcatggctataagacccaagaccatcactgagaagatgctcatttgcatgactctggtggtcatcaccaccctcaccacgttgctgaacttggctgtgatcatggctattggcaccaccaagaagctccaccagcctgccaactacctaatctgttctctggccgtgacggacctcctggtggcagtgctcgtcatgcccctgagcatcatctacattgtcatggatcgctggaagcttgggtacttcctctgtgaggtgtggctgagtgtggacatgacctgctgcacctgctccatcctccacctctgtgtcattgccctggacaggtactgggccatcaccaatgctattgaatacgccaggaagaggacggccaagagggccgcgctgatgatccttaccgtctggaccatctccattttcatctccatgccccctctgttctggagaagccaccgccgcctaagccctccccctagtcagtgcaccatccagcacgaccatgttatctacaccatttactccacgctgggtgcgttttatatccccttgactttgatactgattctctattaccggatttaccacgcggccaagagcctttaccagaaaaggggatcaagtcggcacttaagcaacagaagcacagatagccagaattcttttgcaagttgtaaacttacacagactttctgtgtgtctgacttctccacctcagaccctaccacagagtttgaaaagttccatgcctccatcaggatcccccccttcgacaatgatctagatcacccaggagaacgtcagcagatctctagcaccagggaacggaaggcagcacgcatcctggggctgattctgggtgcattcattttatcctggctgccatttttcatcaaagagttgattgtgggtctgagcatctacaccgtgtcctcggaagtggccgactttctgacgtggctcggttatgtgaattctctgatcaaccctctgctctatacgagttttaatgaagactttaagctggcttttaaaaagctcattagatgccgagagcatacttagactgtaaaaagctaaaaggcacgactttttccagagcctcatgagtggatgggggtaaggggtgcaacttattaattcttgaacatacttggttcaggagagtttgtaagtatgtgtggtcttgtttccttgtttgtttgtttgttttgttctgttttgtttgaggattgttatttggcgtgctgttttctacctctggtcttatctgtgatacataatttcaaataaacattatcatacaaaaacagaaa

SEQ ID NO: 419949 - DNA, 1036 bp, Homo sapiens
gagtacctcggagctgcgacctccagttcacaataccacctgcctcacacccgggctcatcttttcatcccacacccaccacccccctctccgttcacggtgtcccgggaggctgcgacctgcgtagatgatttagcagactgcccctgcccatgctcctgctcctgctcctcctcctcctcttccccgctctctccctctcgcctcctcttccagtccaggcgcccagactcggcgaacgcagcgccttgccaccagcggtgcctcgggctgcccggcgcgccgcgctcccaggttctgtctcgccgcaccccggcgggcactggcgcgggcaaggacgctggcggggagaacgccctgggctcaacgtactccagaatcgaatgttgagagaagcagtgctctgatccagctcaggagaaaaaggagcgggttccgagtgagacttctggagccagctggacgtgccggtttgcccagtgcggcgcggctgcacgcaccgtccacaaggtctttttctgatcccagaaagactaactaaaagtctggaacctttaaaagtctgataagaaatatttaccatctaatctctctgaagcctgctacttggaggattcatctgcataataagaaccctggtctccacaaccccttatcttcattcagacattcctttctatattgattccagttctttagataataacttaacactttcaaccaattgccaatcagaaaatctttaaatccacctataactggaagctgccctgccaccatcactgctttgagttgttctgcctttctggaccaaaccaatgtacaccttatatgtatcaattgatgtctgcttgtaacttctgaccccctaaaatgtataagaccaagctgtaacccaaccatctgcgtacatgttctccgaccctcctgaagctgtgtcattggcatgcccttattcttgacaaaataaacttctaaattgattgagaaaaaaaatttaaaaaaataaaaacctgattttcttggtcagagctgg

SEQ ID NO: 419950 - DNA, 2044 bp, Homo sapiens
gagtacctcggagctgcgacctccagttcacaataccacctgcctcacacccgggctcatcttttcatcccacacccaccacccccctctccgttcacggtgtcccgggaggctgcgacctgcgtagatgatttagcagactgcccctgcccatgctcctgctcctgctcctcctcctcctcttccccgctctctccctctcgcctcctcttccagtccaggcgcccagactcggcgaacgcagcgccttgccaccagcggtgcctcgggctgcccggcgcgccgcgctcccaggttctgtctcgccgcaccccggcgggcactggcgcgggcaaggacgctggcggggagaacgccctgggctcaacgtactccagaatcgaatgttgagagaagcagtgctctgatccagctcaggagaaaaaggagcgggttccgagtgagacttctggagccagctggacgtgccggtttgcccagtgcggcgcggctgcacgcaccgtccacaaggaaccttcactcagaagaaatgctgtggcccttccctttaccaacagaaaatggaacacaagagaccacatagctgaacaaattatagcctccttacaagtgagaaaccttcgaggctacatagttttcagccaaaggaaaataaccaacagcttctccacagtgtagactgaaacaagggaaacatgaacatcacaaactgtaccacagaggccagcatggctataagacccaagaccatcactgagaagatgctcatttgcatgactctggtggtcatcaccaccctcaccacgttgctgaacttggctgtgatcatggctattggcaccaccaagaagctccaccagcctgccaactacctaatctgttctctggccgtgacggacctcctggtggcagtgctcgtcatgcccctgagcatcatctacattgtcatggatcgctggaagcttgggtacttcctctgtgaggtgtggctgagtgtggacatgacctgctgcacctgctccatcctccacctctgtgtcattgccctggacaggtactgggccatcaccaatgctattgaatacgccaggaagaggacggccaagagggccgcgctgatgatccttaccgtctggaccatctccattttcatctccatgccccctctgttctggagaagccaccgccgcctaagccctccccctagtcagtgcaccatccagcacgaccatgttatctacaccatttactccacgctgggtgcgttttatatccccttgactttgatactgattctctattaccggatttaccacgcggccaagagcctttaccagaaaaggggatcaagtcggcacttaagcaacagaagcacagatagccagaattcttttgcaagttgtaaacttacacagactttctgtgtgtctgacttctccacctcagaccctaccacagagtttgaaaagttccatgcctccatcaggatcccccccttcgacaatgatctagatcacccaggagaacgtcagcagatctctagcaccagggaacggaaggcagcacgcatcctggggctgattctgggtgcattcattttatcctggctgccatttttcatcaaagagttgattgtgggtctgagcatctacaccgtgtcctcggaagtggccgactttctgacgtggctcggttatgtgaattctctgatcaaccctctgctctatacgagttttaatgaagactttaagctggcttttaaaaagctcattagatgccgagagcatacttagactgtaaaaagctaaaaggcacgactttttccagagcctcatgagtggatgggggtaaggggtgcaacttattaattcttgaacatacttggttcaggagagtttgtaagtatgtgtggtcttgtttccttgtttgtttgtttgttttgttctgttttgtttgaggattgttatttggcgtgctgttttctacctctggtcttatctgtgatacataatttcaaataaacattatcatacaaaaacagaaa

SEQ ID NO: 419951 - DNA, 2105 bp, Homo sapiens
gagtacctcggagctgcgacctccagttcacaataccacctgcctcacacccgggctcatcttttcatcccacacccaccacccccctctccgttcacggtgtcccgggaggctgcgacctgcgtagatgatttagcagactgcccctgcccatgctcctgctcctgctcctcctcctcctcttccccgctctctccctctcgcctcctcttccagtccaggcgcccagactcggcgaacgcagcgccttgccaccagcggtgcctcgggctgcccggcgcgccgcgctcccaggttctgtctcgccgcaccccggcgggcactggcgcgggcaaggacgctggcggggagaacgccctgggctcaacgtactccagaatcgaatgttgagagaagcagtgctctgatccagctcaggagaaaaaggagcgggttccgagtgagacttctggagccagctggacgtgccggtttgcccagtgcggcgcggctgcacgcaccgtccacaaggtgaggggcgcacaccttccgggacgaccttggcttcccttcttacccccacccactccaggaaccttcactcagaagaaatgctgtggcccttccctttaccaacagaaaatggaacacaagagaccacatagctgaacaaattatagcctccttacaagtgagaaaccttcgaggctacatagttttcagccaaaggaaaataaccaacagcttctccacagtgtagactgaaacaagggaaacatgaacatcacaaactgtaccacagaggccagcatggctataagacccaagaccatcactgagaagatgctcatttgcatgactctggtggtcatcaccaccctcaccacgttgctgaacttggctgtgatcatggctattggcaccaccaagaagctccaccagcctgccaactacctaatctgttctctggccgtgacggacctcctggtggcagtgctcgtcatgcccctgagcatcatctacattgtcatggatcgctggaagcttgggtacttcctctgtgaggtgtggctgagtgtggacatgacctgctgcacctgctccatcctccacctctgtgtcattgccctggacaggtactgggccatcaccaatgctattgaatacgccaggaagaggacggccaagagggccgcgctgatgatccttaccgtctggaccatctccattttcatctccatgccccctctgttctggagaagccaccgccgcctaagccctccccctagtcagtgcaccatccagcacgaccatgttatctacaccatttactccacgctgggtgcgttttatatccccttgactttgatactgattctctattaccggatttaccacgcggccaagagcctttaccagaaaaggggatcaagtcggcacttaagcaacagaagcacagatagccagaattcttttgcaagttgtaaacttacacagactttctgtgtgtctgacttctccacctcagaccctaccacagagtttgaaaagttccatgcctccatcaggatcccccccttcgacaatgatctagatcacccaggagaacgtcagcagatctctagcaccagggaacggaaggcagcacgcatcctggggctgattctgggtgcattcattttatcctggctgccatttttcatcaaagagttgattgtgggtctgagcatctacaccgtgtcctcggaagtggccgactttctgacgtggctcggttatgtgaattctctgatcaaccctctgctctatacgagttttaatgaagactttaagctggcttttaaaaagctcattagatgccgagagcatacttagactgtaaaaagctaaaaggcacgactttttccagagcctcatgagtggatgggggtaaggggtgcaacttattaattcttgaacatacttggttcaggagagtttgtaagtatgtgtggtcttgtttccttgtttgtttgtttgttttgttctgttttgtttgaggattgttatttggcgtgctgttttctacctctggtcttatctgtgatacataatttcaaataaacattatcatacaaaaacagaaa

SEQ ID NO: 419952 - DNA, 1896 bp, Homo sapiens
ttgtctcttaagtggggtcggaataaggttgtggctaggaagttcctgacaacccagggccagtgagtgtctcggaagcctgtgaggggcggagacccggcccggggaggtggagaagctcgccggccgcggaagactaggggtgaggctgctgcgaggaagacccggtcagctgtcccttcccccatcggtcctcttaggggaagtggagatgtgggcctcggagctgcgtggcccgggctgtgcggattccctaaacgccgcacttgcgcacagccccttacgtaaccgtcagtgccggggattccctggagggggtcattctattcaaccattatacacaccccgggctcctgccgccgcgccgccgccgcctcacaaaatggcggcgcccatagaggagaccgcggccgcctccccggccccattttgtgggaggcgagagatctgtcaacatggaaaacctctgctgaggatgcatccgagtttggaaaccccacttaagggatggagcctgggggatcacattaaacggaaaatgccaacgacttctaccacctctacgcgtttttagtttttcattttctcgaaggaagcgccagaagcctgtggagtaattgtaactagagggagaacggaaagctgaggtgactgctccggggacttggcgcggcgccttggtggctttggttgctcttccacgctcccggcagctgaccagaatctcttggagggtctcctgggccacctcggccgcgccagtcgtgcagtgagacttctgtagttttaaaatgccacagtccacggcccggtcggcaccgctcgcctgaatcgtgggctttgggaaccttggaggctgctgctccaggaactcgcggtcggccgggagccggggagcttcgttgctgggagcgggcggtattcgcggactccggcggccctggcgggtcgcggccgggatccgagccggggatgacgatgctgatggagctgatggggcaagagtgggaacggaggcacgtacactgaaatttaagtcatccaagttgggacttaagatagcaggttaatattgtctcaggcgagacttagaacgtcttttctggtatcccagtctgcagtgggcaaatctattgtctttatttctcatttaagggcagaatggagggatgacatatttttacttttcaagaggcggttgccacttttaagtcactgttgtgtgtgtgtgtgtacatacacaaacatacgatagtgtgttttcagagcaagtatcaaaggctaaagacttggagtgatactagtgtttaaaagcctttttaaaaaaattaagatgtgatgagaaactggagaattgacttttaaaaatttcttttctgtagaagaggctatcttcaaaatggagtcctaaagtatatctgatggatagaatttaaattcttaacactgtatataccctgtggtcaaaagcatcaacgtaaaacttgatgtttatcagattacttatgtttcaattttcctgtggttagaaaaattaagacagaagtaagctattaacggtatttgcttgtaagagtaacgttaaaggtttaaggaaaggtttgttgaaatcgatatgcatcacacgaatcatttattttcaatgttgttttccagttgcagcaatcatttgtgtttacatgactttgaaaaagggtttagtttatgttgattttgaccctcttatttaatctctagtgcagaagtgcagctttctgcaggctgcgcctcaatcgctaagttccactctccatcctctgccgcgctactcctggcatgtggatcaccaagatacaatttctggtcctgtctgttcttattgatgtcctttacagttaataaatttgattgccacta

SEQ ID NO: 419953 - DNA, 2202 bp, Homo sapiens
ttgtctcttaagtggggtcggaataaggttgtggctaggaagttcctgacaacccagggccagtgagtgtctcggaagcctgtgaggggcggagacccggcccggggaggtggagaagctcgccggccgcggaagactaggggtgaggctgctgcgaggaagacccggtcagctgtcccttcccccatcggtcctcttaggggaagtggagatgtgggcctcggagctgcgtggcccgggctgtgcggattccctaaacgccgcacttgcgcacagccccttacgtaaccgtcagtgccggggattccctggagggggtcattctattcaaccattatacacaccccgggctcctgccgccgcgccgccgccgcctcacaaaatggcggcgcccatagaggagaccgcggccgcctccccggccccattttgtgggaggcgagagatctgtcaacatggaaaacctctgctgaggatgcatccgagtttggaaaccccacttaagggatggagcctgggggatcacattaaacggaaaatgccaacgacttctaccacctctacgcgtttttagtttttcattttctcgaaggaagcgccagaagcctgtggagtaattgtaactagagggagaacggaaagctgaggtgactgctccggggacttggcgcggcgccttggtggctttggttgctcttccacgctcccggcagctgaccagaatctcttggagggtctcctgggccacctcggccgcgccagtcgtgcagtgagacttctgtagttttaaaatgccacagtccacggcccggtcggcaccgctcgcctgaatcgtgggctttgggaaccttggaggctgctgctccaggaactcgcggtcggccgggagccggggagcttcgttgctgggagcgggcggtattcgcggactccggcggccctggcgggtcgcggccgggatccgagccggggatgacgatgctgatggagctgatggggcaagagtgggaacggaggcacgtacactgaaatttaagtcatccaagttgggacttaagatagcaggttaatattgtctcaggcgagacttagaacgtcttttctggtatcccagtctgcagtgggcaaatctattgtctttatttctcatttaagggcagaatggagggatgacatatttttacttttcaagaggcggttgccacttttaagtcactgttgtgtgtgtgtgtgtacatacacaaacatacgatagtgtgttttcagagcaagtatcaaaggctaaagacttggagtgatactagtgtttaaaagcctttttaaaaaaattaagatgtgatgagaaactggagaattgacttttaaaaatttcttttctgtagaagaggctatcttcaaaatggagtcctaaagtatatctgatggatagaatttaaattcttaacactgtatataccctgtggtcaaaagcatcaacgtaaaacttgatgtttatcagattacttatgtttcaattttcctgtggttagaaaaattaagacagaagtaagctattaacggtatttgcttgtaagagtaacgttaaaggtttaaggaaaggtttgttgaaatcgatatgcatcacacgaatcatttattttcaatgttgttttccagttgcagcaatcatttgtgtttacatgactttgaaaaagggtttagtttatgttgattttgaccctcttatttaatctctagtgcagaagtgcagctttctgcaggctgcgcctcaatcgctaagttccactctccatcctctgccgcgctactcctggcatgtggatcaccaagatacaatttctggtcctgtctgttcttattgatgtcctttacagttaataaatttgattgccactaatcagtctgtatctcttgcaaaaacaccacatttagcatccaagtagagtcagagtatgttttttatgagattgtactaaagtaaccttctattacatttcttattaccatattgcatttcctatagtgggcagcatagagcaggtggatcctgacaaagtaatgttagagatgtgctgacagctttacaatagatattctccaactaatttgacaagatataaaataaaatgtagttcgtagttttcaagcattaatggaaagtgttcctattaaaaaattaccaataacagtggaaaaatgcaa

SEQ ID NO: 419954 - DNA, 1476 bp, Homo sapiens
ttgtctcttaagtggggtcggaataaggttgtggctaggaagttcctgacaacccagggccagtgagtgtctcggaagcctgtgaggggcggagacccggcccggggaggtggagaagctcgccggccgcggaagactaggggtgaggctgctgcgaggaagacccggtcagctgtcccttcccccatcggtcctcttaggggaagtggagatgtgggcctcggagctgcgtggcccgggctgtgcggattccctaaacgccgcacttgcgcacagccccttacgtaaccgtcagtgccggggattccctggagggggtcattctattcaaccattatacacaccccgggctcctgccgccgcgccgccgccgcctcacaaaatggcggcgcccatagaggagaccgcggccgcctccccggccccattttgtgggaggcgagagatctgtcaacatggaaaacctctgctgaggatgcatccgagtttggaaaccccacttaagggatggagcctgggggatcacattaaacggaaaatgccaacgacttctaccacctctacgcgtttttagtttttcattttctcgaaggaagcgccagaagcctgtggagtaattgtaactagagggagaacggaaagctgaggtgactgctccggggacttggcgcggcgccttggtggctttggttgctcttccacgctcccggcagctgaccagaatctcttggagggtctcctgggccacctcggccgcgccagtcgtgcagtgagacttctgtagttttaaaatgccacagtccacggcccggtcggcaccgctcgcctgaatcgtgggctttgggaaccttggaggctgctgctccaggaactcgcggtcggccgggagccggggagcttcgttgctgggagcgggcggtattcgcggactccggcggccctggcgggtcgcggccgggatccgagccggggatgacgatgctgatggagctgatggggcaagagtgggaacggagaagtgcagctttctgcaggctgcgcctcaatcgctaagttccactctccatcctctgccgcgctactcctggcatgtggatcaccaagatacaatttctggtcctgtctgttcttattgatgtcctttacagttaataaatttgattgccactaatcagtctgtatctcttgcaaaaacaccacatttagcatccaagtagagtcagagtatgttttttatgagattgtactaaagtaaccttctattacatttcttattaccatattgcatttcctatagtgggcagcatagagcaggtggatcctgacaaagtaatgttagagatgtgctgacagctttacaatagatattctccaactaatttgacaagatataaaataaaatgtagttcgtagttttcaagcattaatggaaagtgttcctattaaaaaattaccaataacagtggaaaaatgcaa

SEQ ID NO: 419955 - DNA, 1048 bp, Homo sapiens
ttgtctcttaagtggggtcggaataaggttgtggctaggaagttcctgacaacccagggccagtgagtgtctcggaagcctgtgaggggcggagacccggcccggggaggtggagaagctcgccggccgcggaagactaggggtgaggctgctgcgaggaagacccggtcagctgtcccttcccccatcggtcctcttaggggaagtggagatgtgggcctcggagctgcgtggcccgggctgtgcggattccctaaacgccgcacttgcgcacagccccttacgtaaccgtcagtgccggggattccctggagggggtcattctattcaaccattatacacaccccgggctcctgccgccgcgccgccgccgcctcacaaaatggcggcgcccatagaggagaccgcggccgcctccccggccccattttgtgggaggcgagagatctgtcaacatggaaaacctctgctgaggatgcatccgagtttggaaaccccacttaagggatggagcctgggggatcacattaaacggaaaatgccaacgacttctaccacctctacgcgtttttagtttttcattttctcgaaggaagcgccagaagcctgtggagtaattgtaactagagggagaacggaaagctgaggtgactgtcctggcatgtggatcaccaagatacaatttctggtcctgtctgttcttattgatgtcctttacagttaataaatttgattgccactaatcagtctgtatctcttgcaaaaacaccacatttagcatccaagtagagtcagagtatgttttttatgagattgtactaaagtaaccttctattacatttcttattaccatattgcatttcctatagtgggcagcatagagcaggtggatcctgacaaagtaatgttagagatgtgctgacagctttacaatagatattctccaactaatttgacaagatataaaataaaatgtagttcgtagttttcaagcattaatggaaagtgttcctattaaaaaattaccaataacagtggaaaaatgcaa

SEQ ID NO: 419956 - DNA, 10143 bp, Homo sapiens
  misc_feature (1)..(1): n is a, c, g, or t
  misc_feature (3)..(5): n is a, c, g, or t
  misc_feature (7)..(7): n is a, c, g, or t
  misc_feature (9)..(9): n is a, c, g, or t
  misc_feature (46)..(46): n is a, c, g, or t
  misc_feature (2574)..(2574): n is a, c, g, or t
  misc_feature (5466)..(5466): n is a, c, g, or t
  misc_feature (9882)..(9882): n is a, c, g, or t
ngnnnananagagtttcactctgttgcccaggctggagtgcagtgncgcaatctcggctcactgcagcctctgccctctgagttcaagtgattctcctgcctcagcctcctgagtagctgggattacaggtgtctgccaccgtgcccagacatgaaaaaactgcttcctaacatgttaagtccggatccgagggaacttcagaaatccattgaagttcaattgttaagaagttctgtttgtttggcaactgctttaaacccgatagaacaagatcagaagtggcagtctataactgaaaatgtggtaaagtacttgaagcaaacatcccgcatcgctattggacctctgagactttctactttaacagtttcacagtctttgccagttctaagtaccttgcagctgtattgctcatctgctttggagaacacagtttctaacagactttcaacagaggactgtcttattccactcttcagtgaagctttacgttcatgtaaacagcatgacgtgaggccatggatgcaggcattaaggtatactatgtaccagaatcagttgttggagaaaattaaagaacaaacagtcccaattagaagccatctcatggaattaggtctaacagcagcaaaatttgctagaaaacgagggaatgtgtcccttgcaacaagactgctggcacagtgcagtgaagttcagctgggaaagaccaccactgcacaggatttagtccaacattttaaaaaactatcaacccaaggtcaagtggatgaaaaatgggggcccgaacttgatattgaaaaaaccaaattgctttatacagcaggccagtcaacacatgcaatggaaatgttgagttcttgtgccatatctttctgcaagtctgtgaaagctgaatatgcagttgctaaatcaattctgacactggctaaatggatccaggcagaatggaaagagatttcaggacagctgaaacaggtttacagagctcagcaccaacagaacttcacaggtctttctactttgtctaaaaacatactcactctaatagaactgccatctgttaatacgatggaagaagagtatcctcggatcgagagtgaatctacagtgcatattggagttggagaacctgacttcattttgggacagttgtatcacctgtcttcagtacaggcacctgaagtagccaaatcttgggcagcgttggccagctgggcttataggtggggcagaaaggtggttgacaatgccagtcagggagaaggtgttcgtctgctgcctagagaaaaatctgaagttcagaatctacttccagacactataactgaggaagagaaagagagaatatatggtattcttggacaggctgtgtgtcggccggcggggattcaggatgaagatataacacttcagataactgagagtgaagacaacgaagaagatgacatggttgatgttatctggcgtcagttgatatcaagctgcccatggctttcagaacttgatgaaagtgcaactgaaggagttattaaagtgtggaggaaagttgtagatagaatattcagcctgtacaaactctcttgcagtgcatactttactttccttaaactcaacgctggtcaaattcctttagatgaggatgaccctaggctgcatttaagtcacagagtggaacagagcactgatgacatgattgtgatggccacattgcgcctgctgcggttgctcgtgaagcacgctggtgagcttcggcagtatctggagcacggcttggagacaacacccactgcaccatggagaggaattattccgcaacttttctcacgcttaaaccaccctgaagtgtatgtgcgccaaagtatttgtaaccttctctgccgtgtggctcaagattccccacatctcatattgtatcctgcaatagtgggtaccatatcgcttagtagtgaatcccaggcttcaggaaataaattttccactgcaattccaactttacttggcaatattcaaggagaagaattgctggtttctgaatgtgagggaggaagtcctcctgcatctcaggatagcaataaggatgaacctaaaagtggattaaatgaagaccaagccatgatgcaggattgttacagcaaaattgtagataagctgtcctctgcaaaccccaccatggtattacaggttcagatgctcgtggctgaactgcgcagggtcactgtgctctgggatgagctctggctgggagttttgctgcaacaacacatgtatgtcctgagacgaattcagcagcttgaagatgaggtgaagagagtccagaacaacaacaccttacgcaaagaagagaaaattgcaatcatgagggagaagcacacagctttgatgaagcccatcgtatttgctttggagcatgtgaggagtatcacagcggctcctgcagaaacacctcatgaaaaatggtttcaggataactatggtgatgccattgaaaatgccctagaaaaactgaagactccattgaaccctgcaaagcctgggagcagctggattccatttaaagagataatgctaantttgcaacagagagcacagaaacgtgcaagttacatcttgcgtcttgaagaaatcagtccatggttggctgccatgactaacactgaaattgctcttcctggggaagtctcagccagagacactgtcacaatccatagtgtgggcggaaccatcacaatcttaccgactaaaaccaagccaaagaaacttctctttcttggatcagatgggaagagctatccttatcttttcaaaggactggaggatttacatctggatgagagaataatgcagttcctatctattgtgaataccatgtttgctacaattaatcgccaagaaacaccccggttccatgctcgacactattctgtaacaccactaggaacaagatcaggactaatccagtgggtagatggagccacacccttatttggtctttacaaacgatggcaacaacgggaagctgccttacaagcacaaaaggcccaagattcctaccaaactcctcagaatcctggaattgtaccccgtcctagtgaactttattacagtaaaattggccctgctttgaaaacagttgggcttagcctggatgtgtcccgtcgggattggcctcttcatgtaatgaaggcagtattggaagagttaatggaggccacacccccgaatctccttgccaaagagctctggtcatcttgcacaacacctgatgaatggtggagagttacgcagtcttatgcaagatctactgcagtcatgtctatggttggatacataattggccttggagacagacatctggataatgttcttatagatatgacgactggagaagttgttcacatagattacaatgtttgctttgaaaaaggtaaaagccttagagttcctgagaaagtaccttttcgaatgacacaaaacattgaaacagcactgggtgtaactggagtagaaggtgtatttaggctttcatgtgagcaggttttacacattatgcggcgtggcagagagaccctgctgacgctgctggaggcctttgtgtacgaccctctggtggactggacagcaggaggcgaggctgggtttgctggtgctgtctatggtggaggtggccagcaggccgagagcaagcagagcaagagagagatggagcgagagatcacccgcagcctgttttcttctagagtagctgagattaaggtgaactggtttaagaatagagatgagatgctggttgtgcttcccaagttggacggtagcttagatgaatacctaagcttgcaagagcaactgacagatgtggaaaaactgcagggcaaactactggaggaaatagagtttctagaaggagctgaaggggtggatcatccttctcatactctgcaacacaggtattctgagcacacccaactacagactcagcaaagagctgttcaggaagcaatccaggtgaagctgaatgaatttgaacaatggataacacattatcaggctgcattcaataatttagaagcaacacagcttgcaagcttgcttcaagagataagcacacaaatggaccttggtcctccaagttacgtgccagcaacagcctttctgcagaatgctggtcaggcccacttgattagccagtgcgagcagctggagggggaggttggtgctctcctgcagcagaggcgctccgtgctccgtggctgtctggagcaactgcatcactatgcaaccgtggccctgcagtatccgaaggccatatttcagaaacatcgaattgaacagtggaagacctggatggaagagctcatctgtaacaccacagtagagcgttgtcaagagctctataggaaatatgaaatgcaatatgctccccagccacccccaacagtgtgtcagttcatcactgccactgaaatgaccctgcagcgatacgcagcagacatcaacagcagacttattagacaagtggaacgcttgaaacaggaagctgtcactgtgccagtttgtgaagatcagttgaaagaaattgaacgttgcattaaagttttccttcatgagaatggagaagaaggatctttgagtctagcaagtgttattatttctgccctttgtacccttacaaggcgtaacctgatgatggaaggtgcagcgtcaagtgctggagaacagctggttgatctgacttctcgggatggagcctggttcttggaggaactctgcagtatgagcggaaacgtcacctgcttggttcagttactgaagcagtgccacctggtgccacaggacttagatatcccgaaccccatggaagcgtctgagacagttcacttagccaatggagtgtatacctcacttcaggaattgaattcgaatttccggcaaatcatatttccagaagcacttcgatgtttaatgaaaggggaatacacgttagaaagtatgctgcatgaactggacggtcttattgagcagaccaccgatggcgttcccctgcagactctagtggaatctcttcaggcctacttaagaaacgcagctatgggactggaagaagaaacacatgctcattacatcgatgttgccagactactacatgctcagtacggtgaattaatccaaccgagaaatggttcagttgatgaaacacccaaaatgtcagctggccagatgcttttggtagcattcgatggcatgtttgctcaagttgaaactgctttcagcttattagttgaaaagttgaacaagatggaaattcccatagcttggcgaaagattgacatcataagggaagccaggagtactcaagttaatttttttgatgatgataatcaccggcaggtgctagaagagattttctttctaaaaagactacagactattaaggagttcttcaggctctgtggtaccttttctanaacattgtcaggatcaagttcacttgaagatcagaatactgtgaatgggcctgtacagattgtcaatgtgaaaaccctttttagaaactcttgtttcagtgaagaccaaatggccaaacctatcaaggcattcacagctgactttgtgaggcagctcttgatagggctacccaaccaagccctcggactcacactgtgcagttttatcagtgctctgggtgtagacatcattgctcaagtagaggcaaaggactttggtgccgaaagcaaagtttctgttgatgatctctgtaagaaagcggtggaacataacatccagatagggaagttctctcagctggttatgaacagggcaactgtgttagcaagttcttacgacactgcctggaagaagcatgacttggtgcgaaggctagaaaccagtatttcttcttgtaagacaagcctgcagcgggttcagctgcatattgccatgtttcagtggcaacatgaagatctacttatcaatagaccacaagccatgtcagtcacacctcccccacggtctgctatcctaaccagcatgaaaaagaagctgcataccctgagccagattgaaacttctattgcgacagttcaggagaagctagctgcacttgaatcaagtattgaacagcgactcaagtgggcaggtggtgccaaccctgcattggcccctgtactacaagattttgaagcaacgatagctgaaagaagaaatcttgtccttaaagagagccaaagagcaagtcaggtcacatttctctgcagcaatatcattcattttgaaagtttacgaacaagaactgcagaagccttaaacctggatgcggcgttatttgaactaatcaagcgatgtcagcagatgtgttcgtttgcatcacagtttaacagttcagtgtctgagttagagcttcgtttattacagagagtggacactggtcttgaacatcctattggcagctctgaatggcttttgtcagcacacaaacagttgacccaggatatgtctactcagagggcaattcagacagagaaagagcagcagatagaaacggtctgtgaaacaattcagaatctggttgataatataaagactgtgctcactggtcataaccgacagcttggagatgtcaaacatctcttgaaagctatggctaaggatgaagaagctgctctggcagatggtgaagatgttccctatgagaacagtgttaggcagtttttgggtgaatataaatcatggcaagacaacattcaaacagttctatttacattagtccaggctatgggtcaggttcgaagtcaagaacacgttgaaatgctccaggaaatcactcccaccttgaaagaactgaaaacacaaagtcagagtatctataataatttagtgagttttgcatcacccttagtcaccgatgcaacaaatgaatgttcgagtccaacgtcatctgctacttatcagccatccttcgctgcagcagtccggagtaacactggccagaagactcagcctgatgtcatgtcacagaatgctagaaagctgatccagaaaaatcttgctacatcagctgatactccaccaagcaccgttccaggaactggcaagagtgttgcttgtagtcctaaaaaggcagtcagagaccctaaaactgggaaagcggtgcaagagagaaactcctatgcagtgagtgtgtggaagagagtgaaagccaagttagagggccgagatgttgatccgaataggaggatgtcagttgctgaacaggttgactatgtcattaaggaagcaactaatctagataacttggctcagctgtatgaaggttggacagcctgggtgtgaatggcaagacagtagatgagtctggttaagcgaggtcagacatccaccagaatcaactcagcctcaggcatccaaagccacaccacagtcggtggtgatgcaactgggggcttactctgaggaaacctaggaaatctcggtgcactaggaagtgaatcccgcaggacagctgcactcagggatacgcccaacaccatggcctgcaaccccagggtcaagggtgaaggaaagcaagctcaccgcctgaacacggagattgtctttctgccacagaacagcagcagacgtgtcgggaggttagctgcggaaagaaatcgggatgccgcggagcacagagtgatttggaactccattccacctgaccctgtgtgtacaatccaggaaaaaaacaaaccccactcagaaacagagaaaactggggtcgcgaagaaatcacagccaaggaagatttgatgcattcagattctcgtgtaacacttgttgcttggcaacagtactggttgggttgaccagtaagtagaaaaaggctaaaggctatgcgatatgaatttcagaaatggactgaaaatggagagctatgtaacagatacactacagtagaagaacttacttctgaaatgaagggaaaaaaaccaccccatcgttccctactcctccccaccacttacccgttccccctttacctaatctagtagattagccatctttcaaattcacttttatttcagtccttatatttcatatacttccgtctcgatgctgttaacaacttctgataacatggaaaattcaaggattgtttaaaggtctgatgatcacacacaaaatgtaattccggttatttaagtcatttctgtgattctatcatgtacagtttccagaattgtcactgtgcattcaaaagtaatgaatctaacagacatttgatttaatgtacactcccttttgcttatagtgtgcattttttttggaggtcattcaaattttccctcttctgtgatagctgtagtttctttcatagaaagtagctaatccagtgtaatcttttacctttttaaaaaccaagatagagtatctattagagttttacattgttgatgatagattaacaataaagtgatgttctggtggaggtagactgaaatttttttaattcatgtttttcatttgatacttttaatttacacttagtaaattaaaagttgtttaatttacttggcattttaggacatgtacatgaaacagtgaaaatgagatccaccaacatcttttattaagttcagttattagtctgtgaagtgctttactttttgcacaattttaatagcttgctattcagtaatacattatagtgaattcatgatcaaggtttccttaaatttagcattgcatttcagtactgactgtgtaagctaaattgctgatccaaaataaaaacccagactagaatagggttcttaaaatcaagtatcaatacaaaatagaacacaattaaaatcttaattgttggctgggcacagtggctcacgcctgtaatcccagcactttgggaggccgaggcgggcggatcatgaggttaggagagcgagaccatcctggctaacacggtgaaaccccgtctttactaaaaatacaaaaaaaattagccgggcgtggtggcgggcgcctgtagtcccagctactcgggaggctgaggcaggagaatggcgtgaacccaggaggcggagcttgcagtgagccgagattgtgccactgcactccagcctgggcaacagagctagactctgtgtcaaaaataaatgactagataaaaaaaaaaattgtttgagtacattttccctgcattttagagattaggacagtggtcactttctagttgccgtcttcacagacaaacttgaaaggtattaaggaaaaaattccacatagctctgggcctttttggtattctgattgccacgttaatctgtaatcgttaagtacccatgaaagaatgtgtttcagtatcagtgctttttgggtactttaacaagtattgtaggcacggtggatttttttgaaatacccatgtgtccaatagcaagttaaggaacctagcgcatcaaatttggttttcttcattcatttggaaccttattttcgcaaaaaacctagctggaataataatgccatattgtattttgcacactgctttattttctagaggctctgggagcaaattacattcatcacattacctctgctctctcaagattaaagtctttcagcaacattctttattgtcatcataaggaaaaacttttatcgcaatgatagtcagttcacattagtttagcactatagatagtattcagaaattgctttctctttggtaaagaagataaataggtgaattttattgcctgttttttcaggcttcagaggtacctggcaccttactcaagcaaaaacaaaaaacagctttacttcaaaagcatgtgcctctggtaaattatccatcacttttgttttaaagtggtccctccaagaataatgtggcatacacagtgggntttggttgtaacggcagatgtaatagatgacttcaaaagcctgctccttactgcactctggacgaggccctggtctgtatagtttggcttcctctgttaagtcattctacaaggtgacttgccatttgaactttcgtaagagacctcagcagttagactgagaaaagttagagtgctgtagttatgaagtcatacatttttgataaaatacctgtggaaaaccagggatcctctcctgtttctctctcttgcctccccctt

SEQ ID NO: 419957 - DNA, 373 bp, Homo sapiens
ctgccccctccatgttctgtttacatgtaaattgagccaccaactctttctctgtagcagtccggagtaacactggccagaagactcagcctgatgtcatgtcacagaatgctagaaagctgatccagaaaaatcttgctacatcagctgatactccaccaagcaccgttccaggaactggcaagagtgttgcttgtagtcctaaaaaggcagtcagagaccctaaaactgggaaagctgaaacaaacatctgatccggacatttggcatgattctgtttgtatcaaacgatgaaaaatcggccgggcgcggtggctactgcactacagcctgggcaacagagccaggctgtgtctcaagaaaaaaagaaaaa

SEQ ID NO: 419958 - DNA, 367 bp, Homo sapiens
ttatgtccatgtgccttcatgcccaagaagctacattttgataaagtaaaacattcagtcttaaaacacctgatttctgttcgcagtttagagtgcagatagctgcctctcacagacactcatggagtgtcccccttcaggaagggatgaaagccctcgatatgaattcatgtcgagccccttcatgcctggcataaatatagtttttaatgttgaattcattcatatgtaggtatgcttcctgtatttatttctaaagtagtttctctttccttgatgccttattgatgtgataaacagcttggggaataaatctgtctttattttggaaatggtttttagaagcctagttttggccttaattact

SEQ ID NO: 419959 - DNA, 3801 bp, Homo sapiens
  misc_feature (3540)..(3540): n is a, c, g, or t
atgaatgaaatgttgtctcttccctccagtgttgtacatagtctagtaagtaagaaaactaagcctccagaaaaggctattacttcatcattacaaacagtaaataatttaattttagaatttacttttactttgaatttttatttgatggtggaaacaaagttcctataaaaatggagttgaactaagcagtttaaacacactcatatttgaaacatttgttacttaatcactaggtgactgtcttgagagtaattactgatactaaaactatttttcttaatcattaatttatcaattctaggatgaagaagctgctctggcagatggtgaagatgttccctatgagaacagtgttaggcagtttttgggtgaatataaatcatggcaagacaacattcaaacagttctatttacattagtccaggctatgggtcaggttcgaagtcaagaacacgttgaaatgctccaggaaatcactcccaccttgaaagaactgaaaacacaaagtcagagtatctataataatttagtgagttttgcatcacccttagtcaccgatgcaacaaatgaatgttcgagtccaacgtcatctgctacttatcagccatccttcgctgcagcagtccggagtaacactggccagaagactcagcctgatgtcatgtcacagaatgctagaaagctgatccagaaaaatcttgctacatcagctgatactccaccaagcaccgttccaggaactggcaagagtgttgcttgtagtcctaaaaaggcagtcagagaccctaaaactgggaaagcggtgcaagagagaaactcctatgcagtgagtgtgtggaagagagtgaaagccaagttagagggccgagatgttgatccgaataggaggatgtcagttgctgaacaggttgactatgtcattaaggaagcaactaatctagataacttggctcagctgtatgaaggttggacagcctgggtgtgaatggcaagacagtagatgagtctggttaagcgaggtcagacatccaccagaatcaactcagcctcaggcatccaaagccacaccacagtcggtggtgatgcaactgggggcttactctgaggaaacctaggaaatctcggtgcactaggaagtgaatcccgcaggacagctgcactcagggatacgcccaacaccatggcctgcaaccccagggtcaagggtgaaggaaagcaagctcaccgcctgaacacggagattgtctttctgccacagaacagcagcagacgtgtcgggaggttagctgcggaaagaaatcgggatgccgcggagcacagagtgatttggaactccattccacctgaccctgtgtgtacaatccaggaaaaaaacaaaccccactcagaaacagagaaaactggggtcgcgaagaaatcacagccaaggaagatttgatgcattcagattctcgtgtaacacttgttgcttggcaacagtactggttgggttgaccagtaagtagaaaaaggctaaaggctatgcgatatgaatttcagaaatggactgaaaatggagagctatgtaacagatacactacagtagaagaacttacttctgaaatgaagggaaaaaaaccaccccatcgttccctactcctccccaccacttacccgttccccctttacctaatctagtagattagccatctttcaaattcacttttatttcagtccttatatttcatatacttccgtctcgatgctgttaacaacttctgataacatggaaaattcaaggattgtttaaaggtctgatgatcacacacaaaatgtaattccggttatttaagtcatttctgtgattctatcatgtacagtttccagaattgtcactgtgcattcaaaagtaatgaatctaacagacatttgatttaatgtacactcccttttgcttatagtgtgcattttttttggaggtcattcaaattttccctcttctgtgatagctgtagtttctttcatagaaagtagctaatccagtgtaatcttttacctttttaaaaaccaagatagagtatctattagagttttacattgttgatgatagattaacaataaagtgatgttctggtggaggtagactgaaatttttttaattcatgtttttcatttgatacttttaatttacacttagtaaattaaaagttgtttaatttacttggcattttaggacatgtacatgaaacagtgaaaatgagatccaccaacatcttttattaagttcagttattagtctgtgaagtgctttactttttgcacaattttaatagcttgctattcagtaatacattatagtgaattcatgatcaaggtttccttaaatttagcattgcatttcagtactgactgtgtaagctaaattgctgatccaaaataaaaacccagactagaatagggttcttaaaatcaagtatcaatacaaaatagaacacaattaaaatcttaattgttggctgggcacagtggctcacgcctgtaatcccagcactttgggaggccgaggcgggcggatcatgaggttaggagagcgagaccatcctggctaacacggtgaaaccccgtctttactaaaaatacaaaaaaaattagccgggcgtggtggcgggcgcctgtagtcccagctactcgggaggctgaggcaggagaatggcgtgaacccaggaggcggagcttgcagtgagccgagattgtgccactgcactccagcctgggcaacagagctagactctgtgtcaaaaataaatgactagataaaaaaaaaaattgtttgagtacattttccctgcattttagagattaggacagtggtcactttctagttgccgtcttcacagacaaacttgaaaggtattaaggaaaaaattccacatagctctgggcctttttggtattctgattgccacgttaatctgtaatcgttaagtacccatgaaagaatgtgtttcagtatcagtgctttttgggtactttaacaagtattgtaggcacggtggatttttttgaaatacccatgtgtccaatagcaagttaaggaacctagcgcatcaaatttggttttcttcattcatttggaaccttattttcgcaaaaaacctagctggaataataatgccatattgtattttgcacactgctttattttctagaggctctgggagcaaattacattcatcacattacctctgctctctcaagattaaagtctttcagcaacattctttattgtcatcataaggaaaaacttttatcgcaatgatagtcagttcacattagtttagcactatagatagtattcagaaattgctttctctttggtaaagaagataaataggtgaattttattgcctgttttttcaggcttcagaggtacctggcaccttactcaagcaaaaacaaaaaacagctttacttcaaaagcatgtgcctctggtaaattatccatcacttttgttttaaagtggtccctccaagaataatgtggcatacacagtgggntttggttgtaacggcagatgtaatagatgacttcaaaagcctgctccttactgcactctggacgaggccctggtctgtatagtttggcttcctctgttaagtcattctacaaggtgacttgccatttgaactttcgtaagagacctcagcagttagactgagaaaagttagagtgctgtagttatgaagtcatacatttttgataaaatacctgtggaaaaccagggatcctctcctgtttctctctcttgcctccccctt

SEQ ID NO: 419960 - DNA, 7235 bp, Homo sapiens
  misc_feature (1)..(1): n is a, c, g, or t
  misc_feature (3)..(5): n is a, c, g, or t
  misc_feature (7)..(7): n is a, c, g, or t
  misc_feature (9)..(9): n is a, c, g, or t
  misc_feature (46)..(46): n is a, c, g, or t
  misc_feature (2574)..(2574): n is a, c, g, or t
  misc_feature (5466)..(5466): n is a, c, g, or t
  misc_feature (7157)..(7157): n is a, c, g, or t
ngnnnananagagtttcactctgttgcccaggctggagtgcagtgncgcaatctcggctcactgcagcctctgccctctgagttcaagtgattctcctgcctcagcctcctgagtagctgggattacaggtgtctgccaccgtgcccagacatgaaaaaactgcttcctaacatgttaagtccggatccgagggaacttcagaaatccattgaagttcaattgttaagaagttctgtttgtttggcaactgctttaaacccgatagaacaagatcagaagtggcagtctataactgaaaatgtggtaaagtacttgaagcaaacatcccgcatcgctattggacctctgagactttctactttaacagtttcacagtctttgccagttctaagtaccttgcagctgtattgctcatctgctttggagaacacagtttctaacagactttcaacagaggactgtcttattccactcttcagtgaagctttacgttcatgtaaacagcatgacgtgaggccatggatgcaggcattaaggtatactatgtaccagaatcagttgttggagaaaattaaagaacaaacagtcccaattagaagccatctcatggaattaggtctaacagcagcaaaatttgctagaaaacgagggaatgtgtcccttgcaacaagactgctggcacagtgcagtgaagttcagctgggaaagaccaccactgcacaggatttagtccaacattttaaaaaactatcaacccaaggtcaagtggatgaaaaatgggggcccgaacttgatattgaaaaaaccaaattgctttatacagcaggccagtcaacacatgcaatggaaatgttgagttcttgtgccatatctttctgcaagtctgtgaaagctgaatatgcagttgctaaatcaattctgacactggctaaatggatccaggcagaatggaaagagatttcaggacagctgaaacaggtttacagagctcagcaccaacagaacttcacaggtctttctactttgtctaaaaacatactcactctaatagaactgccatctgttaatacgatggaagaagagtatcctcggatcgagagtgaatctacagtgcatattggagttggagaacctgacttcattttgggacagttgtatcacctgtcttcagtacaggcacctgaagtagccaaatcttgggcagcgttggccagctgggcttataggtggggcagaaaggtggttgacaatgccagtcagggagaaggtgttcgtctgctgcctagagaaaaatctgaagttcagaatctacttccagacactataactgaggaagagaaagagagaatatatggtattcttggacaggctgtgtgtcggccggcggggattcaggatgaagatataacacttcagataactgagagtgaagacaacgaagaagatgacatggttgatgttatctggcgtcagttgatatcaagctgcccatggctttcagaacttgatgaaagtgcaactgaaggagttattaaagtgtggaggaaagttgtagatagaatattcagcctgtacaaactctcttgcagtgcatactttactttccttaaactcaacgctggtcaaattcctttagatgaggatgaccctaggctgcatttaagtcacagagtggaacagagcactgatgacatgattgtgatggccacattgcgcctgctgcggttgctcgtgaagcacgctggtgagcttcggcagtatctggagcacggcttggagacaacacccactgcaccatggagaggaattattccgcaacttttctcacgcttaaaccaccctgaagtgtatgtgcgccaaagtatttgtaaccttctctgccgtgtggctcaagattccccacatctcatattgtatcctgcaatagtgggtaccatatcgcttagtagtgaatcccaggcttcaggaaataaattttccactgcaattccaactttacttggcaatattcaaggagaagaattgctggtttctgaatgtgagggaggaagtcctcctgcatctcaggatagcaataaggatgaacctaaaagtggattaaatgaagaccaagccatgatgcaggattgttacagcaaaattgtagataagctgtcctctgcaaaccccaccatggtattacaggttcagatgctcgtggctgaactgcgcagggtcactgtgctctgggatgagctctggctgggagttttgctgcaacaacacatgtatgtcctgagacgaattcagcagcttgaagatgaggtgaagagagtccagaacaacaacaccttacgcaaagaagagaaaattgcaatcatgagggagaagcacacagctttgatgaagcccatcgtatttgctttggagcatgtgaggagtatcacagcggctcctgcagaaacacctcatgaaaaatggtttcaggataactatggtgatgccattgaaaatgccctagaaaaactgaagactccattgaaccctgcaaagcctgggagcagctggattccatttaaagagataatgctaantttgcaacagagagcacagaaacgtgcaagttacatcttgcgtcttgaagaaatcagtccatggttggctgccatgactaacactgaaattgctcttcctggggaagtctcagccagagacactgtcacaatccatagtgtgggcggaaccatcacaatcttaccgactaaaaccaagccaaagaaacttctctttcttggatcagatgggaagagctatccttatcttttcaaaggactggaggatttacatctggatgagagaataatgcagttcctatctattgtgaataccatgtttgctacaattaatcgccaagaaacaccccggttccatgctcgacactattctgtaacaccactaggaacaagatcaggactaatccagtgggtagatggagccacacccttatttggtctttacaaacgatggcaacaacgggaagctgccttacaagcacaaaaggcccaagattcctaccaaactcctcagaatcctggaattgtaccccgtcctagtgaactttattacagtaaaattggccctgctttgaaaacagttgggcttagcctggatgtgtcccgtcgggattggcctcttcatgtaatgaaggcagtattggaagagttaatggaggccacacccccgaatctccttgccaaagagctctggtcatcttgcacaacacctgatgaatggtggagagttacgcagtcttatgcaagatctactgcagtcatgtctatggttggatacataattggccttggagacagacatctggataatgttcttatagatatgacgactggagaagttgttcacatagattacaatgtttgctttgaaaaaggtaaaagccttagagttcctgagaaagtaccttttcgaatgacacaaaacattgaaacagcactgggtgtaactggagtagaaggtgtatttaggctttcatgtgagcaggttttacacattatgcggcgtggcagagagaccctgctgacgctgctggaggcctttgtgtacgaccctctggtggactggacagcaggaggcgaggctgggtttgctggtgctgtctatggtggaggtggccagcaggccgagagcaagcagagcaagagagagatggagcgagagatcacccgcagcctgttttcttctagagtagctgagattaaggtgaactggtttaagaatagagatgagatgctggttgtgcttcccaagttggacggtagcttagatgaatacctaagcttgcaagagcaactgacagatgtggaaaaactgcagggcaaactactggaggaaatagagtttctagaaggagctgaaggggtggatcatccttctcatactctgcaacacaggtattctgagcacacccaactacagactcagcaaagagctgttcaggaagcaatccaggtgaagctgaatgaatttgaacaatggataacacattatcaggctgcattcaataatttagaagcaacacagcttgcaagcttgcttcaagagataagcacacaaatggaccttggtcctccaagttacgtgccagcaacagcctttctgcagaatgctggtcaggcccacttgattagccagtgcgagcagctggagggggaggttggtgctctcctgcagcagaggcgctccgtgctccgtggctgtctggagcaactgcatcactatgcaaccgtggccctgcagtatccgaaggccatatttcagaaacatcgaattgaacagtggaagacctggatggaagagctcatctgtaacaccacagtagagcgttgtcaagagctctataggaaatatgaaatgcaatatgctccccagccacccccaacagtgtgtcagttcatcactgccactgaaatgaccctgcagcgatacgcagcagacatcaacagcagacttattagacaagtggaacgcttgaaacaggaagctgtcactgtgccagtttgtgaagatcagttgaaagaaattgaacgttgcattaaagttttccttcatgagaatggagaagaaggatctttgagtctagcaagtgttattatttctgccctttgtacccttacaaggcgtaacctgatgatggaaggtgcagcgtcaagtgctggagaacagctggttgatctgacttctcgggatggagcctggttcttggaggaactctgcagtatgagcggaaacgtcacctgcttggttcagttactgaagcagtgccacctggtgccacaggacttagatatcccgaaccccatggaagcgtctgagacagttcacttagccaatggagtgtatacctcacttcaggaattgaattcgaatttccggcaaatcatatttccagaagcacttcgatgtttaatgaaaggggaatacacgttagaaagtatgctgcatgaactggacggtcttattgagcagaccaccgatggcgttcccctgcagactctagtggaatctcttcaggcctacttaagaaacgcagctatgggactggaagaagaaacacatgctcattacatcgatgttgccagactactacatgctcagtacggtgaattaatccaaccgagaaatggttcagttgatgaaacacccaaaatgtcagctggccagatgcttttggtagcattcgatggcatgtttgctcaagttgaaactgctttcagcttattagttgaaaagttgaacaagatggaaattcccatagcttggcgaaagattgacatcataagggaagccaggagtactcaagttaatttttttgatgatgataatcaccggcaggtgctagaagagattttctttctaaaaagactacagactattaaggagttcttcaggctctgtggtaccttttctanaacattgtcaggatcaagttcacttgaagatcagaatactgtgaatgggcctgtacagattgtcaatgtgaaaaccctttttagaaactcttgtttcagtgaagaccaaatggccaaacctatcaaggcattcacagctgactttgtgaggcagctcttgatagggctacccaaccaagccctcggactcacactgtgcagttttatcagtgctctgggtgtagacatcattgctcaagtagaggcaaaggactttggtgccgaaagcaaagtttctgttgatgatctctgtaagaaagcggtggaacataacatccagatagggaagttctctcagctggttatgaacagggcaactgtgttagcaagttcttacgacactgcctggaagaagcatgacttggtgcgaaggctagaaaccagtatttcttcttgtaagacaagcctgcagcgggttcagctgcatattgccatgtttcagtggcaacatgaagatctacttatcaatagaccacaagccatgtcagtcacacctcccccacggtctgctatcctaaccagcatgaaaaagaagctgcataccctgagccagattgaaacttctattgcgacagttcaggagaagctagctgcacttgaatcaagtattgaacagcgactcaagtgggcaggtggtgccaaccctgcattggcccctgtactacaagattttgaagcaacgatagctgaaagaagaaatcttgtccttaaagagagccaaagagcaagtcaggtcacatttctctgcagcaatatcattcattttgaaagtttacgaacaagaactgcagaagccttaaacctggatgcggcgttatttgaactaatcaagcgatgtcagcagatgtgttcgtttgcatcacagtttaacagttcagtgtctgagttagagcttcgtttattacagagagtggacactggtcttgaacatcctattggcagctctgaatggcttttgtcagcacacaaacagttgacccaggatatgtctactcagagggcaattcagacagagaaagagcagcagatagaaacggtctgtgaaacaattcagaatctggttgataatataaagactgtgctcactggtcataaccgacagcttggagatgtcaaacatctcttgaaagctatggctaaggatgaagaagctgctctggcagatggtgaagatgttccctatgagaacagtgttaggcagtttttgggtgaatataaatcatggcaagacaacattcaaacagttctatttacattagtccaggctatgggtcaggttcgaagtcaagaacacgttgaaatgctccaggaaatcactcccaccttgaaagaactgaaaacacaaagtcagagtatctataataatttagtgagttttgcatcacccttagtcaccgatgcaacaaatgaatgttcgagtccaacgtcatctgctacttatcagccatccttcgctgcagcagtccggagtaacactggccagaagactcagcctgatgtcatgtcacagaatgctagaaagctgatccagaaaaatcttgctacatcagctgatactccaccaagcaccgttccaggaactggcaagagtgttgcttgtagtcctaaaaaggcagtcagagaccctaaaactgggaaagccgtgaacgaangaaactcctattccgggagttggtggatagtttacagggttgcttatcactaatagaagaactaattatatacttgga

SEQ ID NO: 419961 - DNA, 7404 bp, Homo sapiens
  misc_feature (1)..(1): n is a, c, g, or t
  misc_feature (3)..(5): n is a, c, g, or t
  misc_feature (7)..(7): n is a, c, g, or t
  misc_feature (9)..(9): n is a, c, g, or t
  misc_feature (46)..(46): n is a, c, g, or t
  misc_feature (2574)..(2574): n is a, c, g, or t
  misc_feature (5466)..(5466): n is a, c, g, or t
ngnnnananagagtttcactctgttgcccaggctggagtgcagtgncgcaatctcggctcactgcagcctctgccctctgagttcaagtgattctcctgcctcagcctcctgagtagctgggattacaggtgtctgccaccgtgcccagacatgaaaaaactgcttcctaacatgttaagtccggatccgagggaacttcagaaatccattgaagttcaattgttaagaagttctgtttgtttggcaactgctttaaacccgatagaacaagatcagaagtggcagtctataactgaaaatgtggtaaagtacttgaagcaaacatcccgcatcgctattggacctctgagactttctactttaacagtttcacagtctttgccagttctaagtaccttgcagctgtattgctcatctgctttggagaacacagtttctaacagactttcaacagaggactgtcttattccactcttcagtgaagctttacgttcatgtaaacagcatgacgtgaggccatggatgcaggcattaaggtatactatgtaccagaatcagttgttggagaaaattaaagaacaaacagtcccaattagaagccatctcatggaattaggtctaacagcagcaaaatttgctagaaaacgagggaatgtgtcccttgcaacaagactgctggcacagtgcagtgaagttcagctgggaaagaccaccactgcacaggatttagtccaacattttaaaaaactatcaacccaaggtcaagtggatgaaaaatgggggcccgaacttgatattgaaaaaaccaaattgctttatacagcaggccagtcaacacatgcaatggaaatgttgagttcttgtgccatatctttctgcaagtctgtgaaagctgaatatgcagttgctaaatcaattctgacactggctaaatggatccaggcagaatggaaagagatttcaggacagctgaaacaggtttacagagctcagcaccaacagaacttcacaggtctttctactttgtctaaaaacatactcactctaatagaactgccatctgttaatacgatggaagaagagtatcctcggatcgagagtgaatctacagtgcatattggagttggagaacctgacttcattttgggacagttgtatcacctgtcttcagtacaggcacctgaagtagccaaatcttgggcagcgttggccagctgggcttataggtggggcagaaaggtggttgacaatgccagtcagggagaaggtgttcgtctgctgcctagagaaaaatctgaagttcagaatctacttccagacactataactgaggaagagaaagagagaatatatggtattcttggacaggctgtgtgtcggccggcggggattcaggatgaagatataacacttcagataactgagagtgaagacaacgaagaagatgacatggttgatgttatctggcgtcagttgatatcaagctgcccatggctttcagaacttgatgaaagtgcaactgaaggagttattaaagtgtggaggaaagttgtagatagaatattcagcctgtacaaactctcttgcagtgcatactttactttccttaaactcaacgctggtcaaattcctttagatgaggatgaccctaggctgcatttaagtcacagagtggaacagagcactgatgacatgattgtgatggccacattgcgcctgctgcggttgctcgtgaagcacgctggtgagcttcggcagtatctggagcacggcttggagacaacacccactgcaccatggagaggaattattccgcaacttttctcacgcttaaaccaccctgaagtgtatgtgcgccaaagtatttgtaaccttctctgccgtgtggctcaagattccccacatctcatattgtatcctgcaatagtgggtaccatatcgcttagtagtgaatcccaggcttcaggaaataaattttccactgcaattccaactttacttggcaatattcaaggagaagaattgctggtttctgaatgtgagggaggaagtcctcctgcatctcaggatagcaataaggatgaacctaaaagtggattaaatgaagaccaagccatgatgcaggattgttacagcaaaattgtagataagctgtcctctgcaaaccccaccatggtattacaggttcagatgctcgtggctgaactgcgcagggtcactgtgctctgggatgagctctggctgggagttttgctgcaacaacacatgtatgtcctgagacgaattcagcagcttgaagatgaggtgaagagagtccagaacaacaacaccttacgcaaagaagagaaaattgcaatcatgagggagaagcacacagctttgatgaagcccatcgtatttgctttggagcatgtgaggagtatcacagcggctcctgcagaaacacctcatgaaaaatggtttcaggataactatggtgatgccattgaaaatgccctagaaaaactgaagactccattgaaccctgcaaagcctgggagcagctggattccatttaaagagataatgctaantttgcaacagagagcacagaaacgtgcaagttacatcttgcgtcttgaagaaatcagtccatggttggctgccatgactaacactgaaattgctcttcctggggaagtctcagccagagacactgtcacaatccatagtgtgggcggaaccatcacaatcttaccgactaaaaccaagccaaagaaacttctctttcttggatcagatgggaagagctatccttatcttttcaaaggactggaggatttacatctggatgagagaataatgcagttcctatctattgtgaataccatgtttgctacaattaatcgccaagaaacaccccggttccatgctcgacactattctgtaacaccactaggaacaagatcaggactaatccagtgggtagatggagccacacccttatttggtctttacaaacgatggcaacaacgggaagctgccttacaagcacaaaaggcccaagattcctaccaaactcctcagaatcctggaattgtaccccgtcctagtgaactttattacagtaaaattggccctgctttgaaaacagttgggcttagcctggatgtgtcccgtcgggattggcctcttcatgtaatgaaggcagtattggaagagttaatggaggccacacccccgaatctccttgccaaagagctctggtcatcttgcacaacacctgatgaatggtggagagttacgcagtcttatgcaagatctactgcagtcatgtctatggttggatacataattggccttggagacagacatctggataatgttcttatagatatgacgactggagaagttgttcacatagattacaatgtttgctttgaaaaaggtaaaagccttagagttcctgagaaagtaccttttcgaatgacacaaaacattgaaacagcactgggtgtaactggagtagaaggtgtatttaggctttcatgtgagcaggttttacacattatgcggcgtggcagagagaccctgctgacgctgctggaggcctttgtgtacgaccctctggtggactggacagcaggaggcgaggctgggtttgctggtgctgtctatggtggaggtggccagcaggccgagagcaagcagagcaagagagagatggagcgagagatcacccgcagcctgttttcttctagagtagctgagattaaggtgaactggtttaagaatagagatgagatgctggttgtgcttcccaagttggacggtagcttagatgaatacctaagcttgcaagagcaactgacagatgtggaaaaactgcagggcaaactactggaggaaatagagtttctagaaggagctgaaggggtggatcatccttctcatactctgcaacacaggtattctgagcacacccaactacagactcagcaaagagctgttcaggaagcaatccaggtgaagctgaatgaatttgaacaatggataacacattatcaggctgcattcaataatttagaagcaacacagcttgcaagcttgcttcaagagataagcacacaaatggaccttggtcctccaagttacgtgccagcaacagcctttctgcagaatgctggtcaggcccacttgattagccagtgcgagcagctggagggggaggttggtgctctcctgcagcagaggcgctccgtgctccgtggctgtctggagcaactgcatcactatgcaaccgtggccctgcagtatccgaaggccatatttcagaaacatcgaattgaacagtggaagacctggatggaagagctcatctgtaacaccacagtagagcgttgtcaagagctctataggaaatatgaaatgcaatatgctccccagccacccccaacagtgtgtcagttcatcactgccactgaaatgaccctgcagcgatacgcagcagacatcaacagcagacttattagacaagtggaacgcttgaaacaggaagctgtcactgtgccagtttgtgaagatcagttgaaagaaattgaacgttgcattaaagttttccttcatgagaatggagaagaaggatctttgagtctagcaagtgttattatttctgccctttgtacccttacaaggcgtaacctgatgatggaaggtgcagcgtcaagtgctggagaacagctggttgatctgacttctcgggatggagcctggttcttggaggaactctgcagtatgagcggaaacgtcacctgcttggttcagttactgaagcagtgccacctggtgccacaggacttagatatcccgaaccccatggaagcgtctgagacagttcacttagccaatggagtgtatacctcacttcaggaattgaattcgaatttccggcaaatcatatttccagaagcacttcgatgtttaatgaaaggggaatacacgttagaaagtatgctgcatgaactggacggtcttattgagcagaccaccgatggcgttcccctgcagactctagtggaatctcttcaggcctacttaagaaacgcagctatgggactggaagaagaaacacatgctcattacatcgatgttgccagactactacatgctcagtacggtgaattaatccaaccgagaaatggttcagttgatgaaacacccaaaatgtcagctggccagatgcttttggtagcattcgatggcatgtttgctcaagttgaaactgctttcagcttattagttgaaaagttgaacaagatggaaattcccatagcttggcgaaagattgacatcataagggaagccaggagtactcaagttaatttttttgatgatgataatcaccggcaggtgctagaagagattttctttctaaaaagactacagactattaaggagttcttcaggctctgtggtaccttttctanaacattgtcaggatcaagttcacttgaagatcagaatactgtgaatgggcctgtacagattgtcaatgtgaaaaccctttttagaaactcttgtttcagtgaagaccaaatggccaaacctatcaaggcattcacagctgactttgtgaggcagctcttgatagggctacccaaccaagccctcggactcacactgtgcagttttatcagtgctctgggtgtagacatcattgctcaagtagaggcaaaggactttggtgccgaaagcaaagtttctgttgatgatctctgtaagaaagcggtggaacataacatccagatagggaagttctctcagctggttatgaacagggcaactgtgttagcaagttcttacgacactgcctggaagaagcatgacttggtgcgaaggctagaaaccagtatttcttcttgtaagacaagcctgcagcgggttcagctgcatattgccatgtttcagtggcaacatgaagatctacttatcaatagaccacaagccatgtcagtcacacctcccccacggtctgctatcctaaccagcatgaaaaagaagctgcataccctgagccagattgaaacttctattgcgacagttcaggagaagctagctgcacttgaatcaagtattgaacagcgactcaagtgggcaggtggtgccaaccctgcattggcccctgtactacaagattttgaagcaacgatagctgaaagaagaaatcttgtccttaaagagagccaaagagcaagtcaggtcacatttctctgcagcaatatcattcattttgaaagtttacgaacaagaactgcagaagccttaaacctggatgcggcgttatttgaactaatcaagcgatgtcagcagatgtgttcgtttgcatcacagtttaacagttcagtgtctgagttagagcttcgtttattacagagagtggacactggtcttgaacatcctattggcagctctgaatggcttttgtcagcacacaaacagttgacccaggatatgtctactcagagggcaattcagacagagaaagagcagcagatagaaacggtctgtgaaacaattcagaatctggttgataatataaagactgtgctcactggtcataaccgacagcttggagatgtcaaacatctcttgaaagctatggctaaggatgaagaagctgctctggcagatggtgaagatgttccctatgagaacagtgttaggcagtttttgggtgaatataaatcatggcaagacaacattcaaacagttctatttacattagtccaggctatgggtcaggttcgaagtcaagaacacgttgaaatgctccaggaaatcactcccaccttgaaagaactgaaaacacaaagtcagaggtaagaatgccttctggtcagaatttataaaacataagtacaaaactactggtataagaagtttatctcttgatttaatttttcagttttgttcatatttttataagtagtatcaggtaaaacatttcgtaaataagccattttattttgtatttcagtatctataataatttagtgagttttgcatcacccttagtcaccgatgcaacaaatgaatgttcgagtccaacgtcatctgctacttatcagccatccttcgctgcaggtaggagaagagtcctgagtcttgatctgttgttaatgttacacatagatgctaagatgtttaattatacataactgtctaatattaaacacttaaggcctgtcattctataatcttaaactgaacagattttagcttatccttaaaaatactcgtaagccaggcacgatggctcacacctgtaatctcagctacttgaaggccaaggtgggaggattgtctaaggccaggagttcaagaccctgtctctttaaaaataaataaataaacagctattaaaa

SEQ ID NO: 419962 - DNA, 2946 bp, Homo sapiens
  misc_feature (51)..(51): n is a, c, g, or t
  misc_feature (2685)..(2685): n is a, c, g, or t
gttttggaaccttaaagcctgcattgacttctcttaatttacccaccggcnacaggttgactatgtcattaaggaagcaactaatctagataacttggctcagctgtatgaaggttggacagcctgggtgtgaatggcaagacagtagatgagtctggttaagcgaggtcagacatccaccagaatcaactcagcctcaggcatccaaagccacaccacagtcggtggtgatgcaactgggggcttactctgaggaaacctaggaaatctcggtgcactaggaagtgaatcccgcaggacagctgcactcagggatacgcccaacaccatggcctgcaaccccagggtcaagggtgaaggaaagcaagctcaccgcctgaacacggagattgtctttctgccacagaacagcagcagacgtgtcgggaggttagctgcggaaagaaatcgggatgccgcggagcacagagtgatttggaactccattccacctgaccctgtgtgtacaatccaggaaaaaaacaaaccccactcagaaacagagaaaactggggtcgcgaagaaatcacagccaaggaagatttgatgcattcagattctcgtgtaacacttgttgcttggcaacagtactggttgggttgaccagtaagtagaaaaaggctaaaggctatgcgatatgaatttcagaaatggactgaaaatggagagctatgtaacagatacactacagtagaagaacttacttctgaaatgaagggaaaaaaaccaccccatcgttccctactcctccccaccacttacccgttccccctttacctaatctagtagattagccatctttcaaattcacttttatttcagtccttatatttcatatacttccgtctcgatgctgttaacaacttctgataacatggaaaattcaaggattgtttaaaggtctgatgatcacacacaaaatgtaattccggttatttaagtcatttctgtgattctatcatgtacagtttccagaattgtcactgtgcattcaaaagtaatgaatctaacagacatttgatttaatgtacactcccttttgcttatagtgtgcattttttttggaggtcattcaaattttccctcttctgtgatagctgtagtttctttcatagaaagtagctaatccagtgtaatcttttacctttttaaaaaccaagatagagtatctattagagttttacattgttgatgatagattaacaataaagtgatgttctggtggaggtagactgaaatttttttaattcatgtttttcatttgatacttttaatttacacttagtaaattaaaagttgtttaatttacttggcattttaggacatgtacatgaaacagtgaaaatgagatccaccaacatcttttattaagttcagttattagtctgtgaagtgctttactttttgcacaattttaatagcttgctattcagtaatacattatagtgaattcatgatcaaggtttccttaaatttagcattgcatttcagtactgactgtgtaagctaaattgctgatccaaaataaaaacccagactagaatagggttcttaaaatcaagtatcaatacaaaatagaacacaattaaaatcttaattgttggctgggcacagtggctcacgcctgtaatcccagcactttgggaggccgaggcgggcggatcatgaggttaggagagcgagaccatcctggctaacacggtgaaaccccgtctttactaaaaatacaaaaaaaattagccgggcgtggtggcgggcgcctgtagtcccagctactcgggaggctgaggcaggagaatggcgtgaacccaggaggcggagcttgcagtgagccgagattgtgccactgcactccagcctgggcaacagagctagactctgtgtcaaaaataaatgactagataaaaaaaaaaattgtttgagtacattttccctgcattttagagattaggacagtggtcactttctagttgccgtcttcacagacaaacttgaaaggtattaaggaaaaaattccacatagctctgggcctttttggtattctgattgccacgttaatctgtaatcgttaagtacccatgaaagaatgtgtttcagtatcagtgctttttgggtactttaacaagtattgtaggcacggtggatttttttgaaatacccatgtgtccaatagcaagttaaggaacctagcgcatcaaatttggttttcttcattcatttggaaccttattttcgcaaaaaacctagctggaataataatgccatattgtattttgcacactgctttattttctagaggctctgggagcaaattacattcatcacattacctctgctctctcaagattaaagtctttcagcaacattctttattgtcatcataaggaaaaacttttatcgcaatgatagtcagttcacattagtttagcactatagatagtattcagaaattgctttctctttggtaaagaagataaataggtgaattttattgcctgttttttcaggcttcagaggtacctggcaccttactcaagcaaaaacaaaaaacagctttacttcaaaagcatgtgcctctggtaaattatccatcacttttgttttaaagtggtccctccaagaataatgtggcatacacagtgggntttggttgtaacggcagatgtaatagatgacttcaaaagcctgctccttactgcactctggacgaggccctggtctgtatagtttggcttcctctgttaagtcattctacaaggtgacttgccatttgaactttcgtaagagacctcagcagttagactgagaaaagttagagtgctgtagttatgaagtcatacatttttgataaaatacctgtggaaaaccagggatcctctcctgtttctctctcttgcctccccctt

SEQ ID NO: 419963 - DNA, 3974 bp, Homo sapiens
  misc_feature (1)..(1): n is a, c, g, or t
  misc_feature (3)..(5): n is a, c, g, or t
  misc_feature (7)..(7): n is a, c, g, or t
  misc_feature (9)..(9): n is a, c, g, or t
  misc_feature (46)..(46): n is a, c, g, or t
  misc_feature (2574)..(2574): n is a, c, g, or t
ngnnnananagagtttcactctgttgcccaggctggagtgcagtgncgcaatctcggctcactgcagcctctgccctctgagttcaagtgattctcctgcctcagcctcctgagtagctgggattacaggtgtctgccaccgtgcccagacatgaaaaaactgcttcctaacatgttaagtccggatccgagggaacttcagaaatccattgaagttcaattgttaagaagttctgtttgtttggcaactgctttaaacccgatagaacaagatcagaagtggcagtctataactgaaaatgtggtaaagtacttgaagcaaacatcccgcatcgctattggacctctgagactttctactttaacagtttcacagtctttgccagttctaagtaccttgcagctgtattgctcatctgctttggagaacacagtttctaacagactttcaacagaggactgtcttattccactcttcagtgaagctttacgttcatgtaaacagcatgacgtgaggccatggatgcaggcattaaggtatactatgtaccagaatcagttgttggagaaaattaaagaacaaacagtcccaattagaagccatctcatggaattaggtctaacagcagcaaaatttgctagaaaacgagggaatgtgtcccttgcaacaagactgctggcacagtgcagtgaagttcagctgggaaagaccaccactgcacaggatttagtccaacattttaaaaaactatcaacccaaggtcaagtggatgaaaaatgggggcccgaacttgatattgaaaaaaccaaattgctttatacagcaggccagtcaacacatgcaatggaaatgttgagttcttgtgccatatctttctgcaagtctgtgaaagctgaatatgcagttgctaaatcaattctgacactggctaaatggatccaggcagaatggaaagagatttcaggacagctgaaacaggtttacagagctcagcaccaacagaacttcacaggtctttctactttgtctaaaaacatactcactctaatagaactgccatctgttaatacgatggaagaagagtatcctcggatcgagagtgaatctacagtgcatattggagttggagaacctgacttcattttgggacagttgtatcacctgtcttcagtacaggcacctgaagtagccaaatcttgggcagcgttggccagctgggcttataggtggggcagaaaggtggttgacaatgccagtcagggagaaggtgttcgtctgctgcctagagaaaaatctgaagttcagaatctacttccagacactataactgaggaagagaaagagagaatatatggtattcttggacaggctgtgtgtcggccggcggggattcaggatgaagatataacacttcagataactgagagtgaagacaacgaagaagatgacatggttgatgttatctggcgtcagttgatatcaagctgcccatggctttcagaacttgatgaaagtgcaactgaaggagttattaaagtgtggaggaaagttgtagatagaatattcagcctgtacaaactctcttgcagtgcatactttactttccttaaactcaacgctggtcaaattcctttagatgaggatgaccctaggctgcatttaagtcacagagtggaacagagcactgatgacatgattgtgatggccacattgcgcctgctgcggttgctcgtgaagcacgctggtgagcttcggcagtatctggagcacggcttggagacaacacccactgcaccatggagaggaattattccgcaacttttctcacgcttaaaccaccctgaagtgtatgtgcgccaaagtatttgtaaccttctctgccgtgtggctcaagattccccacatctcatattgtatcctgcaatagtgggtaccatatcgcttagtagtgaatcccaggcttcaggaaataaattttccactgcaattccaactttacttggcaatattcaaggagaagaattgctggtttctgaatgtgagggaggaagtcctcctgcatctcaggatagcaataaggatgaacctaaaagtggattaaatgaagaccaagccatgatgcaggattgttacagcaaaattgtagataagctgtcctctgcaaaccccaccatggtattacaggttcagatgctcgtggctgaactgcgcagggtcactgtgctctgggatgagctctggctgggagttttgctgcaacaacacatgtatgtcctgagacgaattcagcagcttgaagatgaggtgaagagagtccagaacaacaacaccttacgcaaagaagagaaaattgcaatcatgagggagaagcacacagctttgatgaagcccatcgtatttgctttggagcatgtgaggagtatcacagcggctcctgcagaaacacctcatgaaaaatggtttcaggataactatggtgatgccattgaaaatgccctagaaaaactgaagactccattgaaccctgcaaagcctgggagcagctggattccatttaaagagataatgctaantttgcaacagagagcacagaaacgtgcaagttacatcttgcgtcttgaagaaatcagtccatggttggctgccatgactaacactgaaattgctcttcctggggaagtctcagccagagacactgtcacaatccatagtgtgggcggaaccatcacaatcttaccgactaaaaccaagccaaagaaacttctctttcttggatcagatgggaagagctatccttatcttttcaaaggactggaggatttacatctggatgagagaataatgcagttcctatctattgtgaataccatgtttgctacaattaatcgccaagaaacaccccggttccatgctcgacactattctgtaacaccactaggaacaagatcaggactaatccagtgggtagatggagccacacccttatttggtctttacaaacgatggcaacaacgggaagctgccttacaagcacaaaaggcccaagattcctaccaaactcctcagaatcctggaattgtaccccgtcctagtgaactttattacagtaaaattggccctgctttgaaaacagttgggcttagcctggatgtgtcccgtcgggattggcctcttcatgtaatgaaggcagtattggaagagttaatggaggccacacccccgaatctccttgccaaagagctctggtcatcttgcacaacacctgatgaatggtggagagttacgcagtcttatgcaagatctactgcagtcatgtctatggttggatacataattggccttggagacagacatctggataatgttcttatagatatgacgactggagaagttgttcacatagattacaatgtttgctttgaaaaaggtaaaagccttagagttcctgagaaagtaccttttcgaatgacacaaaacattgaaacagcactgggtgtaactggagtagaaggtgtatttaggctttcatgtgagcaggttttacacattatgcggcgtggcagagagaccctgctgacgctgctggaggcctttgtgtacgaccctctggtggactggacagcaggaggcgaggctgggtttgctggtgctgtctatggtggaggtggccagcaggccgagagcaagcagagcaagagagagatggagcgagagatcacccgcagcctgttttcttctagagtagctgagattaaggtgaagcccagtgacggaataagtcattgtcttctttttattaatagagtaaacatgctcatcaaaatgttgaggcaaattgtttctctaatttttttggcaaaactaatgtataatattgaaatggcagttaaatatggcagtttgagaccagcctgcccaacattggtttgggcaacactgaaccccgtttcaaccaaaaatacaaacaaaacaa

SEQ ID NO: 419964 - DNA, 3119 bp, Homo sapiens
  misc_feature (1)..(1): n is a, c, g, or t
  misc_feature (3)..(5): n is a, c, g, or t
  misc_feature (7)..(7): n is a, c, g, or t
  misc_feature (9)..(9): n is a, c, g, or t
  misc_feature (46)..(46): n is a, c, g, or t
ngnnnananagagtttcactctgttgcccaggctggagtgcagtgncgcaatctcggctcactgcagcctctgccctctgagttcaagtgattctcctgcctcagcctcctgagtagctgggattacaggtgtctgccaccgtgcccagacatgaaaaaactgcttcctaacatgttaagtccggatccgagggaacttcagaaatccattgaagttcaattgttaagaagttctgtttgtttggcaactgctttaaacccgatagaacaagatcagaagtggcagtctataactgaaaatgtggtaaagtacttgaagcaaacatcccgcatcgctattggacctctgagactttctactttaacagtttcacagtctttgccagttctaagtaccttgcagctgtattgctcatctgctttggagaacacagtttctaacagactttcaacagaggactgtcttattccactcttcagtgaagctttacgttcatgtaaacagcatgacgtgaggccatggatgcaggcattaaggtatactatgtaccagaatcagttgttggagaaaattaaagaacaaacagtcccaattagaagccatctcatggaattaggtctaacagcagcaaaatttgctagaaaacgagggaatgtgtcccttgcaacaagactgctggcacagtgcagtgaagttcagctgggaaagaccaccactgcacaggatttagtccaacattttaaaaaactatcaacccaaggtcaagtggatgaaaaatgggggcccgaacttgatattgaaaaaaccaaattgctttatacagcaggccagtcaacacatgcaatggaaatgttgagttcttgtgccatatctttctgcaagtctgtgaaagctgaatatgcagttgctaaatcaattctgacactggctaaatggatccaggcagaatggaaagagatttcaggacagctgaaacaggtttacagagctcagcaccaacagaacttcacaggtctttctactttgtctaaaaacatactcactctaatagaactgccatctgttaatacgatggaagaagagtatcctcggatcgagagtgaatctacagtgcatattggagttggagaacctgacttcattttgggacagttgtatcacctgtcttcagtacaggcacctgaagtagccaaatcttgggcagcgttggccagctgggcttataggtggggcagaaaggtggttgacaatgccagtcagggagaaggtgttcgtctgctgcctagagaaaaatctgaagttcagaatctacttccagacactataactgaggaagagaaagagagaatatatggtattcttggacaggctgtgtgtcggccggcggggattcaggatgaagatataacacttcagataactgagagtgaagacaacgaagaagatgacatggttgatgttatctggcgtcagttgatatcaagctgcccatggctttcagaacttgatgaaagtgcaactgaaggagttattaaagtgtggaggaaagttgtagatagaatattcagcctgtacaaactctcttgcagtgcatactttactttccttaaactcaacgctggtcaaattcctttagatgaggatgaccctaggctgcatttaagtcacagagtggaacagagcactgatgacatgattgtgatggccacattgcgcctgctgcggttgctcgtgaagcacgctggtgagcttcggcagtatctggagcacggcttggagacaacacccactgcaccatggagaggaattattccgcaacttttctcacgcttaaaccaccctgaagtgtatgtgcgccaaagtatttgtaaccttctctgccgtgtggctcaagattccccacatctcatattgtatcctgcaatagtgggtaccatatcgcttagtagtgaatcccaggcttcaggaaataaattttccactgcaattccaactttacttggcaatattcaaggagaagaattgctggtttctgaatgtgagggaggaagtcctcctgcatctcaggatagcaataaggatgaacctaaaagtggattaaatgaagaccaagccatgatgcaggattgttacagcaaaattgtagataagctgtcctctgcaaaccccaccatggtattacaggttcagatgctcgtggctgaactgcgcagggtcactgtgctctgggatgagctctggctgggagttttgctgcaacaacacatgtatgtcctgagacgaattcagcagcttgaagatgaggtgaagagagtccagaacaacaacaccttacgcaaagaagagaaaattgcaatcatgagggagaagcacacagctttgatgaagcccatcgtatttgctttggagcatgtgaggagtatcacagcggctcctgcagaaacacctcatgaaaaatggtttcaggataactatggtgatgccattgaaaatgccctagaaaaactgaagactccattgaaccctgcaaagcctgggagcagctggattccatttaaagaggtacagaataatcccaagcatgctactgaaatggcacatcacagttcccatgagatacgaaatttcaataagtggacttcttacttggaatgtaagagattttataagcctataggaggcagcctgtggccagttgcttataaggaacatagaaaaaagtgtttctgtttaagaatttggaaatcagtgggcaaagggggatggacggcaaaggtgcccaatctttcatgtatggaaggctcacaccagtgaacaacagatgaagaaattagccaaggaaggggctgtgaccctgagctaaatattggttgcctgctttatttacctcattaaagataagaaatttaactttgtgcctatgtagtttttcacaaggagagcattcagtatttctaacagataaaatagtcgcttataacaacataaagttttacaagtagttctggaatcaattccacatatgctgcgtgggatgattagtgtattcacatatttgagaatccttatcttttatattttggttttcttaattctatattctcttaggtctttatct

SEQ ID NO: 419965 - DNA, 3074 bp, Homo sapiens
  misc_feature (1)..(1): n is a, c, g, or t
  misc_feature (3)..(5): n is a, c, g, or t
  misc_feature (7)..(7): n is a, c, g, or t
  misc_feature (9)..(9): n is a, c, g, or t
  misc_feature (46)..(46): n is a, c, g, or t
  misc_feature (2574)..(2574): n is a, c, g, or t
ngnnnananagagtttcactctgttgcccaggctggagtgcagtgncgcaatctcggctcactgcagcctctgccctctgagttcaagtgattctcctgcctcagcctcctgagtagctgggattacaggtgtctgccaccgtgcccagacatgaaaaaactgcttcctaacatgttaagtccggatccgagggaacttcagaaatccattgaagttcaattgttaagaagttctgtttgtttggcaactgctttaaacccgatagaacaagatcagaagtggcagtctataactgaaaatgtggtaaagtacttgaagcaaacatcccgcatcgctattggacctctgagactttctactttaacagtttcacagtctttgccagttctaagtaccttgcagctgtattgctcatctgctttggagaacacagtttctaacagactttcaacagaggactgtcttattccactcttcagtgaagctttacgttcatgtaaacagcatgacgtgaggccatggatgcaggcattaaggtatactatgtaccagaatcagttgttggagaaaattaaagaacaaacagtcccaattagaagccatctcatggaattaggtctaacagcagcaaaatttgctagaaaacgagggaatgtgtcccttgcaacaagactgctggcacagtgcagtgaagttcagctgggaaagaccaccactgcacaggatttagtccaacattttaaaaaactatcaacccaaggtcaagtggatgaaaaatgggggcccgaacttgatattgaaaaaaccaaattgctttatacagcaggccagtcaacacatgcaatggaaatgttgagttcttgtgccatatctttctgcaagtctgtgaaagctgaatatgcagttgctaaatcaattctgacactggctaaatggatccaggcagaatggaaagagatttcaggacagctgaaacaggtttacagagctcagcaccaacagaacttcacaggtctttctactttgtctaaaaacatactcactctaatagaactgccatctgttaatacgatggaagaagagtatcctcggatcgagagtgaatctacagtgcatattggagttggagaacctgacttcattttgggacagttgtatcacctgtcttcagtacaggcacctgaagtagccaaatcttgggcagcgttggccagctgggcttataggtggggcagaaaggtggttgacaatgccagtcagggagaaggtgttcgtctgctgcctagagaaaaatctgaagttcagaatctacttccagacactataactgaggaagagaaagagagaatatatggtattcttggacaggctgtgtgtcggccggcggggattcaggatgaagatataacacttcagataactgagagtgaagacaacgaagaagatgacatggttgatgttatctggcgtcagttgatatcaagctgcccatggctttcagaacttgatgaaagtgcaactgaaggagttattaaagtgtggaggaaagttgtagatagaatattcagcctgtacaaactctcttgcagtgcatactttactttccttaaactcaacgctggtcaaattcctttagatgaggatgaccctaggctgcatttaagtcacagagtggaacagagcactgatgacatgattgtgatggccacattgcgcctgctgcggttgctcgtgaagcacgctggtgagcttcggcagtatctggagcacggcttggagacaacacccactgcaccatggagaggaattattccgcaacttttctcacgcttaaaccaccctgaagtgtatgtgcgccaaagtatttgtaaccttctctgccgtgtggctcaagattccccacatctcatattgtatcctgcaatagtgggtaccatatcgcttagtagtgaatcccaggcttcaggaaataaattttccactgcaattccaactttacttggcaatattcaaggagaagaattgctggtttctgaatgtgagggaggaagtcctcctgcatctcaggatagcaataaggatgaacctaaaagtggattaaatgaagaccaagccatgatgcaggattgttacagcaaaattgtagataagctgtcctctgcaaaccccaccatggtattacaggttcagatgctcgtggctgaactgcgcagggtcactgtgctctgggatgagctctggctgggagttttgctgcaacaacacatgtatgtcctgagacgaattcagcagcttgaagatgaggtgaagagagtccagaacaacaacaccttacgcaaagaagagaaaattgcaatcatgagggagaagcacacagctttgatgaagcccatcgtatttgctttggagcatgtgaggagtatcacagcggctcctgcagaaacacctcatgaaaaatggtttcaggataactatggtgatgccattgaaaatgccctagaaaaactgaagactccattgaaccctgcaaagcctgggagcagctggattccatttaaagagataatgctaantttgcaacagagagcacagaaacgtgcaagttacatcttgcgtcttgaagaaatcagtccatggttggctgccatgactaacactgaaattgctcttcctggggaagtctcagccagagacactgtcacaatccatagtgtgggcggaaccatcacaatcttaccgactaaaaccaagccaaagaaacttctctttcttggatcagatgggaagagctatccttatcttttcaaaggactggaggatttacatctggatgagagaataatgcagttcctatctattgtgaataccatgtttgctacaattaatcgccaagaaacaccccggttccatgctcgacactattctgtaacaccactaggaacaagatcaggactaatccagtgggtagatggagccacacccttatttggtctttacaaacgatggcaacaacgggaagctgccttacaagcacaaaaggttgattaaatcatctacacagtgtattagtcta

SEQ ID NO: 419966 - DNA, 2263 bp, Homo sapiens
  misc_feature (1)..(1): n is a, c, g, or t
  misc_feature (3)..(5): n is a, c, g, or t
  misc_feature (7)..(7): n is a, c, g, or t
  misc_feature (9)..(9): n is a, c, g, or t
  misc_feature (46)..(46): n is a, c, g, or t
ngnnnananagagtttcactctgttgcccaggctggagtgcagtgncgcaatctcggctcactgcagcctctgccctctgagttcaagtgattctcctgcctcagcctcctgagtagctgggattacaggtgtctgccaccgtgcccagacatgaaaaaactgcttcctaacatgttaagtccggatccgagggaacttcagaaatccattgaagttcaattgttaagaagttctgtttgtttggcaactgctttaaacccgatagaacaagatcagaagtggcagtctataactgaaaatgtggtaaagtacttgaagcaaacatcccgcatcgctattggacctctgagactttctactttaacagtttcacagtctttgccagttctaagtaccttgcagctgtattgctcatctgctttggagaacacagtttctaacagactttcaacagaggactgtcttattccactcttcagtgaagctttacgttcatgtaaacagcatgacgtgaggccatggatgcaggcattaaggtatactatgtaccagaatcagttgttggagaaaattaaagaacaaacagtcccaattagaagccatctcatggaattaggtctaacagcagcaaaatttgctagaaaacgagggaatgtgtcccttgcaacaagactgctggcacagtgcagtgaagttcagctgggaaagaccaccactgcacaggatttagtccaacattttaaaaaactatcaacccaaggtcaagtggatgaaaaatgggggcccgaacttgatattgaaaaaaccaaattgctttatacagcaggccagtcaacacatgcaatggaaatgttgagttcttgtgccatatctttctgcaagtctgtgaaagctgaatatgcagttgctaaatcaattctgacactggctaaatggatccaggcagaatggaaagagatttcaggacagctgaaacaggtttacagagctcagcaccaacagaacttcacaggtctttctactttgtctaaaaacatactcactctaatagaactgccatctgttaatacgatggaagaagagtatcctcggatcgagagtgaatctacagtgcatattggagttggagaacctgacttcattttgggacagttgtatcacctgtcttcagtacaggcacctgaagtagccaaatcttgggcagcgttggccagctgggcttataggtggggcagaaaggtggttgacaatgccagtcagggagaaggtgttcgtctgctgcctagagaaaaatctgaagttcagaatctacttccagacactataactgaggaagagaaagagagaatatatggtattcttggacaggctgtgtgtcggccggcggggattcaggatgaagatataacacttcagataactgagagtgaagacaacgaagaagatgacatggttgatgttatctggcgtcagttgatatcaagctgcccatggctttcagaacttgatgaaagtgcaactgaaggagttattaaagtgtggaggaaagttgtagatagaatattcagcctgtacaaactctcttgcagtgcatactttactttccttaaactcaacgctggtcaaattcctttagatgaggatgaccctaggctgcatttaagtcacagagtggaacagagcactgatgacatgattgtgatggccacattgcgcctgctgcggttgctcgtgaagcacgctggtgagcttcggcagtatctggagcacggcttggagacaacacccactgcaccatggagaggaattattccgcaacttttctcacgcttaaaccaccctgaagtgtatgtgcgccaaagtatttgtaaccttctctgccgtgtggctcaagattccccacatctcatattgtatcctgcaatagtgggtaccatatcgcttagtagtgaatcccaggcttcaggaaataaattttccactgcaattccaactttacttggcaatattcaaggagaagaattgctggtttctgaatgtgagggaggaagtcctcctgcatctcaggatagcaataaggatgaacctaaaagtggattaaatgaagaccaagccatgatgcaggattgttacagcaaaattgtagataagctgtcctctgcaaaccccaccatggtattacaggtacaaagaaactcacatgttgtagaagaattttttatagaataataaaaattgcttttgccaatctgtattgacaat

SEQ ID NO: 419967 - DNA, 726 bp, Homo sapiens
  misc_feature (1)..(1): n is a, c, g, or t
  misc_feature (3)..(5): n is a, c, g, or t
  misc_feature (7)..(7): n is a, c, g, or t
  misc_feature (9)..(9): n is a, c, g, or t
  misc_feature (46)..(46): n is a, c, g, or t
ngnnnananagagtttcactctgttgcccaggctggagtgcagtgncgcaatctcggctcactgcagcctctgccctctgagttcaagtgattctcctgcctcagcctcctgagtagctgggattacaggtgtctgccaccgtgcccagacatgaaaaaactgcttcctaacatgttaagtccggatccgagggaacttcagaaatccattgaagttcaattgttaagaagttctgtttgtttggcaactgctttaaacccgatagaacaagatcagaagtggcagtctataactgaaaatgtggtaaagtacttgaagcaaacatcccgcatcgctattggacctctgagactttctactttaacagtttcacagtctttgccagttctaagtaccttgcagctgtattgctcatctgctttggagaacacagtttctaacagactttcaacagaggactgtcttattccactcttcagtgaagctttacgttcatgtaaacagcatgacgtgaggccatggatgcaggcattaaggtatactatgtaccagaatcagttgttggagaaaattaaaggtaagtggtttttttttcttgtaagagaaaattaaaggtgttcttttttaaattttgctttattgaggtttatattacacattctaagtgtatggtttgatgagttctaacatgtcttcacttgtgtgaccaccaatacgatcgagat

SEQ ID NO: 419968 - DNA, 355 bp, Homo sapiens
gtagctgggactacaggtgcccaccatcacactcggctgatttttttgtatttttagtagagacggggtttctccatgttggtcaggctggtcttgaactcctgacctcaggtgatctgcccacctcggcctgccaaagtgctggattacaggcgtgagccaccgcgcccggcctaataacacttcttcttaatgccagaaggctttctagactctcacagcatgcagctgtgagatgtactgactttgtatgttcccaccaaaggcattacttttcagcgaaggttttaactccttttgtttttctgtagactactacatgctcagtacggtgaattaatccaaccgagaaatg

SEQ ID NO: 419969 - DNA, 590 bp, Homo sapiens
atatgtaggtatgcttcctgtatttatttctaaagtagtttctctttccttgatgccttattgatgtgataaacagcttggggaataaatctgtctttattttggaaatggtttttagaagcctagttttggccttaattacttaggggatgtataacagcacaggctttggggtgagatggatttgtattcaaatgagacttgggtatataaacttgtacttaacttccttaagctctgatttccttaactgtagttaacatcttcagaattactatttaaatggtgcatgtgagtgatccaagaaatttattagccatgttctacctcaagaagactttcacctggatgtgatttttttcagtgtgtcttttctgttacttctccctgcttacctcccattggctgcagctgggatttttttctcttccgccagtcctaggttgcgcctcccttcccttatttatctaaacgcttttttcctgctgattttaatacatttctttttctctcaacagtggcaacatgaagatctacttatcaatagaccacaagccatgtcagtcacacctcccccacggtctgctatc

SEQ ID NO: 419970 - DNA, 1232 bp, Homo sapiens
gggggcgcaccccccgcggccgcacaccgagacccccggggaaaaaaaaagggaagcttggattacaaaactcttagaagaattgagagaagccaaagaaaaccatacaccagagatgaaacatttcgtgggcttagaaaagaaaattaagcagatggaaatgagacatgcacaaagagaacaggaacttcaacagataatacagcaaacacaccaagtagtagaaactgagcaaaacaaagaagttgaaaaatggaaaagactggcacagttaaagaatcgtgagctggagaagttccgcacagaactagactcaatattagatgttctccgagagctgcaccggcaaggagtggttgtgccagttgcttttgcagatgaaatgaatgcaccagagtattaatagaaattcagatttcataatgaccttattaaaaggcctgaagatggatgggattgtgccactgtcaggacagcttatgaaaaacaagtgttccaatatgtttccagaaagcaaacaaccaaagcaacatttcaaaataaattgcctttaaccaataagaaaaaaaacatataatggtgtattttactaaaaatcattaaccagtctcattttaagtgatttatggacagtttcctttatagcagagaagggctcacttgtatgctagaaatagaaagaaaagaaaattgaacatactccgccacatttttattgataatgtgaggtttttaaaatttttattttagatccagggggtacatgtgcttgttgtaacatgggtgtattgaataatggtgggaattgggcttctagtgtacccatcatccaaatattaaacactgtacccaacaggtaatttttcaacgcttactgccgctcacactctttcccctattggagtccccagtgtctgttatctccatctttatgtctctgtgtacccattgtttagctcctacttttaagtgagaatatatgcaatattttattttttatgtctgatttagttcacataggataatggcctccagctctatccatgttgctgcaaatgacatgatttcattcttttttatagttgcataatactccatttatatatctctctctatatatatctcacgttttctttatccagtcaattgttggtagatacttaggttggttccatgaatttgctattgtaaatattgctgcaataaacatacatgtacagatatctttttta

SEQ ID NO: 419971 - DNA, 563 bp, Homo sapiens
gggggcgcaccccccgcggccgcacaccgagacccccggggaaaaaaaaagggaagcttggattacaaaactcttagaagaattgagagaagccaaagaaaaccatacaccagagatgaaacatttcgtgggcttagaaaagaaaattaagcagatggaaatgagacatgcacaaagagaacaggaacttcaacagataatacagcaaacacaccaagtagtagaaactgagcaaaacaaagaagttgaaaaatggaaaagactggcacagttaaagaatcgtgagctggagaagttccgcacagaactagactcaatattagatgttctccgagagctgcaccggcaaggagtggttgtgccagttgcttttgcagatgaaatgaatgcaccagagtattaatagaaattcagatttcataatgaccttattaaaaggcctgaagatggatgggattgtgccactgtcaggacagcttatgaaaaacaagtgttccaatatgtttccagaaagcaaacaaccaaagcaacatttcaaaataaattgcctttaaccaataaga

SEQ ID NO: 419972 - DNA, 525 bp, Homo sapiens
tggggggatttttaccggaagggttaccaaattttttggaggattggggggagcccaaagaaaaccatacaccagagatgaaacatttcgtgggcttagaaaagaaaattaagcagatggaaatgagacatgcacaaagagaacaggaacttcaacagataatacagcaaacacaccaagtagtagaaactgagcaaaacaaagaagttgaaaaatggaaaagactggcacagttaaagaatcgtgagctggagaagttccgcacagaactagactcaatattagatgttctccgagagctgcaccggcaaggagtggttgtgccagttgcttttgcagatgaaatgaatgcaccagagtattaatagaaattcagatttcataatgaccttattaaaaggcctgaagatggatgggattgtgccactgtcaggacagcttatgaaaaacaagtgttccaatatgtttccagaaagcaaacaaccaaagcaacatttcaaaataaattgcctttaaccaataaga

SEQ ID NO: 419973 - DNA, 5162 bp, Homo sapiens
tgtttccaatgtttgaggtactttagaatgtttactttgggaggtcaaaattgttgactatggctaactgttcccaagaagagctagatgaagagtttgaacagtttatgaaagagctttcagatgattcttttgaaaattcagacaaaacagctagacaatctaaaaaagagatgaagaagaaagatacagtgccttggtggataactgaagatgattttaaagatgatgttatctactgaactccgggttattcctcctcattcctcaaagattttagctgctgtttcactgacttcttggaacaaatgtgagctatttgaaaacaaagaagacttctcagcctgttatggaaatagaagaggagtctgctgaaaagattcaatttcttaagagcagtggaacctctctcttaagtactgatagcttagaaacaaatgaactagtagtttctgagctcaaccatagtagtctcggagtgggattggacacattagaagaacaagaggagaaagaacaattttttgccaggcttgagaaaggcttgacatcttccattgattattcgagattaaataaggaattggattctaatgactctacacattttaaagctttacatattaatcaagccaacgcagaactaactgatgacgaacatgagaatgaatcgaaacatgaagaactggcagaaaattacagtgatgattttgaagatgagtatgttggtgcaccgttgactactaaagatgaagagatgccttccaaagagaattccaaatcagaaaaaataagtgtgcccaaacaggaagaagaaaaaactggcatgcttgctaatgttgtgctgcttgattcattagactctgttgcagaggtcaatcttgatgaacaagataaaataacacctaagccaaggtgcctaccagaaatgactgagaatgaaatgacaggaacaggtgtttcttatggacaaagcagtagtgacgttgaagccctacatcaagcttattgtcatatagcccattcattgggagatgaagacaaacaaaaaattgagagtaacacagtggaagatatcaagagctcagtgaaaggtcatcctcaagaaaatgaagagaattcaaaaaacatctctactatggaatctgatctgcccacagtagaggagctgatgaaacctatcagaatagattcctttgggatcagtggttttgatttacaacctgtcagctctgagaaagtggccgaaagaaaagaaactgaattttttagctctttacccctgaagatgaacccaaatattttgtctcaagactcacaacatgtgaaccttttttttgacaaaaatgatgagaatgtgattttacaaaagaccacaaatgagagtatggaaaacagctgtccacaagtaactgaagtaactgccacagaagaacatgttgataaaatgtaccttaatattttgaggaaaaaaataactgttaattcttcatcattatctcaggatgacaaaattaataaaacttacagatctcaacttagttctgaagaagaaggggctgtaatgggtaaacaggtaccatacaagaaggccagaagtgcacctcctttacttaaaaggaaaccccagagtggattatatgcgtcagttaggagctcaggctatggcaaacccagttcaccactcaagatgttttctactcttgaaaagaaaacttcagaggacattataaaaagcaaaaacttgagatcgatttctacctccaatcaacctaggaaaaaagaaatcttatctggaacaaaactcatcaagcctgcagctttggataaaccagctcacaaaactgaaagttgcctgtctactcgtaagaagtctgaaaatcccacagaaactgattcctgtattcagtttcagactgattccttaggatactgtggtgagaacaaggagaagaaattacttatgtttaaaagagttcaggaagcagaggataaatggaggggtgcgcaagccctaattgagcaaattaaagccacattctcagaaaaggagaaagaactagaaaataagttggaagaactaaagaaacaacaggaaaaagaactcttcaaattgaatcaagataattatattcttcaagccaagttaagcagctttgaagaaacaaacaaaaaacaaaggtggttacattttggagaagcagctgatcctgtcactggagaaaagttgaagcaaatccaaaaagaaatacaagaacaagagacacttcttcaaggatatcaacaggaaaatgaacgattatataatcaagtaaaagatctccaagaacaaaacaagaaaaatgaggagcgaatgtttaaggaaaaccaaagtttattcagtgaggtagcttccttaaaagaacagatgcacaaaagtcgttttctgtctcaagtagttgaagattcagagcccacaagaaatcagaattttacagatctgttagcagaactacggatggcacagaaagaaaaagacagtttattggaagacatcaaaagactgaaacaagacaaacaagctcttgaagtagacttcgaaaaaatgaagaaagagagggaccaagccaaagatcagattgcttatgtcacaggtgagaaattatatgaaataaaaattttagaagaaacacataaacaagaaatcagtcgtctgcaaaaaagattacagtggtatgctgaaaatcaggaacttctggataaagatgcacttcggcttagagaagcaaatgaggaaattgagaagctcaaacttgagattgagaaactgaaagctgaatctgggaatccatctattcggcagaagatacgcttaaaagataaagcagcagatgccaaaaaaattcaggatctggagcgacaagttaaggaaatggaagggattctgaagagaagatatcccaattctttacctgctttaatattggctgcatcagcagctggtgatacagtggataaaaatacagtggaatttatggagaaaaggataaaaaagctagaagctgatctggagggcaaagatgaagatgcaaagaaaagccttcgtaccatggaacaacagtttcagaaaatgaagattcagtatgaacaaagactagagcagcaggagcagctacttgcctgcaaattgaatcaacatgactctcccagaattaaagccctagagaaggaacttgatgacatcaaggaagcccatcagatcactgtaagaaaccttgaagccgaaatagacgttcttaaacatcagaatgctgaattagacgtcaagaaaaatgataaagatgatgaagattttcagtctatagaattccaggtggaacaggctcatgctaaagctaaattagtaagactcaatgaagaactggctgcaaaaaagagagaaatacaagacctctcaaaaactgtggagaggcttcagaaagacagaagaatgatgctatcaaatcagaactcaaagggcagagaggaaatgtctgccaaaagggcaaagaaagatgttttgcactcaagtaaaggaaatgctaactccttccctggaaccctggacagcaagctgtaccaaccacatactttcactgattcccatgtttcagaagttttacaagaaaactacagattaaaaaatgagctagaaggattaatttcagagaagaatgaactgaagatgaaatctgaagcagtgatgaatcaatttgaaaactccatgagaagggtcaaggaagatactgcagcacacattgcatccctcaaagcatctcatcagagagaaatagagaaactcctttgccaaaatgcagtagaaaattcttcttccaaagtagctgaactaaatcgtaaaatagcaactcaagaggtacttataagacatttccaaagtcaagttaatgagctgcagagtaaacaagagtctctcgtagtttctgaagttcgagaagaaattctacagaaagagattacaaaactcttagaagaattgagagaagccaaagaaaaccatacaccagagatgaaacatttcgtgggcttagaaaagaaaattaagcagatggaaatgagacatgcacaaagagaacaggaacttcaacagataatacagcaaacacaccaagtagtagaaactgagcaaaacaaagaagttgaaaaatggaaaagactggcacagttaaagaatcgtgagctggagaagttccgcacagaactagactcaatattagatgttctccgagagctgcaccggcaaggagtggttgtgccagttgcttttgcagatgaaatgaatgcaccagagtattaatagaaattcagatttcataatgaccttattaaaaggcctgaagatggatgggattgtgccactgtcaggacagcttatgaaaaacaagtgttccaatatgtttccagaaagcaaacaaccaaagcaacatttcaaaataaattgcctttaaccaataagaaaaaaaacatataatggtgtattttactaaaaatcattaaccagtctcattttaagtgatttatggacagtttcctttatagcagagaagggctcacttgtatgctagaaatagaaagaaaagaaaattgaacatactccgccacatttttattgataatgtgaggtttttaaaatttttattttagatccagggggtacatgtgcttgttgtaacatgggtgtattgaataatggtgggaattgggcttctagtgtacccatcatccaaatattaaacactgtacccaacaggtaatttttcaacgcttactgccgctcacactctttcccctattggagtccccagtgtctgttatctccatctttatgtctctgtgtacccattgtttagctcctacttttaagtgagaatatatgcaatattttattttttatgtctgatttagttcacataggataatggcctccagctctatccatgttgctgcaaatgacatgatttcattcttttttatagttgcataatactccatttatatatctctctctatatatatctcacgttttctttatccagtcaattgttggtagatacttaggttggttccatgaatttgctattgtaaatattgctgcaataaacatacatgtacagatatctttttta

SEQ ID NO: 419974 - DNA, 4431 bp, Homo sapiens
tgtttccaatgtttgaggtactttagaatgtttactttgggaggtcaaaattgttgactatggctaactgttcccaagaagagctagatgaagagtttgaacagtttatgaaagagctttcagatgattcttttgaaaattcagacaaaacagctagacaatctaaaaaagagatgaagaagaaagatacagtgccttggtggataactgaagatgattttaaagatgatggacttcttggaacaaatgtgagctatttgaaaacaaagaagacttctcagcctgttatggaaatagaagaggagtctgctgaaaagattcaatttcttaagagcagtggaacctctctcttaagtactgatagcttagaaacaaatgaactagtagtttctgagctcaaccatagtagtctcggagtgggattggacacattagaagaacaagaggagaaagaacaattttttgccaggcttgagaaaggcttgacatcttccattgattattcgagattaaataaggaattggattctaatgactctacacattttaaagctttacatattaatcaagccaacgcagaactaactgatgacgaacatgagaatgaatcgaaacatgaagaactggcagaaaattacagtgatgattttgaagatgagtatgttggtgcaccgttgactactaaagatgaagagatgccttccaaagagaattccaaatcagaaaaaataagtgtgcccaaacaggaagaagaaaaaactggcatgcttgctaatgttgtgctgcttgattcattagactctgttgcagaggtcaatcttgatgaacaagataaaataacacctaagccaaggtgcctaccagaaatgactgagaatgaaatgacaggaacaggtgtttcttatggacaaagcagtagtgacgttgaagccctacatcaagcttattgtcatatagcccattcattgggagatgaagacaaacaaaaaattgagagtaacacagtggaagatatcaagagctcagtgaaaggtcatcctcaagaaaatgaagagaattcaaaaaacatctctactatggaatctgatctgcccacagtagaggagctgatgaaacctatcagaatagattcctttgggatcagtggttttgatttacaacctgtcagctctgagaaagtggccgaaagaaaagaaactgaattttttagctctttacccctgaagatgaacccaaatattttgtctcaagactcacaacatgtgaaccttttttttgacaaaaatgatgagaatgtgattttacaaaagaccacaaatgagagtatggaaaacagctgtccacaagtaactgaagtaactgccacagaagaacatgttgataaaatgtaccttaatattttgaggaaaaaaataactgttaattcttcatcattatctcaggatgacaaaattaataaaacttacagatctcaacttagttctgaagaagaaggggctgtaatgggtaaacaggtaccatacaagaaggccagaagtgcacctcctttacttaaaaggaaaccccagagtggattatatgcgtcagttaggagctcaggctatggcaaacccagttcaccactcaagatgttttctactcttgaaaagaaaacttcagaggacattataaaaagcaaaaacttgagatcgatttctacctccaatcaacctaggaaaaaagaaatcttatctggaacaaaactcatcaagcctgcagctttggataaaccagctcacaaaactgaaagttgcctgtctactcgtaagaagtctgaaaatcccacagaaactgattcctgtattcagtttcagactgattccttaggatactgtggtgagaacaaggagaagaaattacttatgtttaaaagagttcaggaagcagaggataaatggaggggtgcgcaagccctaattgagcaaattaaagccacattctcagaaaaggagaaagaactagaaaataagttggaagaactaaagaaacaacaggaaaaagaactcttcaaattgaatcaagataattatattcttcaagccaagttaagcagctttgaagaaacaaacaaaaaacaaaggtggttacattttggagaagcagctgatcctgtcactggagaaaagttgaagcaaatccaaaaagaaatacaagaacaagagacacttcttcaaggatatcaacaggaaaatgaacgattatataatcaagtaaaagatctccaagaacaaaacaagaaaaatgaggagcgaatgtttaaggaaaaccaaagtttattcagtgaggtagcttccttaaaagaacagatgcacaaaagtcgttttctgtctcaagtagttgaagattcagagcccacaagaaatcagaattttacagatctgttagcagaactacggatggcacagaaagaaaaagacagtttattggaagacatcaaaagactgaaacaagacaaacaagctcttgaagtagacttcgaaaaaatgaagaaagagagggaccaagccaaagatcagattgcttatgtcacaggtgagaaattatatgaaataaaaattttagaagaaacacataaacaagaaatcagtcgtctgcaaaaaagattacagtggtatgctgaaaatcaggaacttctggataaagatgcacttcggcttagagaagcaaatgaggaaattgagaagctcaaacttgagattgagaaactgaaagctgaatctgggaatccatctattcggcagaagatacgcttaaaagataaagcagcagatgccaaaaaaattcaggatctggagcgacaagttaaggaaatggaagggattctgaagagaagatatcccaattctttacctgctttaatattggctgcatcagcagctggtgatacagtggataaaaatacagtggaatttatggagaaaaggataaaaaagctagaagctgatctggagggcaaagatgaagatgcaaagaaaagccttcgtaccatggaacaacagtttcagaaaatgaagattcagtatgaacaaagactagagcagcaggagcagctacttgcctgcaaattgaatcaacatgactctcccagaattaaagccctagagaaggaacttgatgacatcaaggaagcccatcagatcactgtaagaaaccttgaagccgaaatagacgttcttaaacatcagaatgctgaattagacgtcaagaaaaatgataaagatgatgaagattttcagtctatagaattccaggtggaacaggctcatgctaaagctaaattagtaagactcaatgaagaactggctgcaaaaaagagagaaatacaagacctctcaaaaactgtggagaggcttcagaaagacagaagaatgatgctatcaaatcagaactcaaagggcagagaggaaatgtctgccaaaagggcaaagaaagatgttttgcactcaagtaaaggaaatgctaactccttccctggaaccctggacagcaagctgtaccaaccacatactttcactgattcccatgtttcagaagttttacaagaaaactacagattaaaaaatgagctagaaggattaatttcagagaagaatgaactgaagatgaaatctgaagcagtgatgaatcaatttgaaaactccatgagaagggtcaaggaagatactgcagcacacattgcatccctcaaagcatctcatcagagagaaatagagaaactcctttgccaaaatgcagtagaaaattcttcttccaaagtagctgaactaaatcgtaaaatagcaactcaagaggtacttataagacatttccaaagtcaagttaatgagctgcagagtaaacaagagtctctcgtagtttctgaagttcgagaagaaattctacagaaagagattacaaaactcttagaagaattgagagaagccaaagaaaaccatacaccagagatgaaacatttcgtgggcttagaaaagaaaattaagcagatggaaatgagacatgcacaaagagaacaggaacttcaacagataatacagcaaacacaccaagtagtagaaactgagcaaaacaaagaagttgaaaaatggaaaagactggcacagttaaagaatcgtgagctggagaagttccgcacagaactagactcaatattagatgttctccgagagctgcaccggcaaggagtggttgtgccagttgcttttgcagatgaaatgaatgcaccagagtattaatagaaattcagatttcataatgaccttattaaaaggcctgaagatggatgggattgtgccactgtcaggacagcttatgaaaaacaagtgttccaatatgtttccagaaagcaaacaaccaaagcaacatttcaaaataaattgcctttaaccaataaga

SEQ ID NO: 419975 - DNA, 2308 bp, Homo sapiens
aaagaattaactttattacttttacaagacctatttttatattaaaaggttaaggaaatggaagggattctgaagagaagatatcccaattctttacctgctttaatattggctgcatcagcagctggtgatacagtggataaaaatacagtggaatttatggagaaaaggataaaaaagctagaagctgatctggagggcaaagatgaagatgcaaagaaaagccttcgtaccatggaacaacagtttcagaaaatgaagattcagtatgaacaaagactagagcagcaggagcagctacttgcctgcaaattgaatcaacatgactctcccagaattaaagccctagagaaggaacttgatgacatcaaggaagcccatcagatcactgtaagaaaccttgaagccgaaatagacgttcttaaacatcagaatgctgaattagacgtcaagaaaaatgataaagatgatgaagattttcagtctatagaattccaggtggaacaggctcatgctaaagctaaattagtaagactcaatgaagaactggctgcaaaaaagagagaaatacaagacctctcaaaaactgtggagaggcttcagaaagacagaagaatgatgctatcaaatcagaactcaaagggcagagaggaaatgtctgccaaaagggcaaagaaagatgttttgcactcaagtaaaggaaatgctaactccttccctggaaccctggacagcaagctgtaccaaccacatactttcactgattcccatgtttcagaagttttacaagaaaactacagattaaaaaatgagctagaaggattaatttcagagaagaatgaactgaagatgaaatctgaagcagtgatgaatcaatttgaaaactccatgagaagggtcaaggaagatactgcagcacacattgcatccctcaaagcatctcatcagagagaaatagagaaactcctttgccaaaatgcagtagaaaattcttcttccaaagtagctgaactaaatcgtaaaatagcaactcaagaggtacttataagacatttccaaagtcaagttaatgagctgcagagtaaacaagagtctctcgtagtttctgaagttcgagaagaaattctacagaaagagattacaaaactcttagaagaattgagagaagccaaagaaaaccatacaccagagatgaaacatttcgtgggcttagaaaagaaaattaagcagatggaaatgagacatgcacaaagagaacaggaacttcaacagataatacagcaaacacaccaagtagtagaaactgagcaaaacaaagaagttgaaaaatggaaaagactggcacagttaaagaatcgtgagctggagaagttccgcacagaactagactcaatattagatgttctccgagagctgcaccggcaaggagtggttgtgccagttgcttttgcagatgaaatgaatgcaccagagtattaatagaaattcagatttcataatgaccttattaaaaggcctgaagatggatgggattgtgccactgtcaggacagcttatgaaaaacaagtgttccaatatgtttccagaaagcaaacaaccaaagcaacatttcaaaataaattgcctttaaccaataagaaaaaaaacatataatggtgtattttactaaaaatcattaaccagtctcattttaagtgatttatggacagtttcctttatagcagagaagggctcacttgtatgctagaaatagaaagaaaagaaaattgaacatactccgccacatttttattgataatgtgaggtttttaaaatttttattttagatccagggggtacatgtgcttgttgtaacatgggtgtattgaataatggtgggaattgggcttctagtgtacccatcatccaaatattaaacactgtacccaacaggtaatttttcaacgcttactgccgctcacactctttcccctattggagtccccagtgtctgttatctccatctttatgtctctgtgtacccattgtttagctcctacttttaagtgagaatatatgcaatattttattttttatgtctgatttagttcacataggataatggcctccagctctatccatgttgctgcaaatgacatgatttcattcttttttatagttgcataatactccatttatatatctctctctatatatatctcacgttttctttatccagtcaattgttggtagatacttaggttggttccatgaatttgctattgtaaatattgctgcaataaacatacatgtacagatatctttttta

SEQ ID NO: 419976 - DNA, 455 bp, Homo sapiens
atcccagttttatgagaagaaggaaaactaagcaaagaattaactttattacttttacaagacctatttttatattaaaaggtatgactgagtagattgggtcagggccaagaaaggatcagccaaatgtggtatgaagaactagaaatatttggccaggcgcggtggctcacgcctgtaatcccagcactttgggaggcagaggcaggagaatcacatgaagctaggagttcaagaccagggtggccaacatggtgaaaccctctctctgctaaaaaatagaaaaattagccaggcatggttttagctgggcttggtggtgcacacctgtaatcctagctacttgggagggtgaggcaagagaatcacttgaacctgggaggtagaagttggaatgagccaagatcatgccactgtacctcagcctgggtgatggagcaaaactccatctcaaa

SEQ ID NO: 419977 - DNA, 1428 bp, Homo sapiens
gggaacaatctcctcgttccagaagggcagggcgcgacagatggtgtccttgaggctctcgcaggtggggagttccccgggcttcaggctgcgtaccgacgctcctgggggacacaggcacgctgctttccctcccaagccagtgggcccccacccgactccccactctgcagcttcccagaggccttcccagcaaaggcagcccaccttgctaatggagttgtagtaggggtgcttctcgtccatcgggggcggcgggatgtcgaaggagcgcctccagatcttcacctgctcctccccgtgcttggcggccgtttctgccttgttgaggcctgtgaggcccccgtaatgccgctcattgaggcgccaagtgcgcaccacaggcagccacatctggtccgtgccgtccaggatggcccagagggtgcggatggcccgcttcagcactgacgtgtagcagatgtcaaactccatcttggcatccttgatggccttggctccccgcttggcctcctcggtccccttttcactcagctctgcatcgaaccagccacagaaacggttctcctggttccatgtgctctcgccgtgccggaccatcacgaggcgccaggctaggaggcggccctcagcaggcagaggaggagagccagaggagctggtgcagaccacagctttgtggagaggagtctggccttgtggaaggttatccaaaataacccagtgtatgaaaaccaggaaaatcttaacatgggagaaaagaagatgatcaatacatgcccatcctgagatgattcaactattggaatgatcagatacagacttcaaagcagctatttataaccagccttcagaaagtattggtgaatattcttaaacagaatggaaatgacaaagcatggagtccataaattagatgatagtttggaaaaagatataaacttacaaaccaagaagctcagtgaaccacacaactggataaattaacaacaaaagtccaagcttagacacatcataaagaaacttctgaaaactaaagaccaagaaaaataagatcagccagagaaaaacgatacatttcattcaggtgaacaattctttgaaagactggatcttcaccagaaactatagaggccagaaagaagtggaacatttttagttttgaaataactgtcacccaagaattctatatccagtaaaaatttctattttactggaataaaagaatgaaataaaataaagacattctcaaatgaaggcaagctgaggaaattcataaccaaagaatctgctttaaaaaaatgttaaaccaagttcttcagacagaagagattactgggggcaattcaaaactttgggaatgcaggaagaacatcataaatggcaaaagtccacataaatatgaaactattctttacttctttaaga

SEQ ID NO: 419978 - DNA, 1548 bp, Homo sapiens
ctgagtcaacatggggttctggaaggtggagggagcatcttcccatgtctctcccactgacagccaccaatcctggacagatgcaggagcagctgtcagtagacagataagaaaatgagatcagattcaaagttccgcagagaagtggtgaggtaacaagtattgcctagcctggacacacaggcggcttgaaacctcaagtgcaccaacagaaagagctccaggaagaatcagaggagtgggatgtgaagcccctcgaagtcagtgagttgggggaatccctccaatttttcttttcttctctaccccagctcctgggcagtaacatggaggtggcagtggtggcacagtgacggtagtgtgagctgggtacgcacttgaaacctgagagggtaacgctaccctctgtctagaggagccatggccccaaaagcatgggcaaccaccttctgcagctcctttctgcccccctgcgctgggccctggatgcagtttcagggagtatgcagcagggtaggtagggaaagagccccagatttgtggctggaggtcttggtagggatgttgcagggagctgttgtgtttcagggagagtacagagaagggagagatgaagtgagtgatccgataaagtgatatgtgaagtcattggcttgctgccaagctgcgcacagggctgaccctagatgcacattgcaggtcccagactgaccggtgtagatacaggactaatatgactagtagtgcaaacactttaaacagtcaacattctgcttaggatttaaacaaggtccagagtctcaacataatatttaaaatatccaggttatccaaaataacccagtgtatgaaaaccaggaaaatcttaacatgggagaaaagaagatgatcaatacatgcccatcctgagatgattcaactattggaatgatcagatacagacttcaaagcagctatttataaccagccttcagaaagtattggtgaatattcttaaacagaatggaaatgacaaagcatggagtccataaattagatgatagtttggaaaaagatataaacttacaaaccaagaagctcagtgaaccacacaactggataaattaacaacaaaagtccaagcttagacacatcataaagaaacttctgaaaactaaagaccaagaaaaataagatcagccagagaaaaacgatacatttcattcaggtgaacaattctttgaaagactggatcttcaccagaaactatagaggccagaaagaagtggaacatttttagttttgaaataactgtcacccaagaattctatatccagtaaaaatttctattttactggaataaaagaatgaaataaaataaagacattctcaaatgaaggcaagctgaggaaattcataaccaaagaatctgctttaaaaaaatgttaaaccaagttcttcagacagaagagattactgggggcaattcaaaactttgggaatgcaggaagaacatcataaatggcaaaagtccacataaatatgaaactattctttacttctttaaga

SEQ ID NO: 419979 - DNA, 1160 bp, Homo sapiens
gaatatttctggaatatctaaaggagggggcagagttggatgtggatattgcaggaagcttctgcagctcctttctgcccccctgcgctgggccctggatgcagtttcagggagtatgcagcagggtaggtagggaaagagccccagatttgtggctggaggtcttggtagggatgttgcagggagctgttgtgtttcagggagagtacagagaagggagagatgaagtgagtgatccgataaagtgatatgtgaagtcattggcttgctgccaagctgcgcacagggctgaccctagatgcacattgcaggtcccagactgaccggtgtagatacaggactaatatgactagtagtgcaaacactttaaacagtcaacattctgcttaggatttaaacaaggtccagagtctcaacataatatttaaaatatccaggttatccaaaataacccagtgtatgaaaaccaggaaaatcttaacatgggagaaaagaagatgatcaatacatgcccatcctgagatgattcaactattggaatgatcagatacagacttcaaagcagctatttataaccagccttcagaaagtattggtgaatattcttaaacagaatggaaatgacaaagcatggagtccataaattagatgatagtttggaaaaagatataaacttacaaaccaagaagctcagtgaaccacacaactggataaattaacaacaaaagtccaagcttagacacatcataaagaaacttctgaaaactaaagaccaagaaaaataagatcagccagagaaaaacgatacatttcattcaggtgaacaattctttgaaagactggatcttcaccagaaactatagaggccagaaagaagtggaacatttttagttttgaaataactgtcacccaagaattctatatccagtaaaaatttctattttactggaataaaagaatgaaataaaataaagacattctcaaatgaaggcaagctgaggaaattcataaccaaagaatctgctttaaaaaaatgttaaaccaagttcttcagacagaagagattactgggggcaattcaaaactttgggaatgcaggaagaacatcataaatggcaaaagtccacataaatatgaaactattctttacttctttaaga

SEQ ID NO: 419980 - DNA, 1374 bp, Homo sapiens
gggaacaatctcctcgttccagaagggcagggcgcgacagatggtgtccttgaggctctcgcaggtggggagttccccgggcttcaggctgcgtaccgacgctcctgggggacacaggcacgctgctttccctcccaagccagtgggcccccacccgactccccactctgcagcttcccagaggccttcccagcaaaggcagcccaccttgctaatggagttgtagtaggggtgcttctcgtccatcgggggcggcgggatgtcgaaggagcgcctccagatcttcacctgctcctccccgtgcttggcggccgtttctgccttgttgaggcctgtgaggcccccgtaatgccgctcattgaggcgccaagtgcgcaccacaggcagccacatctggtccgtgccgtccaggatggcccagagggtgcggatggcccgcttcagcactgacgtgtagcagatgtcaaactccatcttggcatccttgatggccttggctccccgcttggcctcctcggtccccttttcactcagctctgcatcgaaccagccacagaaacggttctcctggttccatgtgctctcgccgtgccggaccatcacgaggcgccaggctaggaggcggccctcagcaggcagaggaggagagccagaggagctggtgcagaccacagctttgtggagaggagtctggccttgtggaaggttatccaaaataacccagtgtatgaaaaccaggaaaatcttaacatgggagtcagatacagacttcaaagcagctatttataaccagccttcagaaagtattggtgaatattcttaaacagaatggaaatgacaaagcatggagtccataaattagatgatagtttggaaaaagatataaacttacaaaccaagaagctcagtgaaccacacaactggataaattaacaacaaaagtccaagcttagacacatcataaagaaacttctgaaaactaaagaccaagaaaaataagatcagccagagaaaaacgatacatttcattcaggtgaacaattctttgaaagactggatcttcaccagaaactatagaggccagaaagaagtggaacatttttagttttgaaataactgtcacccaagaattctatatccagtaaaaatttctattttactggaataaaagaatgaaataaaataaagacattctcaaatgaaggcaagctgaggaaattcataaccaaagaatctgctttaaaaaaatgttaaaccaagttcttcagacagaagagattactgggggcaattcaaaactttgggaatgcaggaagaacatcataaatggcaaaagtccacataaatatgaaactattctttacttctttaaga

SEQ ID NO: 419981 - DNA, 892 bp, Homo sapiens
gggaacaatctcctcgttccagaagggcagggcgcgacagatggtgtccttgaggctctcgcaggtggggagttccccgggcttcaggctgcgtaccgacgctcctgggggacacaggcacgctgctttccctcccaagccagtgggcccccacccgactccccactctgcagcttcccagaggccttcccagcaaaggcagcccaccttgctaatggagttgtagtaggggtgcttctcgtccatcgggggcggcgggatgtcgaaggagcgcctccagatcttcacctgctcctccccgtgcttggcggccgtttctgccttgttgaggcctgtgaggcccccgtaatgccgctcattgaggcgccaagtgcgcaccacaggcagccacatctggtccgtgccgtccaggatggcccagagggtgcggatggcccgcttcagcactgacgtgtagcagatgtcaaactccatcttggcatccttgatggccttggctccccgcttggcctcctcggtccccttttcactcagctctgcatcgaaccagccacagaaacggttctcctggttccatgtgctctcgccgtgccggaccatcacgaggcgccaggctaggaggcggccctcagcaggcagaggaggagagccagaggagctggtgcagaccacagctttgtggagaggagtctggccttgtggaaggggtgctcacaacgctggtggactgcaaaatgacagacgcactcgggacaacaacttggctcttatgaaataaacatatacttaccaaatgacccagtaatcctgtgcctatttacccaagagaaatgaagacccatgtgttacacgaaaacctgtacatgcatgtctgtagcagtacgattcatca

SEQ ID NO: 419982 - DNA, 420 bp, Homo sapiens
ggccaacaattccatttttaaaaatgagacttgaacagccacttcaccagtgaggacatagaagccagtgaacagatgttcaacgttatcaggcattagggaaatgaaaataaaaccacagtgagctactgttatgtacctactactagaaaagctaaagttaacaaatactgcaactatcaagtgctgacagggatacagagcaactgcctactgtggtgtttaacttacaggggtgctcacaacgctggtggactgcaaaatgacagacgcactcgggacaacaacttggctcttatgaaataaacatatacttaccaaatgacccagtaatcctgtgcctatttacccaagagaaatgaagacccatgtgttacacgaaaacctgtacatgcatgtctgtagcagtacgattcatca

SEQ ID NO: 419983 - DNA, 538 bp, Homo sapiens
  misc_feature (9)..(9): n is a, c, g, or t
  misc_feature (15)..(15): n is a, c, g, or t
  misc_feature (25)..(25): n is a, c, g, or t
cgaaaaatncagagncccaattganaaggtgccagaaattatgggagttatctgtgcccagttatccataatcagccagcctagagtccgccaacaaatcataaataccgtgagtttatttatatccagacccaagtacacagatatagtgctcagcttccttctgtgtcatccagtgccgtataacaggcacctggctgaggtgtggagaatgctgtcggtggagcttcccagcacgacctggattctgtggaggctcctgaggaagctgcagaaatgccataatgagcctgcacaggagaagatggcatatgtggctgtggctgtaagcccttgagctttgcccctctaatgtcagcccctcccaggatgactgaccccacaccccagtggagagtgttccttttggtccctctcaaagcctgcatctgtcatccatttataagtctacagtgtttctgccaagggattgacatggagggagctggggagagtgaaggagtcagaatgccttaatacaaactcgtccaacctgcaa

SEQ ID NO: 419984 - DNA, 944 bp, Homo sapiens
  misc_feature (2)..(2): n is a, c, g, or t
  misc_feature (4)..(4): n is a, c, g, or t
gncncgaggctgagaccggtgcgccgcgcgctagtggccgctcttccgcgggctagcgggcggtgggggcgccagcagcgcggaaggcgggcacgcgggccatggctccctgggcggaggccgagcactcggcgctgaacccgctgcgcgcggtgtggctcacgctgaccgccgccttcctgctgaccctactgctgcagctcctgccgcccggcctgctcccgggctgcgcgatcttccaggacctgatccgctatgggaaaaccaagtgtggggagccgtcgcgccccgccgcctgccgagcctttgatgtccccaagagatatttttcccacttttatatcatctcagtgctgtggaatggcttcctgctttggtgccttactcaatctctgttcctgggagcaccttttccaagctggcttcatggtttgctcagaattctcggggcggcacagttccagggagtggtcattcactgtaaccacaggatcccatttggagactggtttgaatatgtttcttcccctaactacttagcagagctgatgatctacgtttccatggccgtcacctttgggttccacaacttaacttggtggctagtggtgacaaatgtcttctttaatcaggccctgtctgcctttctcagccaccaattctacaaaagcaaatttgtctcttacccgaagcataggaaagctttcctaccatttttgttttaagttaacctcagtcatgaagaatgcaaaccaggtgatggtttcaatgcctaaggacagtgaagtctggagcccaaagtacagtttcagcaaagctgtttgaaactctccattccatttctataccccacaagttttcactgaatgagcatggcagtgccactcaagaaaatgaatctccaaagtatcttcaaagaataaatactaatggcagatctgcga

SEQ ID NO: 419985 - DNA, 2534 bp, Homo sapiens
  misc_feature (2)..(2): n is a, c, g, or t
  misc_feature (4)..(4): n is a, c, g, or t
gncncgaggctgagaccggtgcgccgcgcgctagtggccgctcttccgcgggctagcgggcggtgggggcgccagcagcgcggaaggcgggcacgcgggccatggctccctgggcggaggccgagcactcggcgctgaacccgctgcgcgcggtgtggctcacgctgaccgccgccttcctgctgaccctactgctgcagctcctgccgcccggcctgctcccgggctgcgcgatcttccaggacctgatccgctatgggaaaaccaagtgtggggagccgtcgcgccccgccgcctgccgagcctttgatgtccccaagagatatttttcccacttttatatcatctcagtgctgtggaatggcttcctgctttggtgccttactcaatctctgttcctgggagcaccttttccaagctggcttcatggtttgctcagaattctcggggcggcacagttccagggaggggagctggcactgtctgcattcttagtgctagtatttctgtggctgcacagcttacgaagactcttcgagtgcctctacgtcagtgtcttctccaatgtcatgattcacgtcgtgcagtactgttttggacttgtctattatgtccttgttggcctaactgtgctgagccaagtgccaatggatggcaggaatgcctacataacagggaaaaatctattgatgcaagcacggtggttccatattcttgggatgatgatgttcatctggtcatctgcccatcagtataagtgccatgttattctcggcaatctcaggaaaaataaagcaggagtggtcattcactgtaaccacaggatcccatttggagactggtttgaatatgtttcttcccctaactacttagcagagctgatgatctacgtttccatggccgtcacctttgggttccacaacttaacttggtggctagtggtgacaaatgtcttctttaatcaggccctgtctgcctttctcagccaccaattctacaaaagcaaatttgtctcttacccgaagcataggaaagctttcctaccatttttgttttaagttaacctcagtcatgaagaatgcaaaccaggtgatggtttcaatgcctaaggacagtgaagtctggagcccaaagtacagtttcagcaaagctgtttgaaactctccattccatttctataccccacaagttttcactgaatgagcatggcagtgccactcaagaaaatgaatctccaaagtatcttcaaagaataaatactaatggcagatctgcgatttctgggtccactttctgagatgctttctaaaaccaaccaactgataaaaagtagatgagacttctccaagctgcttcacaagcaaactaaccgaaaaactgaaaatatacaaacagcttcacacacacacacacacacacacacacacacacacacacaaaggaagatcatcaatggctgcggtagcctagtaggaatggactatataataatatagcaggtgctcaataactgtttgttgcatttcagtaaaagcagaataacctttcaaaataataacaggctgggtgcaatggctcacacctgttaatcccagcacttcgggaggccaaggtgggcagttcgcttgggcccaagagttcgagaccagcctgggcaacatggtgaaaccctatctccgtgaaaaaatatgaaaattagccaagagtggtggcacatgcctgtagtcccagatacttgggagtgggctgggatgggagaatcgcttgagcccaggaggtcaagggtacagtgagccgaggtcatgccactgcactccagcctggcctgggcaacagagcaagaccctgtctcaaaataataataatatataattttacaccaaaagtttcaggaaaaaacgagtttgttggagttagtttatactttcacatatcaccacaaagatctccagttaaataactatcaatatccatttccattcatctccccctcaaatcatagcctaacagaacactttgaaagctcttttatttaatatttttttacatcctttgaagggagtgcttcaaaaatgaaagcatcagaagataaaatatttttatatttatgcatagcaagccttcatgaacggaagtgacacactctggattgaataatactgtagcctcattcatatgtagttattcaaattggattaatgtctgtgtgagtttatttgaactagcagaaagtatctgaagatattcaggaatagagtttatacttaaaatagcttatgttaaagaaaatacctgtgattaattcagagggaaataaatgcatggtataaaagaaaaccaaaaacttaaaaaataatactatagcctgagcaacacattaaaactgcacacttgtgcagcgtaagattctctggcttattggctgaggtgttaagtttattccttttatgaagatgtcctattacagtcagctaagcactaaagctttgcatttatatgtactttgctatgggggaaagaaccttatgattaat

SEQ ID NO: 419986 - DNA, 1277 bp, Homo sapiens
  misc_feature (2)..(2): n is a, c, g, or t
  misc_feature (4)..(4): n is a, c, g, or t
gncncgaggctgagaccggtgcgccgcgcgctagtggccgctcttccgcgggctagcgggcggtgggggcgccagcagcgcggaaggcgggcacgcgggccatggctccctgggcggaggccgagcactcggcgctgaacccgctgcgcgcggtgtggctcacgctgaccgccgccttcctgctgaccctactgctgcagctcctgccgcccggcctgctcccgggctgcgcgatcttccaggacctgatccgctatgggaaaaccaagtgtggggagccgtcgcgccccgccgcctgccgagcctttgatgtccccaagagatatttttcccacttttatatcatctcagtgctgtggaatggcttcctgctttggtgccttactcaatctctgttcctgggagcaccttttccaagctggcttcatggtttgctcagaattctcggggcggcacagttccagggaggggagctggcactgtctgcattcttagtgctagtatttctgtggctgcacagcttacgaagactcttcgagtgcctctacgtcagtgtcttctccaatgtcatgattcacgtcgtgcagtactgttttggacttgtctattatgtccttgttggcctaactgtgctgagccaagtgccaatggatggcaggaatgcctacataacagggaaaaatctattgatgcaagcacggtggttccatattcttgggatgatgatgttcatctggtcatctgcccatcagtataagtgccatgttattctcggcaatctcaggaaaaataaagcaggagtggtcattcactgtaaccacaggatcccatttggagactggtttgaatatgtttcttcccctaactacttagcagagctgatgatctacgtttccatggccgtcacctttgggttccacaacttaacttggtggctagtggtgacaaatgtcttctttaatcaggccctgtctgcctttctcagccaccaattctacaaaagcaaatttgtctcttacccgaagcataggaaagctttcctaccatttttgttttaagttaacctcagtcatgaagaatgcaaaccaggtgatggtttcaatgcctaaggacagtgaagtctggagcccaaagtacagtttcagcaaagctgtttgaaactctccattccatttctataccccacaagttttcactgaatgagcatggcagtgccactcaagaaaatgaatctccaaagtatcttcaaagaataaatactaatggcagatctgcga

SEQ ID NO: 419987 - DNA, 1930 bp, Homo sapiens
  misc_feature (2)..(2): n is a, c, g, or t
  misc_feature (4)..(4): n is a, c, g, or t
gncncgaggctgagaccggtgcgccgcgcgctagtggccgctcttccgcgggctagcgggcggtgggggcgccagcagcgcggaaggcgggcacgcgggccatggctccctgggcggaggccgagcactcggcgctgaacccgctgcgcgcggtgtggctcacgctgaccgccgccttcctgctgaccctactgctgcagctcctgccgcccggcctgctcccgggctgcgcgatcttccaggacctgatccgctatgggaaaaccaagtgtggggagccgtcgcgccccgccgcctgccgagcctttgatgtccccaagagatatttttcccacttttatatcatctcagtgctgtggaatggcttcctgctttggtgccttactcaatctctgttcctgggagcaccttttccaagctggcttcatggtttgctcagaattctcggggcggcacagttccagggaggggagctggcactgtctgcattcttagtgctagtatttctgtggctgcacagcttacgaagactcttcgagtgcctctacgtcagtgtcttctccaatgtcatgattcacgtcgtgcagtactgttttggacttgtctattatgtccttgttggcctaactgtgctgagccaagtgccaatggatggcaggaatgcctacataacagggaaaaatctattgatgcaagcacggtggttccatattcttgggatgatgatgttcatctggtcatctgcccatcagtataagtgccatgttattctcggcaatctcaggaaaaataaagcaggagtggtcattcactgtaaccacaggatcccatttggagactggtttgaatatgtttcttcccctaactacttagcagagctgatgatctacgtttccatggccgtcacctttgggttccacaacttaacttggtggctagtggtgacaaatgtcttctttaatcaggccctgtctgcctttctcagccaccaattctacaaaagcaaatttgtctcttacccgaagcataggaaagctttcctaccatttttgttttaagttaacctcagtcatgaagaatgcaaaccaggtgatggtttcaatgcctaaggacagtgaagtctggagcccaaagtacagtttcagcaaagctgtttgaaactctccattccatttctataccccacaagttttcactgaatgagcatggcagtgccactcaagaaaatgaatctccaaagtatcttcaaagaataaatactaatggcagatctgcgatttctgggtccactttctgagatgctttctaaaaccaaccaactgataaaaagtagatgagacttctccaagctgcttcacaagcaaactaaccgaaaaactgaaaatatacaaacagcttcacacacacacacacacacacacacacacacacacacacaaaggaagatcatcaatggctgcggtagcctagtaggaatggactatataataatatagcaggtgctcaataactgtttgttgcatttcagtaaaagcagaataacctttcaaaataataacaggctggtctcaaactcctgacctcaggtgatccacctgcttcggcctcccaaagtgctgggattacaggtgtaagtcactgctcccggatgcatgtcaagcacattggaaagttcttacaacaattctgatggaggattttctctcccatcaaccaaacaccacttaagattaacctgtggctcagtctacttaaataaatgccatatttattttacttatcatttagaatttgccattctcaggaacaaaactttttgtacattggaaatggaaaacattgcagtttggtcttaatttccacatgaatatcaagtgtaatttttaataaattatttggagaaaaatgtaaaaaaagtcgacgcggccgc

SEQ ID NO: 419988 - DNA, 397 bp, Homo sapiens
agagatagagtttcaccatgttggccaggctggtctcaaactcctgacctcaggtgatccacctgcttcggcctcccaaagtgctgggattacaggtgtaagtcactgctcccggatgcatgtcaagcacattggaaagttcttacaacaattctgatggaggattttctctcccatcaaccaaacaccacttaagattaacctgtggctcagtctacttaaataaatgccatatttattttacttatcatttagaatttgccattctcaggaacaaaactttttgtacattggaaatggaaaacattgcagtttggtcttaatttccacatgaatatcaagtgtaatttttaataaattatttggagaaaaatgtaaaaaaagtcgacgcggccgc

SEQ ID NO: 419989 - DNA, 716 bp, Homo sapiens
tacgaggcacactgttgtttgtttgaacatgatcctggcaacagtgtgatctgggccgtctctttgaggtgagtgaaacttgttcctcactgtggaatccgtatgtgtgttttcagaatgaaagtttttctcgtagatgtaatcatttggtttttatcttttcatgttatggaattgagaaccagaaatctcaagcagatttaagtcataaaatgccctttgagggtcagctaacccatccccttgttttaaggggaagaggcacagagctgttcggtcatcggcttggactcacacagccgggtggcgccacggctggctgctctggtctcctggccctcaatcccactgcccttttcattgtcactgtgacagcaggacagagatagatttggtggtttgattggctgactagaaagaatatttagtttcaagttttaaaactgttaagatgactaacatctgttttgggtttttttggtctcctttttggtttttttctcgcagggctttcagcaatcgtgagaccgtctagtataagacagagcacgaaaggcatttttactgctggcctgaagaagtcagtgatttatagttcactaaaactgcacaaaatgtggaaagggtggctgaggaaaacatcctgattttgcttgcttttatatatgttatgtgtagatgaataaagtgtttgatcctttttgacaaaaaaaaaa

SEQ ID NO: 419990 - DNA, 3378 bp, Homo sapiens
tacgaggcacactgttgtttgtttgaacatgatcctggcaacagtgtgatctgggccgtctctttgaggtgagtgaaacttgttcctcactgtggaatccgtatgtgtgttttcagaatgaaagtttttctcgtagatgtaatcatttggtttttatcttttcatgttatggaattgagaaccagaaatctcaagcagatttaagtcataaaatgccctttgagggtcagctaacccatccccttgttttaaggggaagaggcacagagctgttcggtcatcggcttggactcacacagccgggtggcgccacggctggctgctctggtctcctggccctcaatcccactgcccttttcattgtcactgtgacagcaggacagagatagatttggtggtttgattggctgactagaaagaatatttagtttcaagttttaaaactgttaagatgactaacatctgttttgggtttttttggtctcctttttggtttttttctcgcagggctttcagcaatcgtgagaccgtctagtataagacagagcacgaaaggcatttttactgctggtaagagctttggaaatccgtgtgtaacatacctgctgactgagtggcttccacactcttggttacagtgtaaagctttgtatcttttaggtgcttgtgaaatgctgagctttgatggccataaactgggatattgcagtaaggtacaaacaggcataacagcagcagaacctggtggtcgaacaatgtcagaccattggcagtgctgttggaagctttactgcccttctgaattttctgagacacttcctgtgtgcagggtttttccctcatattgttttatttatcaaagttacagatgcataggattgcaaaaacagcagcatctgtgctccccctcctcttccccttctctgagacaactgcttccatctgtcttagtgggttatttttgttgttactgccatttctctaaatggtaagttttcgttggtccttctctacgtttcaactttaggtatcatctattgacttctctctatgggaggttagaagtcaactctggcacccaccctcatcaaatgtacgcaccctcccatccctctgtcctcctaatatagttgtctggtggttttggctaattagttttcagtttgatggtatggtgagccacagagtacacctttccttccctgcataatgttcttctctcatggagagtgtcttcgctgtcccctctagggggtcccccatttactgtatctcatgtctttcacttgcttggtgcacactctcattttggtgaagcacattttccagtaatttcctgagaaggggaacatggaaggcacatttggagaccacgtatgtctgaaagtcttttttgtctgtcttcacccatagttaatacttaggctgggtattgattagaaatcactttcctttaaaattttgagatcattgctgcatttatcttttacttctaggattgttgtctatgtctaaagccaatctgattcttaatcctttgtgtatgttatttctggaagcatgttaggtctttatttttccccagtgctctgaattctctcagtgatgtgctttgatgtgagtctgtttttatctgttttatctgttttaccgggaattcattgccctttctgttgggaaactcagaatataagcatataagaaaaatgttttaaattttttctttaattttgtcccatctgttttctctgttctctttctggaactccttttattcagatattgcaccccctagattagtctttggttttctttcttttgtcttctattttttatctgtttttcttttgctctgctttggaagattttctcgaatttctcaactttagcttccaacccttctgttgagtgtttataatttccaggaactctctcttttcttgctgttctctgaatgctcctgttttttgcatcctattcttgttttatggcctaaatatttgacatctctttggaggacaaagtggctgtatcagttcatcgtcccacaagcagagtaggagaatactcttttcttcccattttttccaacatttggcatcatcaagtgatagacttttctagttcaggctttcttcatgcaagcatccattgagcatctctcatgtgccagctgctcgggatacaaaagtgaacacaacgctgcgttagtctgttctcatgctgctaataaagacatacctcagactgggtaatttataaaggaaagaggtttaattgattagcagttccacatggctgggggtgtctcagaatcatggcggaaggtgaatgaggagcaaaatcatgtcttacatggcggcaggcaagagagcatgtgcaggggagctcccttttatagaaccatcagatctcgtaacacttattcactattatgaaaacagcacaggaaagacctgccttcgtgattcaattacctcccaccaggtccctcccacgacgtggggattattacaattcagggtaagatttgggtgggaacacagagccaaaccatatcaaatgctatactgacttccagaggcgtataatttagaagggaaaagagacatgctaacagaaatttgcaagagagggagaaatagcacagaggtagcccaaaaaggggagtgatctttcaacctaattctaatccctgggtttgagattgctggggagctggtatggtcacacctctcagtgtctcatagcccagctgcttggatactcctctgagcatttggccctcaaggaccgtgttgccctcctgaatcactggaaagattcaacaaggccaggcatggtggctcacacttataatcccagcactttgggaggccagggcgggaggattgcttgggctcaagagttcaagaccagtctgggcaacacagcaagaccctgtctctttaaaaataacaaaaataggccagatgcggtggctcacacctataatcccagcactttgggaggccaaggcaggaggatcacttgagtcctggagtttgagatcagcctgggcaacatggtggaaccctgtctctaaaaaaatagaaaaaataggctggatgtggtgactcatgcctgtaatcctagtactttgggaggccgagacaggcagattgcccgagctcaggggtttgagaccagcctgggcaacatggtgaaaccccgtctctactaaaatacaaaaaattagctgggcgtggtggcacatgcctgtagtcccacctttgagcggctgaggcaggagaattgcttgaacctgggaggcggaagttgcagtgagccaagattgtgccactgcctccggcctgggcgagagtgagacttcgtctc

SEQ ID NO: 419991 - DNA, 2942 bp, Homo sapiens
acttaaatataagtttattctaactaatcccaatatgtggcctcaaaacataagtccataaatgtcatttctaagattattttacataaatactcaaatttgttgtcatttttgtagccaaagctaagtagaggatggggcctgtgaatttagaaccatcctagtgataaatatcaaatatttagataaaaacctaaatatttacccctctagctttatggagccattaaataataacatttttctccttctcttcatagagtttatagacaaaactagaaaattcaggtatttggtatatacttttttgttttttttgataccatcttggtcttgtcacccaggctgtagtgcagtggcgtgatctcggctcattgcaacctccgcttcccgggctcaagcgattcccctgtcccagcctcctaagtagctgggactacaggcacatgccaccacgcctggctaattttttgtatttttagtagagacggggtttcaccatgttggccaggttggtcttgatctcctgacctcatggtctgcccgcctcggcctccctaagtgttgggattatggctgtaagccatgtcatttcactctcttaatggtgtcttttggtgaaaagaagttcataatttcatgtagtccagtttatccattttgttttctatatgtttagcagttttttgtgtcctgtttagaaaatttttgcctattccaaaatcatgaaatttaagttctccacctctgttgaaattataatattaaggcagaaaagactcttcattctgatctgttggttcttagccttttgcaagtccaggatccctgtgaaaatctgactagaactctggacgccctgcacagaagtgcacctacgcacacacacagtagattttcctgcagtgttagggagttcacagacactcagacttaatctgtggaccccttgttagagaacccctcatctattccaacccagtcattttacagataaggaaattgaggcccagggaaaggccactgttagtttgtggcccacctggaactagagtccaggtctcttgactccgattctagtgctctttctaacagatttccctgctgcagtctttctgaaaatgtctcactggcagaaccatgaaagggagaatgttttagtcaagggagatttctgtccactagcagcaacaaaaaaaaaaaatggctacatggtgacactcttctactttatgtatttaccttaaatgtttaagatccaggaactgctttttgaagttgagctgggaattatcatggcccatgcatcctcctctagctgtgactcagtgccctggggttgctatatgaacctttccatgtataactacctgtattcggcttggtcttttggttggttctggctggaattttaaaaaccaccttatataataagcttctagtctcaatgctgaagtgggtggggtttaccagagtggttgctccagggagaaaattaaaaggggtggaggcagggaaaggaactctgagtttgttgactaggttatgttggtttgcaagtagtcagctggtagacaaacgaagccagagtgtctggaagtattcattaatgattttactgctcccctgccactgtctgcagtggtcttttccaaggctctaagtggactaagcagtttacaggtaacagggccagatattttcaagccatcactcaaaccccagtgctaggcatgtccagagcgaaacctgttaccttgtcggcatgctcaccaaagtgcactgccaggggtgtgcactttacactcatagcacagatcacagtttgtgtctcacagtgaaaaagactgttcatatctttgggccacaccctgaaacacaaactgaatgatcccaccctcaacacaaaggaagttgagtccataatcgcatccacagataggatactcttagatctgacaaataacacccatttattttattccctttttcttctttcccctaagcccccggagagcctttctccagtttcatcacacactcctgactaagtagatgggggtgctagggggccagctctccgaatgaggcacatttgtcttgtcatttcaaaagctttcacagagcacctgctgtgttctgggtcctgtactaggtgacagggccacctaggtgaacagggcaaggtccctgtcctcaggaagctcccagtccaggcagaggcgtgggtgaatcggcccacacgtactgcacagtgtgttgagtgagcacagatgctgtggggccaccctgtgggtccagggaagcacttcctagagaagaaatccaaacagggattccaagtcaacgaggcagaaagtgatgggaacagcatttgtcatagtcagacaggtgcctttcacagtgacatagagacagtgaggtggggttggaatttaggcctgagagaacggggacccagtggcatacagagtcttatccttgtcctacctttttgaaagagctaaattcagaggctgccaatatgttcataactcaaaaggatcacttatcccaataacttaggaaccgttggcatccatagccctaaatcggaaaatgccgaaatcagaatcatttccccctacattgatcacagtgacctttaatcaccttcagctccctggtctcctagagccacgggtcagcccctcactgccctcctccaaagacaagtctgctcagaatgtcactgaaactctgagcatccactcaacaagcctccatcttcttactttctcatcttttctcttttaggcctgaagaagtcagtgatttatagttcactaaaactgcacaaaatgtggaaagggtggctgaggaaaacatcctgattttgcttgcttttatatatgttatgtgtagatgaataaagtgtttgatcctttttgacaaaaaaaaaa

SEQ ID NO: 419992 - DNA, 535 bp, Homo sapiens
tactccacttctggaatttttcttcccaatgttctgcttctttcaggtgaaaattatctcagtgaacgaggatgtcactcttagatcagccctcgatagaaatctgaagagtgctgtgaccgctgctttcctcatgctccccgaaagcttttctgaagaagacctcttcatagagattgccggtctctcctattcagatgagaaaactgaggcccagaatggttccctgtctaaggtcactcatctggtacatggtggactagtttgaataccagctttctaaaggtgactttcggatggtggttggagaagataaaacaaaagtgttgaatattgtgaagcccaatatagcccactttcgagagctctatggcagcatactacaggaaaatcctcaagtggtgtataaaagccagcaaggctggctggaggtaactgtatgtggaaaatagcttgtattgtttctaagacaaaggctatttgcaggaagaaagtcaggggtagaacagcatgactggtgtgagaacatttatag

SEQ ID NO: 419993 - DNA, 1563 bp, Homo sapiens
gtgcgtgcgtggggcgtagcaagggaccgaggctctgcctgtgcgaccgccgcccacccgagcctatctgggctgcgtcttctcgccgctgctcttcgtggcccaacgccccaatccttgcgtgtgcttgcagtcccaccccacactcagccttgtgtccctcgatccagtctccgacttccatttcccaccctaaaccgcctacccggtgtctgttccccgcccggttgtcctcgccctgctgcgctgagtgtcccctgttagcctcgaccccatggcgctgcagacgctgcagagctcgtgggtgaccttccgcaagatcctgtctcacttccccgaggagctgagtctggctttcgtctacggctccggggtgtaccgccaggcagggcccagttcagaccagaagtcatatctgacggcagcttccagaacatgctggctcccatatccacagagcactttcctccaacacggctccctacccttccctgtgcttcccccagtgcttccagcaagtctgtttaattcacgtgtccttcaagactcagatttgtcatctctaggagaatttctccctcctgtgcccctgatctgatccctatgctgagtgcgaatgctatgctggactttgtgttcacagtagatgaccctgtcgcatggcattcaaagaacctgaagaaaaattggagtcactactctttcctaaaagttttagggcccaagattatcacgtccatccagaataactatggcgctggagtttactacaattcattgatcatgtgtaatggtaggcttatcaaatatggagttattagcactaacgttctgattgaagatctcctcaactggaataacttatacattgctggacgactccaaaaaccggtgaaaattatctcagtgaacgaggatgtcactcttagatcagccctcgatagaaatctgaagagtgctgtgaccgctgctttcctcatgctccccgaaagcttttctgaagaagacctcttcatagagattgccggtctctcctattcaggtgactttcggatggtggttggagaagataaaacaaaagtgttgaatattgtgaagcccaatatagcccactttcgagagctctatggcagcatactacaggaaaatcctcaagtggtgtataaaagccagcaaggctggctggagatagataaaagcccagaaggacagttcactcagctgatgacattgcccaaaaccttacagcaacagataaatcatattatggaccctcctggaaaaaacagagatgtggaagaaactttattccaagtggctcatgatcccgactgtggagatgtggtgcgactagggctttcagcaatcgtgagaccgtctagtataagacagagcacgaaaggcatttttactgctggcctgaagaagtcagtgatttatagttcactaaaactgcacaaaatgtggaaagggtggctgaggaaaacatcctgattttgcttgcttttatatatgttatgtgtagatgaataaagtgtttgatcctttttgacaaaaaaaaaa

SEQ ID NO: 419994 - DNA, 3540 bp, Homo sapiens
gtgcgtgcgtggggcgtagcaagggaccgaggctctgcctgtgcgaccgccgcccacccgagcctatctgggctgcgtcttctcgccgctgctcttcgtggcccaacgccccaatccttgcgtgtgcttgcagtcccaccccacactcagccttgtgtccctcgatccagtctccgacttccatttcccaccctaaaccgcctacccggtgtctgttccccgcccggttgtcctcgccctgctgcgctgagtgtcccctgttagcctcgaccccatggcgctgcagacgctgcagagctcgtgggtgaccttccgcaagatcctgtctcacttccccgaggagctgagtctggctttcgtctacggctccggggtgtaccgccaggcagggcccagttcagaccagaagaatgctatgctggactttgtgttcacagtagatgaccctgtcgcatggcattcaaagaacctgaagaaaaattggagtcactactctttcctaaaagttttagggcccaagattatcacgtccatccagaataactatggcgctggagtttactacaattcattgatcatgtgtaatggtaggcttatcaaatatggagttattagcactaacgttctgattgaagatctcctcaactggaataacttatacattgctggacgactccaaaaaccggtgaaaattatctcagtgaacgaggatgtcactcttagatcagccctcgatagaaatctgaagagtgctgtgaccgctgctttcctcatgctccccgaaagcttttctgaagaagacctcttcatagagattgccggtctctcctattcaggtgactttcggatggtggttggagaagataaaacaaaagtgttgaatattgtgaagcccaatatagcccactttcgagagctctatggcagcatactacaggaaaatcctcaagtggtgtataaaagccagcaaggctggctggagatagataaaagcccagaaggacagttcactcagctgatgacattgcccaaaaccttacagcaacagataaatcatattatggaccctcctggaaaaaacagagatgtggaagaaactttattccaagtggctcatgatcccgactgtggagatgtggtgcgactagggctttcagcaatcgtgagaccgtctagtataagacagagcacgaaaggcatttttactgctggtaagagctttggaaatccgtgtgtaacatacctgctgactgagtggcttccacactcttggttacagtgtaaagctttgtatcttttaggtgcttgtgaaatgctgagctttgatggccataaactgggatattgcagtaaggtacaaacaggcataacagcagcagaacctggtggtcgaacaatgtcagaccattggcagtgctgttggaagctttactgcccttctgaattttctgagacacttcctgtgtgcagggtttttccctcatattgttttatttatcaaagttacagatgcataggattgcaaaaacagcagcatctgtgctccccctcctcttccccttctctgagacaactgcttccatctgtcttagtgggttatttttgttgttactgccatttctctaaatggtaagttttcgttggtccttctctacgtttcaactttaggtatcatctattgacttctctctatgggaggttagaagtcaactctggcacccaccctcatcaaatgtacgcaccctcccatccctctgtcctcctaatatagttgtctggtggttttggctaattagttttcagtttgatggtatggtgagccacagagtacacctttccttccctgcataatgttcttctctcatggagagtgtcttcgctgtcccctctagggggtcccccatttactgtatctcatgtctttcacttgcttggtgcacactctcattttggtgaagcacattttccagtaatttcctgagaaggggaacatggaaggcacatttggagaccacgtatgtctgaaagtcttttttgtctgtcttcacccatagttaatacttaggctgggtattgattagaaatcactttcctttaaaattttgagatcattgctgcatttatcttttacttctaggattgttgtctatgtctaaagccaatctgattcttaatcctttgtgtatgttatttctggaagcatgttaggtctttatttttccccagtgctctgaattctctcagtgatgtgctttgatgtgagtctgtttttatctgttttatctgttttaccgggaattcattgccctttctgttgggaaactcagaatataagcatataagaaaaatgttttaaattttttctttaattttgtcccatctgttttctctgttctctttctggaactccttttattcagatattgcaccccctagattagtctttggttttctttcttttgtcttctattttttatctgtttttcttttgctctgctttggaagattttctcgaatttctcaactttagcttccaacccttctgttgagtgtttataatttccaggaactctctcttttcttgctgttctctgaatgctcctgttttttgcatcctattcttgttttatggcctaaatatttgacatctctttggaggacaaagtggctgtatcagttcatcgtcccacaagcagagtaggagaatactcttttcttcccattttttccaacatttggcatcatcaagtgatagacttttctagttcaggctttcttcatgcaagcatccattgagcatctctcatgtgccagctgctcgggatacaaaagtgaacacaacgctgcgttagtctgttctcatgctgctaataaagacatacctcagactgggtaatttataaaggaaagaggtttaattgattagcagttccacatggctgggggtgtctcagaatcatggcggaaggtgaatgaggagcaaaatcatgtcttacatggcggcaggcaagagagcatgtgcaggggagctcccttttatagaaccatcagatctcgtaacacttattcactattatgaaaacagcacaggaaagacctgccttcgtgattcaattacctcccaccaggtccctcccacgacgtggggattattacaattcagggtaagatttgggtgggaacacagagccaaaccatatcaaatgctatactgacttccagaggcgtataatttagaagggaaaagagacatgctaacagaaatttgcaagagagggagaaatagcacagaggtagcccaaaaaggggagtgatctttcaacctaattctaatccctgggtttgagattgctggggagctggtatggtcacacctctcagtgtctcatagcccagctgcttggatactcctctgagcagtgcccccttatcgagcatcgataaggggccaagccagacgagggacaggatatatgtacagggctgaactagcagagggtacaacttccaatggcccatatgagggtaccaactgagttg

SEQ ID NO: 419995 - DNA, 3211 bp, Homo sapiens
gtgcgtgcgtggggcgtagcaagggaccgaggctctgcctgtgcgaccgccgcccacccgagcctatctgggctgcgtcttctcgccgctgctcttcgtggcccaacgccccaatccttgcgtgtgcttgcagtcccaccccacactcagccttgtgtccctcgatccagtctccgacttccatttcccaccctaaaccgcctacccggtgtctgttccccgcccggttgtcctcgccctgctgcgctgagtgtcccctgttagcctcgaccccatggcgctgcagacgctgcagagctcgtgggtgaccttccgcaagatcctgtctcacttccccgaggagctgagtctggctttcgtctacggctccggggtgtaccgccaggcagggcccagttcagaccagaagaatgctatgctggactttgtgttcacagtagatgaccctgtcgcatggcattcaaagaacctgaagaaaaattggagtcactactctttcctaaaagttttagggcccaagattatcacgtccatccagaataactatggcgctggagtttactacaattcattgatcatgtgtaatggtaggcttatcaaatatggagttattagcactaacgttctgattgaagatctcctcaactggaataacttatacattgctggacgactccaaaaaccggtgaaaattatctcagtgaacgaggatgtcactcttagatcagccctcgatagaaatctgaagagtgctgtgaccgctgctttcctcatgctccccgaaagcttttctgaagaagacctcttcatagagattgccggtctctcctattcaggtgactttcggatggtggttggagaagataaaacaaaagtgttgaatattgtgaagcccaatatagcccactttcgagagctctatggcagcatactacaggaaaatcctcaagtggtgtataaaagccagcaaggctggctggagatagataaaagcccagaaggacagttcactcagctgatgacattgcccaaaaccttacagcaacagataaatcatattatggaccctcctggaaaaaacagagatgtggaagaaactttattccaagtggctcatgatcccgactgtggagatgtggtgcgactagggctttcagcaatcgtgagaccgtctagtataagacagagcacgaaaggcatttttactgctggtaagagctttggaaatccgtgtgtaacatacctgctgactgagtggcttccacactcttggttacagtgtaaagctttgtatcttttaggtgcttgtgaaatgctgagctttgatggccataaactgggatattgcagtaaggtacaaacaggcataacagcagcagaacctggtggtcgaacaatgtcagaccattggcagtgctgttggaagctttactgcccttctgaattttctgagacacttcctgtgtgcagggtttttccctcatattgttttatttatcaaagttacagatgcataggattgcaaaaacagcagcatctgtgctccccctcctcttccccttctctgagacaactgcttccatctgtcttagtgggttatttttgttgttactgccatttctctaaatggtaagttttcgttggtccttctctacgtttcaactttaggtatcatctattgacttctctctatgggaggttagaagtcaactctggcacccaccctcatcaaatgtacgcaccctcccatccctctgtcctcctaatatagttgtctggtggttttggctaattagttttcagtttgatggtatggtgagccacagagtacacctttccttccctgcataatgttcttctctcatggagagtgtcttcgctgtcccctctagggggtcccccatttactgtatctcatgtctttcacttgcttggtgcacactctcattttggtgaagcacattttccagtaatttcctgagaaggggaacatggaaggcacatttggagaccacgtatgtctgaaagtcttttttgtctgtcttcacccatagttaatacttaggctgggtattgattagaaatcactttcctttaaaattttgagatcattgctgcatttatcttttacttctaggattgttgtctatgtctaaagccaatctgattcttaatcctttgtgtatgttatttctggaagcatgttaggtctttatttttccccagtgctctgaattctctcagtgatgtgctttgatgtgagtctgtttttatctgttttatctgttttaccgggaattcattgccctttctgttgggaaactcagaatataagcatataagaaaaatgttttaaattttttctttaattttgtcccatctgttttctctgttctctttctggaactccttttattcagatattgcaccccctagattagtctttggttttctttcttttgtcttctattttttatctgtttttcttttgctctgctttggaagattttctcgaatttctcaactttagcttccaacccttctgttgagtgtttataatttccaggaactctctcttttcttgctgttctctgaatgctcctgttttttgcatcctattcttgttttatggcctaaatatttgacatctctttggaggacaaagtggctgtatcagttcatcgtcccacaagcagagtaggagaatactcttttcttcccattttttccaacatttggcatcatcaagtgatagacttttctagttcaggctttcttcatgcaagcatccattgagcatctctcatgtgccagctgctcgggatacaaaagtgaacacaacgctgcgttagtctgttctcatgctgctaataaagacatacctcagactgggcaacatggtggaaccctgtctctaaaaaaatagaaaaaataggctggatgtggtgactcatgcctgtaatcctagtactttgggaggccgagacaggcagattgcccgagctcaggggtttgagaccagcctgggcaacatggtgaaaccccgtctctactaaaatacaaaaaattagctgggcgtggtggcacatgcctgtagtcccacctttgagcggctgaggcaggagaattgcttgaacctgggaggcggaagttgcagtgagccaagattgtgccactgcctccggcctgggcgagagtgagacttcgtctc

SEQ ID NO: 419996 - DNA, 1044 bp, Homo sapiens
gtgcgtgcgtggggcgtagcaagggaccgaggctctgcctgtgcgaccgccgcccacccgagcctatctgggctgcgtcttctcgccgctgctcttcgtggcccaacgccccaatccttgcgtgtgcttgcagtcccaccccacactcagccttgtgtccctcgatccagtctccgacttccatttcccaccctaaaccgcctacccggtgtctgttccccgcccggttgtcctcgccctgctgcgctgagtgtcccctgttagcctcgaccccatggcgctgcagacgctgcagagctcgtgggtgaccttccgcaagatcctgtctcacttccccgaggagctgagtctggctttcgtctacggctccggggtgtaccgccaggcagggcccagttcagaccagaagaatgctatgctggactttgtgttcacagtagatgaccctgtcgcatggcattcaaagaacctgaagaaaaattggagtcactactctttcctaaaagttttagggcccaagattatcacgtccatccagaataactatggcgctggagtttactacaattcattgatcatgtgtaatggtaggcttatcaaatatggagttattagcactaacgttctgattgaagatctcctcaactggaataacttatacattgctggacgactccaaaaaccggtgaaaattatctcagtgaacgaggatgtcactcttagatcagccctcgatagaaatctgaagagtgctgtgaccgctgctttcctcatgctccccgaaagcttttctgaagaagacctcttcatagagattgccggtctctcctattcagaggttagtatggttgctgcccagatgttctacaagggagagatttatatttgaagactgcggatatcctgttctcactcggccctggagctgctacagtcttagttgtaaatcacgtcactcttgagtggttcctgcactaacctcgtgatttgcctccctacctcctgggtcccctctccacatctccatgcttattgtcccagggt

SEQ ID NO: 419997 - DNA, 299 bp, Homo sapiens
actgataaggaattatgcccatagtcacagagctagtaagagatggagttggcatttgaacacatctcttaactgcagtgcaatctttaaaagtaagaatctcagaacagactgaagctcttagtatttttttttttttttgagacagggtctcaactgtgtctttcaggctggagtgtagtgtcatgatcatggctcactgcaacccactgcagcctcaaccacctggactgaagctgtcttcctacctcaacctcctgagtatctgggaccacacatgtgcatcactgtgcctggct

SEQ ID NO: 419998 - DNA, 1294 bp, Homo sapiens
gtgcgtgcgtggggcgtagcaagggaccgaggctctgcctgtgcgaccgccgcccacccgagcctatctgggctgcgtcttctcgccgctgctcttcgtggcccaacgccccaatccttgcgtgtgcttgcagtcccaccccacactcagccttgtgtccctcgatccagtctccgacttccatttcccaccctaaaccgcctacccggtgtctgttccccgcccggttgtcctcgccctgctgcgctgagtgtcccctgttagcctcgaccccatggcgctgcagacgctgcagagctcgtgggtgaccttccgcaagatcctgtctcacttccccgaggagctgagtctggctttcgtctacggctccggggtgtaccgccaggcagggcccagttcagaccagaagaatgctatgctggactttgtgttcacagtagatgaccctgtcgcatggcattcaaagaacctgaagaaaaattggagtcactactctttcctaaaagttttagggcccaagattatcacgtccatccagaataactatggcgctggagtttactacaattcattgatcatgtgtaatggtaggcttatcaaatatggagttattagcactaacgttctgattgaagatctcctcaactggaataacttatacattgctggacgactccaaaaaccggtgaaaattatctcagtgaacgaggatgtcactcttagatcagccctcgatagaaatctgaagagtgctgtgaccgctgctttcctcatgctccccgaaagcttttctgaagaagacctcttcatagagattgccggtctctcctattcaggtgactttcggatggtggttggagaagataaaacaaaagtgttgaatattgtgaagcccaatatagcccactttcgagagctctatggcagcatactacaggaaaatcctcaagtggtgtataaaagccagcaaggctggctggagatagataaaagcccagaaggacagttcactcagctgatgacattgcccaaaaccttacagcaacagataaatcatattatggaccctcctggaaaaaacagagatgtggaagaaactttattccaagtggctcatgatcccgactgtggagatgtggtgcgactaggcctgaagaagtcagtgatttatagttcactaaaactgcacaaaatgtggaaagggtggctgaggaaaacatcctgattttgcttgcttttatatatgttatgtgtagatgaataaagtgtttgatcctttttgacaaaaaaaaaa

SEQ ID NO: 419999 - DNA, 1357 bp, Homo sapiens
gtgcgtgcgtggggcgtagcaagggaccgaggctctgcctgtgcgaccgccgcccacccgagcctatctgggctgcgtcttctcgccgctgctcttcgtggcccaacgccccaatccttgcgtgtgcttgcagtcccaccccacactcagccttgtgtccctcgatccagtctccgacttccatttcccaccctaaaccgcctacccggtgtctgttccccgcccggttgtcctcgccctgctgcgctgagtgtcccctgttagcctcgaccccatggcgctgcagacgctgcagagctcgtgggtgaccttccgcaagatcctgtctcacttccccgaggagctgagtctggctttcgtctacggctccggggtgtaccgccaggcagggcccagttcagaccagaagaatgctatgctggactttgtgttcacagtagatgaccctgtcgcatggcattcaaagaacctgaagaaaaattggagtcactactctttcctaaaagttttagggcccaagattatcacgtccatccagaataactatggcgctggagtttactacaattcattgatcatgtgtaatggtaggcttatcaaatatggagttattagcactaacgttctgattgaagatctcctcaactggaataacttatacattgctggacgactccaaaaaccggtgaaaattatctcagtgaacgaggatgtcactcttagatcagccctcgatagaaatctgaagagtgctgtgaccgctgctttcctcatgctccccgaaagcttttctgaagaagacctcttcatagagattgccggtctctcctattcaggtgactttcggatggtggttggagaagataaaacaaaagtgttgaatattgtgaagcccaatatagcccactttcgagagctctatggcagcatactacaggaaaatcctcaagtggtgtataaaagccagcaaggctggctggagatagataaaagcccagaaggacagttcactcagctgatgacattgcccaaaaccttacagcaacagataaatcatattatggaccctcctggaaaaaacagagatgtggaagaaactttattccaagtggctcatgatcccgactgtggagatgtggtgcgactagggctttcagcaatcgtgagaccgtctagtataagacagagcacgaaaggcatttttactgctggcctgaagaagtcagtgatttatagttcactaaaactgcacaaaatgtggaaagggtggctgaggaaaacatcctgattttgcttgcttttatatatgttatgtgtagatgaataaagtgtttgatcctttttgacaaaaaaaaaa

SEQ ID NO: 420000 - DNA, 1474 bp, Homo sapiens
gtgcgtgcgtggggcgtagcaagggaccgaggctctgcctgtgcgaccgccgcccacccgagcctatctgggctgcgtcttctcgccgctgctcttcgtggcccaacgccccaatccttgcgtgtgcttgcagtcccaccccacactcagccttgtgtccctcgatccagtctccgacttccatttcccaccctaaaccgcctacccggtgtctgttccccgcccggttgtcctcgccctgctgcgctgagtgtcccctgttagcctcgaccccatggcgctgcagacgctgcagagctcgtgggtgaccttccgcaagatcctgtctcacttccccgaggagctgagtctggctttcgtctacggctccggggtgtaccgccaggcagggcccagttcagaccagaagaatgctatgctggactttgtgttcacagtagatgaccctgtcgcatggcattcaaagaacctgaagaaaaattggagtcactactctttcctaaaagttttagggcccaagattatcacgtccatccagaataactatggcgctggagtttactacaattcattgatcatgtgtaatggtaggcttatcaaatatggagttattagcactaacgttctgattgaagatctcctcaactggaataacttatacattgctggacgactccaaaaaccggtgaaaattatctcagtgaacgaggatgtcactcttagatcagccctcgatagaaatctgaagagtgctgtgaccgctgctttcctcatgctccccgaaagcttttctgaagaagacctcttcatagagattgccggtctctcctattcaggtgactttcggatggtggttggagaagataaaacaaaagtgttgaatattgtgaagcccaatatagcccactttcgagagctctatggcagcatactacaggaaaatcctcaagtggtgtataaaagccagcaaggctggctggagatagataaaagcccagaaggacagttcactcagctgatgacattgcccaaaaccttacagcaacagataaatcatattatggaccctcctggaaaaaacagagatgtggaagaaactttattccaagtggctcatgatcccgactgtggagatgtggtgcgactaggtacgtttatgaatttgatgttgaggaaatgccagccatggggaaaagcagactttgtttgtgattggaatgtattatttcttcctttttgtttagcgagatagagagattgcctctcagaagaagaaagcactaaaaatttgagggttttctaaatctgcatttttatttgtttgaagtaagatggtgaaaatacttctgtttttaaattcctggatcctaaatcactgtcaaagggagaaacaatgtttcttttggttcctagagcacaacttctagaatttatttaaaagatgtgtctgtgttttgtggtggtctgagaaaaa

SEQ ID NO: 420001 - DNA, 1052 bp, Homo sapiens
gtgcgtgcgtggggcgtagcaagggaccgaggctctgcctgtgcgaccgccgcccacccgagcctatctgggctgcgtcttctcgccgctgctcttcgtggcccaacgccccaatccttgcgtgtgcttgcagtcccaccccacactcagccttgtgtccctcgatccagtctccgacttccatttcccaccctaaaccgcctacccggtgtctgttccccgcccggttgtcctcgccctgctgcgctgagtgtcccctgttagcctcgaccccatggcgctgcagacgctgcagagctcgtgggtgaccttccgcaagatcctgtctcacttccccgaggagctgagtctggctttcgtctacggctccggggtgtaccgccaggcagggcccagttcagaccagaagaatgctatgctggactttgtgttcacagtagatgaccctgtcgcatggcattcaaagaacctgaagaaaaattggagtcactactctttcctaaaagttttagggcccaagattatcacgtccatccagaataactatggcgctggagtttactacaattcattgatcatgtgtaatggtaggcttatcaaatatggagttattagcactaacgttctgattgaagatctcctcaactggaataacttatacattgctggacgactccaaaaaccggtgaaaattatctcagtgaacgaggatgtcactcttagatcagccctcgatagaaatctgaagagtgctgtgaccgctgctttcctcatgctccccgaaagcttttctgaagaagacctcttcatagagattgccggtctctcctattcagtatcagtgattcggatggtggtgggagatttacacgtgtgatttgtgagcatatagcatttgagagtcatggagcttaaggaattaggggttatagcgagtggtgaataaagccaagaagatcgtgagatgcaattagagatattggcccgaaagatggaatacggaacgggggagaaaagtaaagaggaaagttgtataaatctggctttgtcga

SEQ ID NO: 420002 - DNA, 895 bp, Homo sapiens
gtgcgtgcgtggggcgtagcaagggaccgaggctctgcctgtgcgaccgccgcccacccgagcctatctgggctgcgtcttctcgccgctgctcttcgtggcccaacgccccaatccttgcgtgtgcttgcagtcccaccccacactcagccttgtgtccctcgatccagtctccgacttccatttcccaccctaaaccgcctacccggtgtctgttccccgcccggttgtcctcgccctgctgcgctgagtgtcccctgttagcctcgaccccatggcgctgcagacgctgcagagctcgtgggtgaccttccgcaagatcctgtctcacttccccgaggagctgagtctggctttcgtctacggctccggggtgtaccgccaggcagggcccagttcagaccagaagaatgctatgctggactttgtgttcacagtagatgaccctgtcgcatggcattcaaagaacctgaagaaaaattggagtcactactctttcctaaaagttttagggcccaagattatcacgtccatccagaataactatggcgctggagtttactacaattcattgatcatgtgtaatggtaggcttatcaaatatggagttattagcactaacgttctgattgaagatctcctcaactggaataacttatacattgctggacgactccaaaaaccggctctctggcagtgtcccaagagttcactggcttttcactctgaacaacaaataacagtgctgctgagacaagttcctagttcacctttcattgaagaaccagatcagcacagtagcagaatcttccgaactgacatttttcctttgaggtctcaactgtgtctttcaggctggagtgtagtgtcatgatcatggctcactgcaacccac

SEQ ID NO: 420003 - DNA, 1063 bp, Homo sapiens
acaattcactgtgggtatttaaccatatttgcctttaattttgaacatacttaaggtttttagagttagaattaagacctttaaaattgtctcatgcatctcagttggctagacttataaccattaatattttgggattttgtcactacaaaaattcttagcatcaacttctattaataggatgaatcacattaatcagccatttatttgtcagtctccatagtaattatttaactcttctgtgtttaaagactaatgtgctttttactgacttgtacacacatttccacaggaggttgttcataaggagcttactaactgtggtttgcaccctaacactctggagcaacttagtcaaataccgttacttgggaaatcatctttacggaatgtggtgctgagagactacatttataattggagatcctgaacaccaaagtaagcctaaaaggaatctttgaggaaaaaagccttctagcaaggaaattcaagattcttgaagttgaaggaatatactgaaatgtttataaacataacttttactacagtagcatctaaggttttaaatgtgttttactattttcagattagatttttagatataaagatgaaaaactcagataactcaaatgagatatctatatccctacaacctaattgtatattgagcagaaactgaattaatatgcttccttgcaaatgggaaatcacatagcagttaccccatggcattgtgactaatggcatcagggcaaaaatatgttactttacgatttacctgttagcaggttcttgtttcataaaggtagaaaataaatacagacaacatctactgagctagttgattggtgatgcttctaccttaatatctttcctactgatttataattcctttattttcacatatactaaaactttttaaatgcatgttaattcagataaaaaggcattttgtattccacatagaatagtgttaagaattgtgaagtacactgagctgtcacggcaaagtagtatttaatgtgcttataggggtgtgtgtgtgtgtgtgtgtgtgtgtgtg

SEQ ID NO: 420004 - DNA, 369 bp, Homo sapiens
cgtctaacccggccctgccgtttaacccggccctaagaagagtgaaacagaatccaaatcagacataacataacaatgaaatggcagattcaggtataaaaaaggaaaaatacataatattcctcctacttacctctgagggcaaattgctgctgaaaacattatcatcatctttgttttcttcaccatttttctccacaggaacccattctccataaacactatccgcttcttttttccgatgttgagatccagatgatacagggaattcttttgttaatgttacctggctttttggtggagttggttttgctgcagcaatctaaaaaataaagtgtttcttaattaaagctcaatatgatatctaca

SEQ ID NO: 420005 - DNA, 2825 bp, Homo sapiens
gaatcacactcaggcagtctctctcctttctgaacagagatgagccctaagatacctggaagattttgtttttaacctcacattaaggaaagcacacatcaccttgaaagagctaaacttgacgtcctacagaatttctctaacttaacatgttgagtctctgagagtgcaaaacttgaaacaagagaaagtggcctgcctggcatcctctgcttattgaatggttttatttaattctcctttacattgccaccttaacaatccttccagctacgtatcttaaaggatgtgatggagaagttatcaactggtgttttcagacctcagttggatgaacccattccactgtatgaggcaaaagtttccatggaagctgttcagaaaaatcaaggaagaaaaaaggtagtgcacatcagcgccctggatcgcatactttccagaagcgtcgctgaacctggcgactggactctggccgaggacctggcagaagcgccagggcagggtcaccgctgggacagtgggcgttgacggccacccgggatcgccgctgcgggctgcgtctcgcgggctgcccactgcgcatgctccgctcggaaccggcgggggcggaggcggggccgcgtcgggggcgggagctcggcgaggcgccacgtcaggggcgggcccggcgcgcgcgggaagtctctgtagggcggccggctaccctcagccgccgcgcgtcatggccctttcggtgcccggctactcaccgggcttccgaaagccgcccgaggtagtgcggctccgacggaaaagggcccggagccgtggagctgccgcctccccgccccgtgagctgacggagccggcggcccgccgagccgccctggtggcggggctgcctcttcgccctttccctgctgcggggggcagaggcggtggcagcggcggcggcccggccgctgctcggaggaaccccttcgcccgcctggacaaccgaccgcgggtcgccgcggagccccccgacgggccggcccgcgagcagccggaggccccggtcccgtttttagattctaatcaagaaaatgatttgctatgggaagagaagtttcctgaaagaacaactgttactgaattacctcagacttcacatgtatcattctccgagcctgatattccgtcctcaaaaagtactgagttacctgtggactggagtattaaaacgcgactccttttcacctcttctcaaccctttacctgggcagatcatttgaaagcacaggaagaagctcaaggtcttgtccagcattgtagggcaacagaagttactttgcctaaaagtatacaggatcccaaactctcctctgagctccgttgtaccttccagcagagccttatctattggctccaccctgctttgtcttggctaccactgttccctcgtattggagctgatagaaaaatggctggaaagacaagtccttggtcaaatgatgcaaccctgcagcatgttttaatgagtgactggtctgtgagctttacttctctatataatttgctgaagacaaaactttgcccctatttctacgtttgtacctatcagtttactgtcctgttccgagcagcaggattagctggaagtgacttaatcacagctctcatatctccaacaactcgaggtttaagagaagctatgagaaatgaaggtattgaattttctctgcctttaataaaagaaagtggccataagaaggagacagcatctggaacaagcttgggatatggggaggagcaagccatcagtgatgaggatgaagaggaaagtttttcctggctggaagagatgggtgtgcaagataaaattaaaaagccagacatactttctatcaagctgcgtaaagagaaacatgaagtacaaatggatcacagacctgaatctgttgtgttggtaaaaggaatcaacacctttacattgctcaattttttgattaactctaagagtttagttgctacctcaggtccacaggcaggacttcctccaaccctcttgtcccctgttgctttccgaggtgccacaatgcaaatgcttaaggcacggagtgtgaatgtgaagacacaagctctttctggatacagagaccaatttagtttggagattacaggtcctatcatgcctcattctctgcattcactgaccatgctgctcaaatcttcacagagtggatctttctctgcagtactgtatccacacgagccaactgctgtatttaacatctgcctgcaaatggacaaagtacttgatatggaggttgttcataaggagcttactaactgtggtttgcaccctaacactctggagcaacttagtcaaataccgttacttgggaaatcatctttacggaatgtggtgctgagagactacatttataattggagatcctgaacaccaaagtaagcctaaaaggaatctttgaggaaaaaagccttctagcaaggaaattcaagattcttgaagttgaaggaatatactgaaatgtttataaacataacttttactacagtagcatctaaggttttaaatgtgttttactattttcagattagatttttagatataaagatgaaaaactcagataactcaaatgagatatctatatccctacaacctaattgtatattgagcagaaactgaattaatatgcttccttgcaaatgggaaatcacatagcagttaccccatggcattgtgactaatggcatcagggcaaaaatatgttactttacgatttacctgttagcaggttcttgtttcataaaggtagaaaataaatacagacaacatctac

SEQ ID NO: 420006 - DNA, 833 bp, Homo sapiens
acaattcactgtgggtatttaaccatatttgcctttaattttgaacatacttaaggtttttagagttagaattaagacctttaaaattgtctcatgcatctcagttggctagacttataaccattaatattttgggattttgtcactacaaaaattcttagcatcaacttctattaataggatgaatcacattaatcagccatttatttgtcagtctccatagtaattatttaactcttctgtgtttaaagactaatgtgctttttactgacttgtacacacatttccacaggaggttgttcataaggagcttactaactgtggtttgcaccctaacactctggagcaacttagtcaaataccgttacttgggaaatcatctttacggaatgtggtgctgagagactacatttataattggagatcctgaacaccaaagtaagcctaaaaggaatctttgaggaaaaaagccttctagcaaggaaattcaagattcttgaagttgaaggaatatactgaaatgtttataaacataacttttactacagtagcatctaaggttttaaatgtgttttactattttcagattagatttttagatataaagatgaaaaactcagataactcaaatgagatatctatatccctacaacctaattgtatattgagcagaaactgaattaatatgcttccttgcaaatgggaaatcacatagcagttaccccatggcattgtgactaatggcatcagggcaaaaatatgttactttacgatttacctgttagcaggttcttgtttcataaaggtagaaaataaatacagacaacatctac

SEQ ID NO: 420007 - DNA, 3055 bp, Homo sapiens
gaatcacactcaggcagtctctctcctttctgaacagagatgagccctaagatacctggaagattttgtttttaacctcacattaaggaaagcacacatcaccttgaaagagctaaacttgacgtcctacagaatttctctaacttaacatgttgagtctctgagagtgcaaaacttgaaacaagagaaagtggcctgcctggcatcctctgcttattgaatggttttatttaattctcctttacattgccaccttaacaatccttccagctacgtatcttaaaggatgtgatggagaagttatcaactggtgttttcagacctcagttggatgaacccattccactgtatgaggcaaaagtttccatggaagctgttcagaaaaatcaaggaagaaaaaaggtagtgcacatcagcgccctggatcgcatactttccagaagcgtcgctgaacctggcgactggactctggccgaggacctggcagaagcgccagggcagggtcaccgctgggacagtgggcgttgacggccacccgggatcgccgctgcgggctgcgtctcgcgggctgcccactgcgcatgctccgctcggaaccggcgggggcggaggcggggccgcgtcgggggcgggagctcggcgaggcgccacgtcaggggcgggcccggcgcgcgcgggaagtctctgtagggcggccggctaccctcagccgccgcgcgtcatggccctttcggtgcccggctactcaccgggcttccgaaagccgcccgaggtagtgcggctccgacggaaaagggcccggagccgtggagctgccgcctccccgccccgtgagctgacggagccggcggcccgccgagccgccctggtggcggggctgcctcttcgccctttccctgctgcggggggcagaggcggtggcagcggcggcggcccggccgctgctcggaggaaccccttcgcccgcctggacaaccgaccgcgggtcgccgcggagccccccgacgggccggcccgcgagcagccggaggccccggtcccgtttttagattctaatcaagaaaatgatttgctatgggaagagaagtttcctgaaagaacaactgttactgaattacctcagacttcacatgtatcattctccgagcctgatattccgtcctcaaaaagtactgagttacctgtggactggagtattaaaacgcgactccttttcacctcttctcaaccctttacctgggcagatcatttgaaagcacaggaagaagctcaaggtcttgtccagcattgtagggcaacagaagttactttgcctaaaagtatacaggatcccaaactctcctctgagctccgttgtaccttccagcagagccttatctattggctccaccctgctttgtcttggctaccactgttccctcgtattggagctgatagaaaaatggctggaaagacaagtccttggtcaaatgatgcaaccctgcagcatgttttaatgagtgactggtctgtgagctttacttctctatataatttgctgaagacaaaactttgcccctatttctacgtttgtacctatcagtttactgtcctgttccgagcagcaggattagctggaagtgacttaatcacagctctcatatctccaacaactcgaggtttaagagaagctatgagaaatgaaggtattgaattttctctgcctttaataaaagaaagtggccataagaaggagacagcatctggaacaagcttgggatatggggaggagcaagccatcagtgatgaggatgaagaggaaagtttttcctggctggaagagatgggtgtgcaagataaaattaaaaagccagacatactttctatcaagctgcgtaaagagaaacatgaagtacaaatggatcacagacctgaatctgttgtgttggtaaaaggaatcaacacctttacattgctcaattttttgattaactctaagagtttagttgctacctcaggtccacaggcaggacttcctccaaccctcttgtcccctgttgctttccgaggtgccacaatgcaaatgcttaaggcacggagtgtgaatgtgaagacacaagctctttctggatacagagaccaatttagtttggagattacaggtcctatcatgcctcattctctgcattcactgaccatgctgctcaaatcttcacagagtggatctttctctgcagtactgtatccacacgagccaactgctgtatttaacatctgcctgcaaatggacaaagtacttgatatggaggttgttcataaggagcttactaactgtggtttgcaccctaacactctggagcaacttagtcaaataccgttacttgggaaatcatctttacggaatgtggtgctgagagactacatttataattggagatcctgaacaccaaagtaagcctaaaaggaatctttgaggaaaaaagccttctagcaaggaaattcaagattcttgaagttgaaggaatatactgaaatgtttataaacataacttttactacagtagcatctaaggttttaaatgtgttttactattttcagattagatttttagatataaagatgaaaaactcagataactcaaatgagatatctatatccctacaacctaattgtatattgagcagaaactgaattaatatgcttccttgcaaatgggaaatcacatagcagttaccccatggcattgtgactaatggcatcagggcaaaaatatgttactttacgatttacctgttagcaggttcttgtttcataaaggtagaaaataaatacagacaacatctactgagctagttgattggtgatgcttctaccttaatatctttcctactgatttataattcctttattttcacatatactaaaactttttaaatgcatgttaattcagataaaaaggcattttgtattccacatagaatagtgttaagaattgtgaagtacactgagctgtcacggcaaagtagtatttaatgtgcttataggggtgtgtgtgtgtgtgtgtgtgtgtgtgtg

SEQ ID NO: 420008 - DNA, 2646 bp, Homo sapiens
gaatcacactcaggcagtctctctcctttctgaacagagatgagccctaagatacctggaagattttgtttttaacctcacattaaggaaagcacacatcaccttgaaagagctaaacttgacgtcctacagaatttctctaacttaacatgttgagtctctgagagtgcaaaacttgaaacaagagaaagtggcctgcctggcatcctctgcttattgaatggttttatttaattctcctttacattgccaccttaacaatccttccagctacgtatcttaaaggatgtgatggagaagttatcaactggtgttttcagacctcagttggatgaacccattccactgtatgaggcaaaagtttccatggaagctgttcagaaaaatcaaggaagaaaaaaggtagtgcacatcagcgccctggatcgcatactttccagaagcgtcgctgaacctggcgactggactctggccgaggacctggcagaagcgccagggcagggtcaccgctgggacagtgggcgttgacggccacccgggatcgccgctgcgggctgcgtctcgcgggctgcccactgcgcatgctccgctcggaaccggcgggggcggaggcggggccgcgtcgggggcgggagctcggcgaggcgccacgtcaggggcgggcccggcgcgcgcgggaagtctctgtagggcggccggctaccctcagccgccgcgcgtcatggccctttcggtgcccggctactcaccgggcttccgaaagccgcccgaggtagtgcggctccgacggaaaagggcccggagccgtggagctgccgcctccccgccccgtgagctgacggagccggcggcccgccgagccgccctggtggcggggctgcctcttcgccctttccctgctgcggggggcagaggcggtggcagcggcggcggcccggccgctgctcggaggaaccccttcgcccgcctggacaaccgaccgcgggtcgccgcggagccccccgacgggccggcccgcgagcagccggaggccccggtcccgtttttagattctaatcaagaaaatgatttgctatgggaagagaagtttcctgaaagaacaactgttactgaattacctcagacttcacatgtatcattctccgagcctgatattccgtcctcaaaaagtactgagttacctgtggactggagtattaaaacgcgactccttttcacctcttctcaaccctttacctgggcagatcatttgaaagcacaggaagaagctcaaggtcttgtccagcattgtagggcaacagaagttactttgcctaaaagtatacaggatcccaaactctcctctgagctccgttgtaccttccagcagagccttatctattggctccaccctgctttgtcttggctaccactgttccctcgtattggagctgatagaaaaatggctggaaagacaagtccttggtcaaatgatgcaaccctgcagcatgttttaatgagtgactggtattgaattttctctgcctttaataaaagaaagtggccataagaaggagacagcatctggaacaagcttgggatatggggaggagcaagccatcagtgatgaggatgaagaggaaagtttttcctggctggaagagatgggtgtgcaagataaaattaaaaagccagacatactttctatcaagctgcgtaaagagaaacatgaagtacaaatggatcacagacctgaatctgttgtgttggtaaaaggaatcaacacctttacattgctcaattttttgattaactctaagagtttagttgctacctcaggtccacaggcaggacttcctccaaccctcttgtcccctgttgctttccgaggtgccacaatgcaaatgcttaaggcacggagtgtgaatgtgaagacacaagctctttctggatacagagaccaatttagtttggagattacaggtcctatcatgcctcattctctgcattcactgaccatgctgctcaaatcttcacagagtggatctttctctgcagtactgtatccacacgagccaactgctgtatttaacatctgcctgcaaatggacaaagtacttgatatggaggttgttcataaggagcttactaactgtggtttgcaccctaacactctggagcaacttagtcaaataccgttacttgggaaatcatctttacggaatgtggtgctgagagactacatttataattggagatcctgaacaccaaagtaagcctaaaaggaatctttgaggaaaaaagccttctagcaaggaaattcaagattcttgaagttgaaggaatatactgaaatgtttataaacataacttttactacagtagcatctaaggttttaaatgtgttttactattttcagattagatttttagatataaagatgaaaaactcagataactcaaatgagatatctatatccctacaacctaattgtatattgagcagaaactgaattaatatgcttccttgcaaatgggaaatcacatagcagttaccccatggcattgtgactaatggcatcagggcaaaaatatgttactttacgatttacctgttagcaggttcttgtttcataaaggtagaaaataaatacagacaacatctac

SEQ ID NO: 420009 - DNA, 1656 bp, Homo sapiens
ttgtccaggcgggcgaaggggttcctccgagcagccggaggccccggtcccgtttttagattctaatcaagaaaatgatttgctatgggaagagaagtttcctgaaagaacaactgttactgaattacctcagacttcacatgtatcattctccgagcctgatattccgtcctcaaaaagtactgagttacctgtggactggagtattaaaacgcgactccttttcacctcttctcaaccctttacctgggcagatcatttgaaagcacaggaagaagctcaaggtcttgtccagcattgtagggcaacagaagttactttgcctaaaagtatacaggatcccaaactctcctctgagctccgttgtaccttccagcagagccttatctattggctccaccctgctttgtcttggctaccactgttccctcgtattggagctgatagaaaaatggctggaaagacaagtccttggtcaaatgatgcaaccctgcagcatgttttaatgagtgactggtattgaattttctctgcctttaataaaagaaagtggccataagaaggagacagcatctggaacaagcttgggatatggggaggagcaagccatcagtgatgaggatgaagaggaaagtttttcctggctggaagagatgggtgtgcaagataaaattaaaaagccagacatactttctatcaagctgcgtaaagagaaacatgaagtacaaatggatcacagacctgaatctgttgtgttggtaaaaggaatcaacacctttacattgctcaattttttgattaactctaagagtttagttgctacctcaggtccacaggcaggacttcctccaaccctcttgtcccctgttgctttccgaggtgccacaatgcaaatgcttaaggcacggagtgtgaatgtgaagacacaagctctttctggatacagagaccaatttagtttggagattacaggtcctatcatgcctcattctctgcattcactgaccatgctgctcaaatcttcacagagtggatctttctctgcagtactgtatccacacgagccaactgctgtatttaacatctgcctgcaaatggacaaagtacttgatatggaggttgttcataaggagcttactaactgtggtttgcaccctaacactctggagcaacttagtcaaataccgttacttgggaaatcatctttacggaatgtggtgctgagagactacatttataattggagatcctgaacaccaaagtaagcctaaaaggaatctttgaggaaaaaagccttctagcaaggaaattcaagattcttgaagttgaaggaatatactgaaatgtttataaacataacttttactacagtagcatctaaggttttaaatgtgttttactattttcagattagatttttagatataaagatgaaaaactcagataactcaaatgagatatctatatccctacaacctaattgtatattgagcagaaactgaattaatatgcttccttgcaaatgggaaatcacatagcagttaccccatggcattgtgactaatggcatcagggcaaaaatatgttactttacgatttacctgttagcaggttcttgtttcataaaggtagaaaataaatacagacaacatctac

SEQ ID NO: 420010 - DNA, 2783 bp, Homo sapiens
gaatcacactcaggcagtctctctcctttctgaacagagatgagccctaagatacctggaagattttgtttttaacctcacattaaggaaagcacacatcaccttgaaagagctaaacttgacgtcctacagaatttctctaacttaacatgttgagtctctgagagtgcaaaacttgaaacaagagaaagtggcctgcctggcatcctctgcttattgaatggttttatttaattctcctttacattgccaccttaacaatccttccagctacgtatcttaaaggatgtgatggagaagttatcaactggtgttttcagacctcagttggatgaacccattccactgtatgaggcaaaagtttccatggaagctgttcagaaaaatcaaggaagaaaaaaggtagtgcacatcagcgccctggatcgcatactttccagaagcgtcgctgaacctggcgactggactctggccgaggacctggcagaagcgccagggcagggtcaccgctgggacagtgggcgttgacggccacccgggatcgccgctgcgggctgcgtctcgcgggctgcccactgcgcatgctccgctcggaaccggcgggggcggaggcggggccgcgtcgggggcgggagctcggcgaggcgccacgtcaggggcgggcccggcgcgcgcgggaagtctctgtagggcggccggctaccctcagccgccgcgcgtcatggccctttcggtgcccggctactcaccgggcttccgaaagccgcccgaggtagtgcggctccgacggaaaagggcccggagccgtggagctgccgcctccccgccccgtgagctgacggagccggcggcccgccgagccgccctggtggcggggctgcctcttcgccctttccctgctgcggggggcagaggcggtggcagcggcggcggcccggccgctgctcggaggaaccccttcgcccgcctggacaaccgaccgcgggtcgccgcggagccccccgacgggccggcccgcgagcagccggaggccccggtcccgtttttagattctaatcaagaaaatgatttgctatgggaagagaagtttcctgaaagaacaactgttactgaattacctcagacttcacatgtatcattctccgagcctgatattccgtcctcaaaaagtactgagttacctgtggactggagtattaaaacgcgactccttttcacctcttctcaaccctttacctgggcagatcatttgaaagcacaggaagaagctcaaggtcttgtccagcattgtagggcaacagaagttactttgcctaaaagtatacagagccttatctattggctccaccctgctttgtcttggctaccactgttccctcgtattggagctgatagaaaaatggctggaaagacaagtccttggtcaaatgatgcaaccctgcagcatgttttaatgagtgactggtctgtgagctttacttctctatataatttgctgaagacaaaactttgcccctatttctacgtttgtacctatcagtttactgtcctgttccgagcagcaggattagctggaagtgacttaatcacagctctcatatctccaacaactcgaggtttaagagaagctatgagaaatgaaggtattgaattttctctgcctttaataaaagaaagtggccataagaaggagacagcatctggaacaagcttgggatatggggaggagcaagccatcagtgatgaggatgaagaggaaagtttttcctggctggaagagatgggtgtgcaagataaaattaaaaagccagacatactttctatcaagctgcgtaaagagaaacatgaagtacaaatggatcacagacctgaatctgttgtgttggtaaaaggaatcaacacctttacattgctcaattttttgattaactctaagagtttagttgctacctcaggtccacaggcaggacttcctccaaccctcttgtcccctgttgctttccgaggtgccacaatgcaaatgcttaaggcacggagtgtgaatgtgaagacacaagctctttctggatacagagaccaatttagtttggagattacaggtcctatcatgcctcattctctgcattcactgaccatgctgctcaaatcttcacagagtggatctttctctgcagtactgtatccacacgagccaactgctgtatttaacatctgcctgcaaatggacaaagtacttgatatggaggttgttcataaggagcttactaactgtggtttgcaccctaacactctggagcaacttagtcaaataccgttacttgggaaatcatctttacggaatgtggtgctgagagactacatttataattggagatcctgaacaccaaagtaagcctaaaaggaatctttgaggaaaaaagccttctagcaaggaaattcaagattcttgaagttgaaggaatatactgaaatgtttataaacataacttttactacagtagcatctaaggttttaaatgtgttttactattttcagattagatttttagatataaagatgaaaaactcagataactcaaatgagatatctatatccctacaacctaattgtatattgagcagaaactgaattaatatgcttccttgcaaatgggaaatcacatagcagttaccccatggcattgtgactaatggcatcagggcaaaaatatgttactttacgatttacctgttagcaggttcttgtttcataaaggtagaaaataaatacagacaacatctac

SEQ ID NO: 420011 - DNA, 2260 bp, Homo sapiens
gaatcacactcaggcagtctctctcctttctgaacagagatgagccctaagatacctggaagattttgtttttaacctcacattaaggaaagcacacatcaccttgaaagagctaaacttgacgtcctacagaatttctctaacttaacatgttgagtctctgagagtgcaaaacttgaaacaagagaaagtggcctgcctggcatcctctgcttattgaatggttttatttaattctcctttacattgccaccttaacaatccttccagctacgtatcttaaaggatgtgatggagaagttatcaactggtgttttcagacctcagttggatgaacccattccactgtatgaggcaaaagtttccatggaagctgttcagaaaaatcaaggaagaaaaaaggtagtgcacatcagcgccctggatcgcatactttccagaagcgtcgctgaacctggcgactggactctggccgaggacctggcagaagcgccagggcagggtcaccgctgggacagtgggcgttgacggccacccgggatcgccgctgcgggctgcgtctcgcgggctgcccactgcgcatgctccgctcggaaccggcgggggcggaggcggggccgcgtcgggggcgggagctcggcgaggcgccacgtcaggggcgggcccggcgcgcgcgggaagtctctgtagggcggccggctaccctcagccgccgcgcgtcatggccctttcggtgcccggctactcaccgggcttccgaaagccgcccgaggtagtgcggctccgacggaaaagggcccggagccgtggagctgccgcctccccgccccgtgagctgacggagccggcggcccgccgagccgccctggtggcggggctgcctcttcgccctttccctgctgcggggggcagaggcggtggcagcggcggcggcccggccgctgctcggaggaaccccttcgcccgcctggacaaccgaccgcgggtcgccgcggagccccccgacgggccggcccgcgagcagccggaggccccggtcccgtttttagattctaatcaagaaaatgatttgctatgggaagagaagtttcctgaaagaacaactgttactgaattacctcagacttcacatgtatcattctccgagcctgatattccgtcctcaaaaagtactgagttacctgtggactggagtattaaaacgcgactccttttcacctcttctcaaccctttacctgggcagatcatttgaaagcacaggaagaagctcaaggtcttgtccagcattgtagggcaacagaagttactttgcctaaaagtatacaggatcccaaactctcctctgagctccgttgtaccttccagcagagccttatctattggctccaccctgctttgtcttggctaccactgttccctcgtattggagctgatagaaaaatggctggaaagacaagtccttggtcaaatgatgcaaccctgcagcatgttttaatgagtgactggcacggagtgtgaatgtgaagacacaagctctttctggatacagagaccaatttagtttggagattacaggtcctatcatgcctcattctctgcattcactgaccatgctgctcaaatcttcacagagtggatctttctctgcagtactgtatccacacgagccaactgctgtatttaacatctgcctgcaaatggacaaagtacttgatatggaggttgttcataaggagcttactaactgtggtttgcaccctaacactctggagcaacttagtcaaataccgttacttgggaaatcatctttacggaatgtggtgctgagagactacatttataattggagatcctgaacaccaaagtaagcctaaaaggaatctttgaggaaaaaagccttctagcaaggaaattcaagattcttgaagttgaaggaatatactgaaatgtttataaacataacttttactacagtagcatctaaggttttaaatgtgttttactattttcagattagatttttagatataaagatgaaaaactcagataactcaaatgagatatctatatccctacaacctaattgtatattgagcagaaactgaattaatatgcttccttgcaaatgggaaatcacatagcagttaccccatggcattgtgactaatggcatcagggcaaaaatatgttactttacgatttacctgttagcaggttcttgtttcataaaggtagaaaataaatacagacaacatctac

SEQ ID NO: 420012 - DNA, 2525 bp, Homo sapiens
gaatcacactcaggcagtctctctcctttctgaacagagatgagccctaagatacctggaagattttgtttttaacctcacattaaggaaagcacacatcaccttgaaagagctaaacttgacgtcctacagaatttctctaacttaacatgttgagtctctgagagtgcaaaacttgaaacaagagaaagtggcctgcctggcatcctctgcttattgaatggttttatttaattctcctttacattgccaccttaacaatccttccagctacgtatcttaaaggatgtgatggagaagttatcaactggtgttttcagacctcagttggatgaacccattccactgtatgaggcaaaagtttccatggaagctgttcagaaaaatcaaggaagaaaaaaggtagtgcacatcagcgccctggatcgcatactttccagaagcgtcgctgaacctggcgactggactctggccgaggacctggcagaagcgccagggcagggtcaccgctgggacagtgggcgttgacggccacccgggatcgccgctgcgggctgcgtctcgcgggctgcccactgcgcatgctccgctcggaaccggcgggggcggaggcggggccgcgtcgggggcgggagctcggcgaggcgccacgtcaggggcgggcccggcgcgcgcgggaagtctctgtagggcggccggctaccctcagccgccgcgcgtcatggccctttcggtgcccggctactcaccgggcttccgaaagccgcccgaggtagtgcggctccgacggaaaagggcccggagccgtggagctgccgcctccccgccccgtgagctgacggagccggcggcccgccgagccgccctggtggcggggctgcctcttcgccctttccctgctgcggggggcagaggcggtggcagcggcggcggcccggccgctgctcggaggaaccccttcgcccgcctggacaaccgaccgcgggtcgccgcggagccccccgacgggccggcccgcgagcagccggaggccccggtcccgtttttagattctaatcaagaaaatgatttgctatgggaagagaagtttcctgaaagaacaactgttactgaattacctcagatcatttgaaagcacaggaagaagctcaaggtcttgtccagcattgtagggcaacagaagttactttgcctaaaagtatacaggatcccaaactctcctctgagctccgttgtaccttccagcagagccttatctattggctccaccctgctttgtcttggctaccactgttccctcgtattggagctgatagaaaaatggctggaaagacaagtccttggtcaaatgatgcaaccctgcagcatgttttaatgagtgactggtattgaattttctctgcctttaataaaagaaagtggccataagaaggagacagcatctggaacaagcttgggatatggggaggagcaagccatcagtgatgaggatgaagaggaaagtttttcctggctggaagagatgggtgtgcaagataaaattaaaaagccagacatactttctatcaagctgcgtaaagagaaacatgaagtacaaatggatcacagacctgaatctgttgtgttggtaaaaggaatcaacacctttacattgctcaattttttgattaactctaagagtttagttgctacctcaggtccacaggcaggacttcctccaaccctcttgtcccctgttgctttccgaggtgccacaatgcaaatgcttaaggcacggagtgtgaatgtgaagacacaagctctttctggatacagagaccaatttagtttggagattacaggtcctatcatgcctcattctctgcattcactgaccatgctgctcaaatcttcacagagtggatctttctctgcagtactgtatccacacgagccaactgctgtatttaacatctgcctgcaaatggacaaagtacttgatatggaggttgttcataaggagcttactaactgtggtttgcaccctaacactctggagcaacttagtcaaataccgttacttgggaaatcatctttacggaatgtggtgctgagagactacatttataattggagatcctgaacaccaaagtaagcctaaaaggaatctttgaggaaaaaagccttctagcaaggaaattcaagattcttgaagttgaaggaatatactgaaatgtttataaacataacttttactacagtagcatctaaggttttaaatgtgttttactattttcagattagatttttagatataaagatgaaaaactcagataactcaaatgagatatctatatccctacaacctaattgtatattgagcagaaactgaattaatatgcttccttgcaaatgggaaatcacatagcagttaccccatggcattgtgactaatggcatcagggcaaaaatatgttactttacgatttacctgttagcaggttcttgtttcataaaggtagaaaataaatacagacaacatctac

SEQ ID NO: 420013 - DNA, 2895 bp, Homo sapiens
gaatcacactcaggcagtctctctcctttctgaacagagatgagccctaagatacctggaagattttgtttttaacctcacattaaggaaagcacacatcaccttgaaagagctaaacttgacgtcctacagaatttctctaacttaacatgttgagtctctgagagtgcaaaacttgaaacaagagaaagtggcctgcctggcatcctctgcttattgaatggttttatttaattctcctttacattgccaccttaacaatccttccagctacgtatcttaaaggatgtgatggagaagttatcaactggtgttttcagacctcagttggatgaacccattccactgtatgaggcaaaagtttccatggaagctgttcagaaaaatcaaggaagaaaaaaggtagtgcacatcagcgccctggatcgcatactttccagaagcgtcgctgaacctggcgactggactctggccgaggacctggcagaagcgccagggcagggtcaccgctgggacagtgggcgttgacggccacccgggatcgccgctgcgggctgcgtctcgcgggctgcccactgcgcatgctccgctcggaaccggcgggggcggaggcggggccgcgtcgggggcgggagctcggcgaggcgccacgtcaggggcgggcccggcgcgcgcgggaagtctctgtagggcggccggctaccctcagccgccgcgcgtcatggccctttcggtgcccggctactcaccgggcttccgaaagccgcccgaggtagtgcggctccgacggaaaagggcccggagccgtggagctgccgcctccccgccccgtgagctgacggagccggcggcccgccgagccgccctggtggcggggctgcctcttcgccctttccctgctgcggggggcagaggcggtggcagcggcggcggcccggccgctgctcggaggaaccccttcgcccgcctggacaaccgaccgcgggtcgccgcggagccccccgacgggccggcccgcgagcagccggaggccccggtcccgtttttagattctaatcaagaaaatgatttgctatgggaagagaagtttcctgaaagaacaactgttactgaattacctcagacttcacatgtatcattctccgagcctgatattccgtcctcaaaaagtactgagttacctgtggactggagtattaaaacgcgactccttttcacctcttctcaaccctttacctgggcagatcatttgaaagcacaggaagaagctcaaggtcttgtccagcattgtagggcaacagaagttactttgcctaaaagtatacaggatcccaaactctcctctgagctccgttgtaccttccagcagagccttatctattggctccaccctgctttgtcttggctaccactgttccctcgtattggagctgatagaaaaatggctggaaagacaagtccttggtcaaatgatgcaaccctgcagcatgttttaatgagtgactggtctgtgagctttacttctctatataatttgctgaagacaaaactttgcccctatttctacgtttgtacctatcagtttactgtcctgttccgagcagcaggattagctggaagtgacttaatcacagctctcatatctccaacaactcgaggtttaagagaagctatgagaaatgaaggtattgaattttctctgcctttaataaaagaaagtggccataagaaggagacagcatctggaacaagcttgggatatggggaggagcaagccatcagtgatgaggatgaagaggaaagtttttcctggctggaagagatgggtgtgcaagataaaattaaaaagccagacatactttctatcaagctgcgtaaagagaaacatgaagtacaaatggatcacagacctgaatctgttgtgttggtaaaaggaatcaacacctttacattgctcaattttttgattaactctaagagtttagttgctacctcaggtccacaggcaggacttcctccaaccctcttgtcccctgttgctttccgaggtgccacaatgcaaatgcttaaggcacggagtgtgaatgtgaagacacaagctctttctggatacagagaccaatttagtttggagattacaggtcctatcatgcctcattctctgcattcactgaccatgctgctcaaatcttcacagagtggatctttctctgcagtactgtatccacacgagccaactgctgtatttaacatctgcctgcaaatggacaaagtacttgatatggaggttgttcataaggagcttactaactgtggtttgcaccctaacactctggagcaacttagtcaaataccgttacttgggaaatcatctttacggaatgtggtgctgagagactacatttataattggagatcctgaacaccaaacccatttttctcatcaaaacggctcccattcctccagttaccggggctgctcttaagaactgatcctatccaaagaaagaaaggatttatttgtagaattggaggtgtttactggaagatgatgatatggccaagccaaggaagggaacctacagtgaagagtacaggtgtctctgatctacatatccaagaactgcaagaaaaatgtccagatgggcatcagatacctagtccagtccttggcaaaagtctgggctttggaaaccaagggcaagaggcgatgacaactaatctatagaacccattctccataaacactatccgcttcttttttccgatgttgagatccagatgatacagggaattcttttgttaatgttacctggctttttggtggagttggttttgctgcagcaatctaaaaaataaagtgtttcttaattaaagctcaatatgatatctaca

SEQ ID NO: 420014 - DNA, 807 bp, Homo sapiens
gcaaaaggttgagagatgatcttaattttccttttctttacattttcatgaaggcacggagtgtgaatgtgaagacacaagctctttctggatacagagaccaatttagtttggagattacaggtcctatcatgcctcattctctgcattcactgaccatgctgctcaaatcttcacagagtggatctttctctgcagtactgtatccacacgagccaactgctgtatttaacatctgcctgcaaatggacaaagtacttgatatggaggttgttcataaggagcttactaactgtggtttgcaccctaacactctggagcaacttagtcaaataccgttacttgggaaatcatctttacggaatgtggtgctgagagactacatttataattggagatcctgaacaccaaagtaagcctaaaaggaatctttgaggaaaaaagccttctagcaaggaaattcaagattcttgaagttgaaggaatatactgaaatgtttataaacataacttttactacagtagcatctaaggttttaaatgtgttttactattttcagattagatttttagatataaagatgaaaaactcagataactcaaatgagatatctatatccctacaacctaattgtatattgagcagaaactgaattaatatgcttccttgcaaatgggaaatcacatagcagttaccccatggcattgtgactaatggcatcagggcaaaaatatgttactttacgatttacctgttagcaggttcttgtttcataaaggtagaaaataaatacagacaacatctac

SEQ ID NO: 420015 - DNA, 2198 bp, Homo sapiens
gaatcacactcaggcagtctctctcctttctgaacagagatgagccctaagatacctggaagattttgtttttaacctcacattaaggaaagcacacatcaccttgaaagagctaaacttgacgtcctacagaatttctctaacttaacatgttgagtctctgagagtgcaaaacttgaaacaagagaaagtggcctgcctggcatcctctgcttattgaatggttttatttaattctcctttacattgccaccttaacaatccttccagctacgtatcttaaaggatgtgatggagaagttatcaactggtgttttcagacctcagttggatgaacccattccactgtatgaggcaaaagtttccatggaagctgttcagaaaaatcaaggaagaaaaaaggtagtgcacatcagcgccctggatcgcatactttccagaagcgtcgctgaacctggcgactggactctggccgaggacctggcagaagcgccagggcagggtcaccgctgggacagtgggcgttgacggccacccgggatcgccgctgcgggctgcgtctcgcgggctgcccactgcgcatgctccgctcggaaccggcgggggcggaggcggggccgcgtcgggggcgggagctcggcgaggcgccacgtcaggggcgggcccggcgcgcgcgggaagtctctgtagggcggccggctaccctcagccgccgcgcgtcatggccctttcggtgcccggctactcaccgggcttccgaaagccgcccgaggtagtgcggctccgacggaaaagggcccggagccgtggagctgccgcctccccgccccgtgagctgacggagccggcggcccgccgagccgccctggtggcggggctgcctcttcgccctttccctgctgcggggggcagaggcggtggcagcggcggcggcccggccgctgctcggaggaaccccttcgcccgcctggacaaccgaccgcgggtcgccgcggagccccccgacgggccggcccgcgagcagccggaggccccggtcccgtttttagattctaatcaagaaaatgatttgctatgggaagagaagtttcctgaaagaacaactgttactgaattacctcagacttcacatgtatcattctccgagcctgatattccgtcctcaaaaagtactgagttacctgtggactggagtattaaaacgcgactccttttcacctcttctcaaccctttacctgggcagatcatttgaaagcacaggaagaagctcaaggtcttgtccagcattgtagggcaacagaagttactttgcctaaaagtatacaggatcccaaactctcctctgagctccgttgtaccttccagcagagccttatctattggctccaccctgctttgtcttggctaccactgttccctcgtattggagctgatagaaaaatggctggaaagacaagtccttggtcaaatgatgcaaccctgcagcatgttttaatgagtgactggtctgtgagctttacttctctatataatttgctgaagacaaaactttgcccctatttctacgtttgtacctatcagtttactgtcctgttccgagcagcaggattagctggaagtgacttaatcacagctctcatatctccaacaactcgaggtttaagagaagctatgagaaatgaaggtattgaattttctctgcctttaataaaagaaagtggccataagaaggagacagcatctggaacaagcttgggatatggggaggagcaagccatcagtgatgaggatgaagaggaaagtttttcctggctggaagagatgggtgtgcaagataaaattaaaaagccagacatactttctatcaagctgcgtaaagagaaacatgaagtacaaatggatcacagacctgaatctgttgtgttggtaaaaggaatcaacacctttacattgctcaattttttgattaactctaagagtttagttgctacctcaggtccacaggcaggacttcctccaaccctcttgtcccctgttgctttccgaggtgccacaatgcaaatgcttaaggtaataaaagtctgcataacctagcttttaagaagtactttactttgataggataaattcttgatttaaaaaaaaacctcctagcatttttacttggtacatattttcattttgctttcctcccatt

SEQ ID NO: 420016 - DNA, 808 bp, Homo sapiens
gcgctcccctggctaccccgctgcgggctgtgctcacgggacgcgttcccgaggaaagtgagggggccccagagggcagcgaggagccccttggagaggacttagaggtgacttggaaaagagctcgaaaaaccctgagagcccccatcttgcaaggacgctgttcgatggggcaggtgacaagccctgcttcccccgtgatttagggcctcccttctctcacgcactccaaattattctggagatgggggaatgtcgaggattcgtggggtcagaattcactagcatctgtcttacccaaagccttttggatctttcggtttgaaacgccggtccctgttcccctcaattttgatactaaagttcagacacaaaactgaagtgttgaaactcatagattggatggggtgcctctgaatttaggtgtacttgcgtttattgagaaacatgtatgccaggtgaggctctgtacatatttaacgcaaacttcagcatcctttaaattttaaaggagaatatatttaacctcagtttttagattctaatcaagaggtaatactttttaaatatcattagaatgtgtatttgtataaactttttttttataggatttgagcctatttttaaaaatacatttatacttctcagaagcattttgcttggaaagtagttttacagagaggcttgatcatctcaaccagggatgaaaataccgcatcagccaaggtaaaggagttggtttgatacagtaatgatgactgtaaagatagccagcgcactcttctttgggcagttgacttctccagtt

SEQ ID NO: 420017 - DNA, 870 bp, Homo sapiens
gcgctcccctggctaccccgctgcgggctgtgctcacgggacgcgttcccgaggaaagtgagggggccccagagggcagcgaggagccccttggagaggacttagaggtgacttggaaaagagctcgaaaaaccctgagagcccccatcttgcaaggacgctgttcgatggggcaggtgacaagccctgcttcccccgtgatttagggcctcccttctctcacgcactccaaattattctggagatgggggaatgtcgaggattcgtggggtcagaattcactagcatctgtcttacccaaagccttttggatctttcggtttgaaacgccggtccctgttcccctcaattttgatactaaagttcagacacaaaactgaagtgttgaaactcatagattggatggggtgcctctgaatttaggtgtacttgcgtttattgagaaacatgtatgccaggtgaggctctgtacatatttaacgcaaacttcagcatcctttaaattttaaaggagaatatatttaacctcagtttttagattctaatcaagaaaatgatttgctatgggaagagaagtttcctgaaagaacaactgttactgaattacctcagaggtaatactttttaaatatcattagaatgtgtatttgtataaactttttttttataggatttgagcctatttttaaaaatacatttatacttctcagaagcattttgcttggaaagtagttttacagagaggcttgatcatctcaaccagggatgaaaataccgcatcagccaaggtaaaggagttggtttgatacagtaatgatgactgtaaagatagccagcgcactcttctttgggcagttgacttctccagtt

SEQ ID NO: 420018 - DNA, 2135 bp, Homo sapiens
gcgctcccctggctaccccgctgcgggctgtgctcacgggacgcgttcccgaggaaagtgagggggccccagagggcagcgaggagccccttggagaggacttagaggtgacttggaaaagagctcgaaaaaccctgagagcccccatcttgcaaggacgctgttcgatggggcaggtgacaagccctgcttcccccgtgatttagggcctcccttctctcacgcactccaaattattctggagatgggggaatgtcgaggattcgtggggtcagaattcactagcatctgtcttacccaaagccttttggatctttcggtttgaaacgccggtccctgttcccctcaattttgatactaaagttcagacacaaaactgaagtgttgaaactcatagattggatggggtgcctctgaatttaggtgtacttgcgtttattgagaaacatgtatgccaggtgaggctctgtacatatttaacgcaaacttcagcatcctttaaattttaaaggagaatatatttaacctcagtttttagattctaatcaagaaaatgatttgctatgggaagagaagtttcctgaaagaacaactgttactgaattacctcagacttcacatgtatcattctccgagcctgatattccgtcctcaaaaagtactgagttacctgtggactggagtattaaaacgcgactccttttcacctcttctcaaccctttacctgggcagatcatttgaaagcacaggaagaagctcaaggtcttgtccagcattgtagggcaacagaagttactttgcctaaaagtatacaggatcccaaactctcctctgagctccgttgtaccttccagcagagccttatctattggctccaccctgctttgtcttggctaccactgttccctcgtattggagctgatagaaaaatggctggaaagacaagtccttggtcaaatgatgcaaccctgcagcatgttttaatgagtgactggtattgaattttctctgcctttaataaaagaaagtggccataagaaggagacagcatctggaacaagcttgggatatggggaggagcaagccatcagtgatgaggatgaagaggaaagtttttcctggctggaagagatgggtgtgcaagataaaattaaaaagccagacatactttctatcaagctgcgtaaagagaaacatgaagtacaaatggatcacagacctgaatctgttgtgttggtaaaaggaatcaacacctttacattgctcaattttttgattaactctaagagtttagttgctacctcaggtccacaggcaggacttcctccaaccctcttgtcccctgttgctttccgaggtgccacaatgcaaatgcttaaggcacggagtgtgaatgtgaagacacaagctctttctggatacagagaccaatttagtttggagattacaggtcctatcatgcctcattctctgcattcactgaccatgctgctcaaatcttcacagagtggatctttctctgcagtactgtatccacacgagccaactgctgtatttaacatctgcctgcaaatggacaaagtacttgatatggaggttgttcataaggagcttactaactgtggtttgcaccctaacactctggagcaacttagtcaaataccgttacttgggaaatcatctttacggaatgtggtgctgagagactacatttataattggagatcctgaacaccaaagtaagcctaaaaggaatctttgaggaaaaaagccttctagcaaggaaattcaagattcttgaagttgaaggaatatactgaaatgtttataaacataacttttactacagtagcatctaaggttttaaatgtgttttactattttcagattagatttttagatataaagatgaaaaactcagataactcaaatgagatatctatatccctacaacctaattgtatattgagcagaaactgaattaatatgcttccttgcaaatgggaaatcacatagcagttaccccatggcattgtgactaatggcatcagggcaaaaatatgttactttacgatttacctgttagcaggttcttgtttcataaaggtagaaaataaatacagacaacatctac

SEQ ID NO: 420019 - DNA, 2744 bp, Homo sapiens
gaatcacactcaggcagtctctctcctttctgaacagagatgagccctaagatacctggaagattttgtttttaacctcacattaaggaaagcacacatcaccttgaaagagctaaacttgacgtcctacagaatttctctaacttaacatgttgagtctctgagagtgcaaaacttgaaacaagagaaagtggcctgcctggcatcctctgcttattgaatggttttatttaattctcctttacattgccaccttaacaatccttccagctacgtatcttaaaggatgtgatggagaagttatcaactggtgttttcagacctcagttggatgaacccattccactgtatgaggcaaaagtttccatggaagctgttcagaaaaatcaaggaagaaaaaaggtagtgcacatcagcgccctggatcgcatactttccagaagcgtcgctgaacctggcgactggactctggccgaggacctggcagaagcgccagggcagggtcaccgctgggacagtgggcgttgacggccacccgggatcgccgctgcgggctgcgtctcgcgggctgcccactgcgcatgctccgctcggaaccggcgggggcggaggcggggccgcgtcgggggcgggagctcggcgaggcgccacgtcaggggcgggcccggcgcgcgcgggaagtctctgtagggcggccggctaccctcagccgccgcgcgtcatggccctttcggtgcccggctactcaccgggcttccgaaagccgcccgaggtagtgcggctccgacggaaaagggcccggagccgtggagctgccgcctccccgccccgtgagctgacggagccggcggcccgccgagccgccctggtggcggggctgcctcttcgccctttccctgctgcggggggcagaggcggtggcagcggcggcggcccggccgctgctcggaggaaccccttcgcccgcctggacaaccgaccgcgggtcgccgcggagccccccgacgggccggcccgcgagcagccggaggccccggtcccgacttcacatgtatcattctccgagcctgatattccgtcctcaaaaagtactgagttacctgtggactggagtattaaaacgcgactccttttcacctcttctcaaccctttacctgggcagatcatttgaaagcacaggaagaagctcaaggtcttgtccagcattgtagggcaacagaagttactttgcctaaaagtatacaggatcccaaactctcctctgagctccgttgtaccttccagcagagccttatctattggctccaccctgctttgtcttggctaccactgttccctcgtattggagctgatagaaaaatggctggaaagacaagtccttggtcaaatgatgcaaccctgcagcatgttttaatgagtgactggtctgtgagctttacttctctatataatttgctgaagacaaaactttgcccctatttctacgtttgtacctatcagtttactgtcctgttccgagcagcaggattagctggaagtgacttaatcacagctctcatatctccaacaactcgaggtttaagagaagctatgagaaatgaaggtattgaattttctctgcctttaataaaagaaagtggccataagaaggagacagcatctggaacaagcttgggatatggggaggagcaagccatcagtgatgaggatgaagaggaaagtttttcctggctggaagagatgggtgtgcaagataaaattaaaaagccagacatactttctatcaagctgcgtaaagagaaacatgaagtacaaatggatcacagacctgaatctgttgtgttggtaaaaggaatcaacacctttacattgctcaattttttgattaactctaagagtttagttgctacctcaggtccacaggcaggacttcctccaaccctcttgtcccctgttgctttccgaggtgccacaatgcaaatgcttaaggcacggagtgtgaatgtgaagacacaagctctttctggatacagagaccaatttagtttggagattacaggtcctatcatgcctcattctctgcattcactgaccatgctgctcaaatcttcacagagtggatctttctctgcagtactgtatccacacgagccaactgctgtatttaacatctgcctgcaaatggacaaagtacttgatatggaggttgttcataaggagcttactaactgtggtttgcaccctaacactctggagcaacttagtcaaataccgttacttgggaaatcatctttacggaatgtggtgctgagagactacatttataattggagatcctgaacaccaaagtaagcctaaaaggaatctttgaggaaaaaagccttctagcaaggaaattcaagattcttgaagttgaaggaatatactgaaatgtttataaacataacttttactacagtagcatctaaggttttaaatgtgttttactattttcagattagatttttagatataaagatgaaaaactcagataactcaaatgagatatctatatccctacaacctaattgtatattgagcagaaactgaattaatatgcttccttgcaaatgggaaatcacatagcagttaccccatggcattgtgactaatggcatcagggcaaaaatatgttactttacgatttacctgttagcaggttcttgtttcataaaggtagaaaataaatacagacaacatctac

SEQ ID NO: 420020 - DNA, 2564 bp, Homo sapiens
gaatcacactcaggcagtctctctcctttctgaacagagatgagccctaagatacctggaagattttgtttttaacctcacattaaggaaagcacacatcaccttgaaagagctaaacttgacgtcctacagaatttctctaacttaacatgttgagtctctgagagtgcaaaacttgaaacaagagaaagtggcctgcctggcatcctctgcttattgaatggttttatttaattctcctttacattgccaccttaacaatccttccagctacgtatcttaaaggatgtgatggagaagttatcaactggtgttttcagacctcagttggatgaacccattccactgtatgaggcaaaagtttccatggaagctgttcagaaaaatcaaggaagaaaaaaggtagtgcacatcagcgccctggatcgcatactttccagaagcgtcgctgaacctggcgactggactctggccgaggacctggcagaagcgccagggcagggtcaccgctgggacagtgggcgttgacggccacccgggatcgccgctgcgggctgcgtctcgcgggctgcccactgcgcatgctccgctcggaaccggcgggggcggaggcggggccgcgtcgggggcgggagctcggcgaggcgccacgtcaggggcgggcccggcgcgcgcgggaagtctctgtagggcggccggctaccctcagccgccgcgcgtcatggccctttcggtgcccggctactcaccgggcttccgaaagccgcccgaggtagtgcggctccgacggaaaagggcccggagccgtggagctgccgcctccccgccccgtgagctgacggagccggcggcccgccgagccgccctggtggcggggctgcctcttcgccctttccctgctgcggggggcagaggcggtggcagcggcggcggcccggccgctgctcggaggaaccccttcgcccgcctggacaaccgaccgcgggtcgccgcggagccccccgacgggccggcccgcgagcagccggaggccccggtcccgtttttagattctaatcaagaaaatgatttgctatgggaagagaagtttcctgaaagaacaactgttactgaattacctcagacttcacatgtatcattctccgagcctgatattccgtcctcaaaaagtactgagttacctgtggactggagtattaaaacgcgactccttttcacctcttctcaaccctttacctgggcagatcatttgaaagcacaggaagaagctcaaggtcttgtccagcattgtagggcaacagaagttactttgcctaaaagtatacaggatcccaaactctcctctgagctccgttgtaccttccagcagagccttatctattggctccaccctgctttgtcttggctaccactgttccctcgtattggagctgatagaaaaatggctggaaagacaagtccttggtcaaatgatgcaaccctgcagcatgttttaatgagtgactgggagcaagccatcagtgatgaggatgaagaggaaagtttttcctggctggaagagatgggtgtgcaagataaaattaaaaagccagacatactttctatcaagctgcgtaaagagaaacatgaagtacaaatggatcacagacctgaatctgttgtgttggtaaaaggaatcaacacctttacattgctcaattttttgattaactctaagagtttagttgctacctcaggtccacaggcaggacttcctccaaccctcttgtcccctgttgctttccgaggtgccacaatgcaaatgcttaaggcacggagtgtgaatgtgaagacacaagctctttctggatacagagaccaatttagtttggagattacaggtcctatcatgcctcattctctgcattcactgaccatgctgctcaaatcttcacagagtggatctttctctgcagtactgtatccacacgagccaactgctgtatttaacatctgcctgcaaatggacaaagtacttgatatggaggttgttcataaggagcttactaactgtggtttgcaccctaacactctggagcaacttagtcaaataccgttacttgggaaatcatctttacggaatgtggtgctgagagactacatttataattggagatcctgaacaccaaagtaagcctaaaaggaatctttgaggaaaaaagccttctagcaaggaaattcaagattcttgaagttgaaggaatatactgaaatgtttataaacataacttttactacagtagcatctaaggttttaaatgtgttttactattttcagattagatttttagatataaagatgaaaaactcagataactcaaatgagatatctatatccctacaacctaattgtatattgagcagaaactgaattaatatgcttccttgcaaatgggaaatcacatagcagttaccccatggcattgtgactaatggcatcagggcaaaaatatgttactttacgatttacctgttagcaggttcttgtttcataaaggtagaaaataaatacagacaacatctac

SEQ ID NO: 420021 - DNA, 3714 bp, Homo sapiens
  misc_feature (3190)..(3190): n is a, c, g, or t
  misc_feature (3247)..(3247): n is a, c, g, or t
gaatcacactcaggcagtctctctcctttctgaacagagatgagccctaagatacctggaagattttgtttttaacctcacattaaggaaagcacacatcaccttgaaagagctaaacttgacgtcctacagaatttctctaacttaacatgttgagtctctgagagtgcaaaacttgaaacaagagaaagtggcctgcctggcatcctctgcttattgaatggttttatttaattctcctttacattgccaccttaacaatccttccagctacgtatcttaaaggatgtgatggagaagttatcaactggtgttttcagacctcagttggatgaacccattccactgtatgaggcaaaagtttccatggaagctgttcagaaaaatcaaggaagaaaaaaggtagtgcacatcagcgccctggatcgcatactttccagaagcgtcgctgaacctggcgactggactctggccgaggacctggcagaagcgccagggcagggtcaccgctgggacagtgggcgttgacggccacccgggatcgccgctgcgggctgcgtctcgcgggctgcccactgcgcatgctccgctcggaaccggcgggggcggaggcggggccgcgtcgggggcgggagctcggcgaggcgccacgtcaggggcgggcccggcgcgcgcgggaagtctctgtagggcggccggctaccctcagccgccgcgcgtcatggccctttcggtgcccggctactcaccgggcttccgaaagccgcccgaggtagtgcggctccgacggaaaagggcccggagccgtggagctgccgcctccccgccccgtgagctgacggagccggcggcccgccgagccgccctggtggcggggctgcctcttcgccctttccctgctgcggggggcagaggcggtggcagcggcggcggcccggccgctgctcggaggaaccccttcgcccgcctggacaaccgaccgcgggtcgccgcggagccccccgacgggccggcccgcgagcagccggaggccccggtcccgtttttagattctaatcaagaaaatgatttgctatgggaagagaagtttcctgaaagaacaactgttactgaattacctcagacttcacatgtatcattctccgagcctgatattccgtcctcaaaaagtactgagttacctgtggactggagtattaaaacgcgactccttttcacctcttctcaaccctttacctgggcagatcatttgaaagcacaggaagaagctcaaggtcttgtccagcattgtagggcaacagaagttactttgcctaaaagtatacaggatcccaaactctcctctgagctccgttgtaccttccagcagagccttatctattggctccaccctgctttgtcttggctaccactgttccctcgtattggagctgatagaaaaatggctggaaagacaagtccttggtcaaatgatgcaaccctgcagcatgttttaatgagtgactggtctgtgagctttacttctctatataatttgctgaagacaaaactttgcccctatttctacgtttgtacctatcagtttactgtcctgttccgagcagcaggattagctggaagtgacttaatcacagctctcatatctccaacaactcgaggtttaagagaagctatgagaaatgaaggtattgaattttctctgcctttaataaaagaaagtggccataagaaggagacagcatctggaacaagcttgggatatggggaggagcaagccatcagtgatgaggatgaagaggaaagtttttcctggctggaagagatgggtgtgcaagataaaattaaaaagccagacatactttctatcaagctgcgtaaagagaaacatgaagtacaaatggatcacagacctgaatctgttgtgttggtaaaaggaatcaacacctttacattgctcaattttttgattaactctaagagtttagttgctacctcaggtccacaggcaggacttcctccaaccctcttgtcccctgttgctttccgaggtgccacaatgcaaatgcttaaggcacggagtgtgaatgtgaagacacaagctctttctggatacagagaccaatttagtttggagattacaggtcctatcatgcctcattctctgcattcactgaccatgctgctcaaatcttcacagagtggatctttctctgcagtactgtatccacacgagccaactgctgtatttaacatctgcctgcaaatggacaaagtacttgatatggaggttgttcataaggagcttactaactgtggtttgcaccctaacactctggagcaacttagtcaaataccgttacttgggaaatcatctttacggaatgtggtgctgagagactacatttataattggagatcctgaacaccaaagtaagcctaaaaggaatctttgaggaaaaaagccttctagcaaggaaattcaagattcttgaagttgaaggaatatactgaaatgtttataaacataacttttactacagtaaaaaaaaaaaaaaaaaaaaaaaaaaaaaaaaagagagagagagagagagaagagagagaaagaaaaaaaaaaaagagaaaagaaaaaaaaaaagaaaaaagaaagaaaagaaaaaaaaagagagagagagagagacgaaaagaagagagagagagcgagaaagcgcgagagaaagaagacgaacgaaaagaaaaagaacacacaaaacaaaacaacacacgacagaaacacaccgcacacacaggagacaccacaaaaataaacgcaaacaaaagcggaaaaaaaacaggagccagaactagcagaggcaacacaacaaacaaaaaaagcacacaaaaaaaactgacctagatatgtagcattaatgcattttctacttaccagaattttacaaactctgatgttatcaacattgaaatggccggaatcaggaaaaatagatactgttaagaaaatgagacatatcaaaagattattttgggacaacagagaaagtatctagtcatgttaaaggtatttttattttggatcttttcatttactgatatttacttaccgcatgcctgagcaataagcttggccagaaatacttcattaccatattgtttactcattatggaggtacgaagtagagatgagacttcatcnatatctcgaaggttttttgcagaacaacataccaaattaggaagaatctcatgagcntttctgcaggctatttcataaccttctatgacctctgaaactgacaggccaatcctcagaagttcttcaggctaattccaggagagctccagcaaataccagaacaaagtttgtgccatctccaacttctggctcttgcatatgagaagccattacaatcatttttgcagcaggatgctgtacttctagttctctttatatagttgctgcatcgtttgtcacaaacaacttctccaagtggttgataaccattttgttcattccatttggtccatatgctgtacgagtggtttgggcaagctccttgcaagcttgtatgtttctatacacagcctcttctaatcctgaaaagtgtttcgctccctccttgagcatctgggcaaagcccaggagccttgggaacgtgaagcagccatggccagcctgcaggaagcagttcacgcgaccgctcggacccacgcgtcacg

SEQ ID NO: 420022 - DNA, 2887 bp, Homo sapiens
gaatcacactcaggcagtctctctcctttctgaacagagatgagccctaagatacctggaagattttgtttttaacctcacattaaggaaagcacacatcaccttgaaagagctaaacttgacgtcctacagaatttctctaacttaacatgttgagtctctgagagtgcaaaacttgaaacaagagaaagtggcctgcctggcatcctctgcttattgaatggttttatttaattctcctttacattgccaccttaacaatccttccagctacgtatcttaaaggatgtgatggagaagttatcaactggtgttttcagacctcagttggatgaacccattccactgtatgaggcaaaagtttccatggaagctgttcagaaaaatcaaggaagaaaaaaggtagtgcacatcagcgccctggatcgcatactttccagaagcgtcgctgaacctggcgactggactctggccgaggacctggcagaagcgccagggcagggtcaccgctgggacagtgggcgttgacggccacccgggatcgccgctgcgggctgcgtctcgcgggctgcccactgcgcatgctccgctcggaaccggcgggggcggaggcggggccgcgtcgggggcgggagctcggcgaggcgccacgtcaggggcgggcccggcgcgcgcgggaagtctctgtagggcggccggctaccctcagccgccgcgcgtcatggccctttcggtgcccggctactcaccgggcttccgaaagccgcccgaggtagtgcggctccgacggaaaagggcccggagccgtggagctgccgcctccccgccccgtgagctgacggagccggcggcccgccgagccgccctggtggcggggctgcctcttcgccctttccctgctgcggggggcagaggcggtggcagcggcggcggcccggccgctgctcggaggaaccccttcgcccgcctggacaaccgaccgcgggtcgccgcggagccccccgacgggccggcccgcgagcagccggaggccccggtcccgtttttagattctaatcaagaaaatgatttgctatgggaagagaagtttcctgaaagaacaactgttactgaattacctcagacttcacatgtatcattctccgagcctgatattccgtcctcaaaaagtactgagttacctgtggactggagtattaaaacgcgactccttttcacctcttctcaaccctttacctgggcagatcatttgaaagcacaggaagaagctcaaggtcttgtccagcattgtagggcaacagaagttactttgcctaaaagtatacaggatcccaaactctcctctgagctccgttgtaccttccagcagagccttatctattggctccaccctgctttgtcttggctaccactgttccctcgtattggagctgatagaaaaatggctggaaagacaagtccttggtcaaatgatgcaaccctgcagcatgttttaatgagtgactggtctgtgagctttacttctctatataatttgctgaagacaaaactttgcccctatttctacgtttgtacctatcagtttactgtcctgttccgagcagcaggattagctggaagtgacttaatcacagctctcatatctccaacaactcgaggtttaagagaagctatgagaaatgaaggtattgaattttctctgcctttaataaaagaaagtggccataagaaggagacagcatctggaacaagcttgggatatggggaggagcaagccatcagtgatgaggatgaagaggaaagtttttcctggctggaagagatgggtgtgcaagataaaattaaaaagccagacatactttctatcaagctgcgtaaagagaaacatgaagtacaaatggatcacagacctgaatctgttgtgttggtaaaaggaatcaacacctttacattgctcaattttttgattaactctaagagtttagttgctacctcaggtccacaggcaggacttcctccaaccctcttgtcccctgttgctttccgaggtgccacaatgcaaatgcttaaggcacggagtgtgaatgtgaagacacaagctctttctggatacagagaccaatttagtttggagattacaggtcctatcatgcctcattctctgcattcactgaccatgctgctcaaatcttcacagagtggatctttctctgcagtactgtatccacacgagccaactgctgtatttaacatctgcctgcaaatggacaaagtacttgatatggaggttgttcataaggagcttactaactgtggtttgcaccctaacactctggagcaacttagtcaaataccgttacttgggaaatcatctttacggaatgtggtgctgagagactacatttataattggagatcctgaacaccaaaatctccatcaaagcagacacaggatgtttgcctgcaggggggagaaatacccagttttaaattatttccaccaacttctgcaacaaataatgaattcaaggtgggattagggtaagaggaaattcaaaaacgtgctctcacctgacagatctttcattgcagcagagaagttcccagacctcttgtgctctttctcctactgcaacaagacctttaaaaaaaaattgttcactaaataaatttcaaagcaccactttaaaacaaagatccctctgtaggagtctgaacctcaaaatgtatgccttcaaataaaatcagcagattcctagtacactcgatttctctatcaatcttctctttcttctcttttactgtttttcagcatataaatttatatttaatattcatagatcttggtatgagaaattgtaataaataccaaatgtaaacagaaaac

SEQ ID NO: 420023 - DNA, 2845 bp, Homo sapiens
gaatcacactcaggcagtctctctcctttctgaacagagatgagccctaagatacctggaagattttgtttttaacctcacattaaggaaagcacacatcaccttgaaagagctaaacttgacgtcctacagaatttctctaacttaacatgttgagtctctgagagtgcaaaacttgaaacaagagaaagtggcctgcctggcatcctctgcttattgaatggttttatttaattctcctttacattgccaccttaacaatccttccagctacgtatcttaaaggatgtgatggagaagttatcaactggtgttttcagacctcagttggatgaacccattccactgtatgaggcaaaagtttccatggaagctgttcagaaaaatcaaggaagaaaaaaggtagtgcacatcagcgccctggatcgcatactttccagaagcgtcgctgaacctggcgactggactctggccgaggacctggcagaagcgccagggcagggtcaccgctgggacagtgggcgttgacggccacccgggatcgccgctgcgggctgcgtctcgcgggctgcccactgcgcatgctccgctcggaaccggcgggggcggaggcggggccgcgtcgggggcgggagctcggcgaggcgccacgtcaggggcgggcccggcgcgcgcgggaagtctctgtagggcggccggctaccctcagccgccgcgcgtcatggccctttcggtgcccggctactcaccgggcttccgaaagccgcccgaggtagtgcggctccgacggaaaagggcccggagccgtggagctgccgcctccccgccccgtgagctgacggagccggcggcccgccgagccgccctggtggcggggctgcctcttcgccctttccctgctgcggggggcagaggcggtggcagcggcggcggcccggccgctgctcggaggaaccccttcgcccgcctggacaaccgaccgcgggtcgccgcggagccccccgacgggccggcccgcgagcagccggaggccccggtcccgtttttagattctaatcaagaaaatgatttgctatgggaagagaagtttcctgaaagaacaactgttactgaattacctcagacttcacatgtatcattctccgagcctgatattccgtcctcaaaaagtactgagttacctgtggactggagtattaaaacgcgactccttttcacctcttctcaaccctttacctgggcagatcatttgaaagcacaggaagaagctcaaggtcttgtccagcattgtagggcaacagaagttactttgcctaaaagtatacagagccttatctattggctccaccctgctttgtcttggctaccactgttccctcgtattggagctgatagaaaaatggctggaaagacaagtccttggtcaaatgatgcaaccctgcagcatgttttaatgagtgactggtctgtgagctttacttctctatataatttgctgaagacaaaactttgcccctatttctacgtttgtacctatcagtttactgtcctgttccgagcagcaggattagctggaagtgacttaatcacagctctcatatctccaacaactcgaggtttaagagaagctatgagaaatgaaggtattgaattttctctgcctttaataaaagaaagtggccataagaaggagacagcatctggaacaagcttgggatatggggaggagcaagccatcagtgatgaggatgaagaggaaagtttttcctggctggaagagatgggtgtgcaagataaaattaaaaagccagacatactttctatcaagctgcgtaaagagaaacatgaagtacaaatggatcacagacctgaatctgttgtgttggtaaaaggaatcaacacctttacattgctcaattttttgattaactctaagagtttagttgctacctcaggtccacaggcaggacttcctccaaccctcttgtcccctgttgctttccgaggtgccacaatgcaaatgcttaaggcacggagtgtgaatgtgaagacacaagctctttctggatacagagaccaatttagtttggagattacaggtcctatcatgcctcattctctgcattcactgaccatgctgctcaaatcttcacagagtggatctttctctgcagtactgtatccacacgagccaactgctgtatttaacatctgcctgcaaatggacaaagtacttgatatggaggttgttcataaggagcttactaactgtggtttgcaccctaacactctggagcaacttagtcaaataccgttacttgggaaatcatctttacggaatgtggtgctgagagactacatttataattggagatcctgaacaccaaaatctccatcaaagcagacacaggatgtttgcctgcaggggggagaaatacccagttttaaattatttccaccaacttctgcaacaaataatgaattcaaggtgggattagggtaagaggaaattcaaaaacgtgctctcacctgacagatctttcattgcagcagagaagttcccagacctcttgtgctctttctcctactgcaacaagacctttaaaaaaaaattgttcactaaataaatttcaaagcaccactttaaaacaaagatccctctgtaggagtctgaacctcaaaatgtatgccttcaaataaaatcagcagattcctagtacactcgatttctctatcaatcttctctttcttctcttttactgtttttcagcatataaatttatatttaatattcatagatcttggtatgagaaattgtaataaataccaaatgtaaacagaaaac

SEQ ID NO: 420024 - DNA, 527 bp, Homo sapiens
agacaaactaactgaagccacagccggaagcaggctgaccacaagtgctaaggttctggttagttcttttctaggttcaaaagaagaggctgttctaagaaagactaccgagtaatcaatcacctcctcagagaaagtctgctcaggaaactctcctcccaccagcccctgcacttggttccttgcgttgcctctggctggaagctgttgtccccaacttcagaaagtgtctgcagatttcacaggctctctcttgggtcaaggattgatcaaataaatatatcacggataatgggagctggattcctcactgcctgagaaaagaacacaaatagagaaagggagaaagaataaaccctgtaatgctgaaatggaattaaagggaccagctctgtgaacacggcaagtaacaacagagagaaaacgtgaggagaaaagagagaccgggattttgaaatcctgtttcctgaatgccatctcaccaggcacacgaaagaataaaattaaggaatcaagagccaagaatt

SEQ ID NO: 420025 - DNA, 1128 bp, Homo sapiens
attacatgcctcctgatacgatgcaatgagaagaacacaacagcatgtctttgatattcctgtggaaaatacataccctcaatcttaccatgagcaaacatcagacaaactcaaatcaagggacattctacaaaataattgacctacattcttcaacagtgtcagcggaggctcacgaggcatggtgactgaagccccgcaggaggtgggatttgcaaaggacattattggaatgaagggtgaaatttgaataaggtctgtagatgagataacagtattggatctgttttaatttcccaattttgataattatactgtagatacacaagagaatgttcttgtttttaggaaatgtgtactaaaatatttagggataagaaagcatcactgtcagccactcacattagaaaatgtgtgtgtgtgtgtgtgtgtgtgtgtgtataaagcaaatgagataaaatattaatatttggggattctgggtgaagaatatatagaaattctttggatagtcatgtcttttctataactctgaaattatgccaaagcaaaaagcttaaaaaggttttaagggggcaaaaagcaaagaatttaagtctttaattggaaactgatctttttttttagcatacataccactaggaaatttatatatttagtagctatattatgaataatcctgaaatgattactcagctccccagattcctccatgattagtttacatttacaaatattttcctgtagttatactgaaaatgatttgtttggtgtccatgcacctcttttacgtagccgttcactacttctcctcccgtgcctatagtgtgccaggttctagctaggagtgttacatacgctgtctctcataattctcacaataatgcagagaaggacatgttattgtacccattttacagatgaagaaagaaggattaaagatgttaaatgactaaatgatgttacacagttagttaagtggtagaagctcagtcagaacccaggtctgtaaatacttcccagcagaataaaggccaaggagagcctcactcacggcagagggtagaagagtcaagacgaagcagcagccggtgccccctcccgcataactgggcaggcaccccgccc

SEQ ID NO: 420026 - DNA, 337 bp, Homo sapiens
ctctttgaagatggggtcaggccacaagccaaggaacggaggcagcctcttgaacctgaaaaaggcaagaaaatggattctcccctagtgccttcagaaggaacgtggacaagcagaactgttcaaaagaagaggctgttctaagaaagactaccgagtaatcaatcacctcctcagagaaagtctgctcagggaccagctctgtgaacacggcaagtaacaacagagagaaaacgtgaggagaaaagagagaccgggattttgaaatcctgtttcctgaatgccatctcaccaggcacacgaaagaataaaattaaggaatcaagagccaagaatt

SEQ ID NO: 420027 - DNA, 583 bp, Homo sapiens
ctctttgaagatggggtcaggccacaagccaaggaacggaggcagcctcttgaacctgaaaaaggcaagaaaatggattctcccctagtgccttcagaaggaacgtggacaagcagaactgtaagataataaatttgtgttgttttacgcctttaagtttttggtaatttgttacagcaacagtgggaaactagtgcagcatacctacaggactgttccatttgtaagttctaaaacacaggcaactgattatttttatttaaatcaggagcacaaatcattttaagtttcactgccagtgctaccttgctctctagtgagcaggtttttgacccttgccctcctgcccaactctgtgaaatacttagttgaaaaagtgtgcacactgaatgtgctaaaaagggtaaaagtaccgtgagtcaacccaaacattagcagtcctgggtgtgtgggctgtgggccacctgcacaccatcgccattgtatgtttgcaccaccatttgtttattcatttactagctgatggacatttggtttgtttccagtttgaggtgatatcaataaaggtgtttataatttgcat

SEQ ID NO: 420028 - DNA, 374 bp, Homo sapiens
agcaaacaggggttcctggaaaagagaggtgtctggatcagtctgggtcccttgcgaccctttggtctgcggagcctggggcacagctcaagtgagacctcatctacttgggtagaaattaaattgggcattcaacttttaaactgaaaactgcatctcttttcatgtcccctgtctcaattgcgacttctccaagtgtggtgtgacacagccaggagggatattcactggaccagctctgtgaacacggcaagtaacaacagagagaaaacgtgaggagaaaagagagaccgggattttgaaatcctgtttcctgaatgccatctcaccaggcacacgaaagaataaaattaaggaatcaagagccaagaatt

SEQ ID NO: 420029 - DNA, 348 bp, Homo sapiens
gcaatggacccagctcacgggagcttgcagtctaacacaggaaacagccacctgcatctgtaaaggtactgatgagacctctttagtatgacactggcaactgacggcactgcggatatgtttggaataaggttcaaaagaagaggctgttctaagaaagactaccgagtaatcaatcacctcctcagagaaagtctgctcagggaccagctctgtgaacacggcaagtaacaacagagagaaaacgtgaggagaaaagagagaccgggattttgaaatcctgtttcctgaatgccatctcaccaggcacacgaaagaataaaattaaggaatcaagagccaagaatt

SEQ ID NO: 420030 - DNA, 378 bp, Homo sapiens
agacgccccatgatggctgtgtgaattttcaggctcatttcgtggctccggtcactgctgccaccatcttttcccccaaacctaggtccttactcttatctaatcatgatctgcaggaaactctcctcccaccagcccctgcacttggttccttgcgttgcctctggctggaagctgttgtccccaacttcagaaagtgtctgcagatttcacaggctctctcttgggtcaagggaccagctctgtgaacacggcaagtaacaacagagagaaaacgtgaggagaaaagagagaccgggattttgaaatcctgtttcctgaatgccatctcaccaggcacacgaaagaataaaattaaggaatcaagagccaagaatt

SEQ ID NO: 420031 - DNA, 400 bp, Homo sapiens
attacatgcctcctgatacgatgcaatgagaagaacacaacagcatgtctttgatattcctgtggaaaatacataccctcaatcttaccatgagcaaacatcagacaaactcaaatcaagggacattctacaaaataattgacctacattcttcaacagtgtcagcggaggctcacgaggcatggtgactgaagccccgcaggaggtgggatttgcaaaggacattattggaatgaagggtgaaatttgaataagggaccagctctgtgaacacggcaagtaacaacagagagaaaacgtgaggagaaaagagagaccgggattttgaaatcctgtttcctgaatgccatctcaccaggcacacgaaagaataaaattaaggaatcaagagccaagaatt

SEQ ID NO: 420032 - DNA, 465 bp, Homo sapiens
gcaatggacccagctcacgggagcttgcagtctaacacaggaaacagccacctgcatctgtaaaggtactgatgagacctctttagtatgacactggcaactgacggcactgcggatatgtttggaataaggttcaaaagaagaggctgttctaagaaagactaccgagtaatcaatcacctcctcagagaaagtctgctcaggaaactctcctcccaccagcccctgcacttggttccttgcgttgcctctggctggaagctgttgtccccaacttcagaaagtgtctgcagatttcacaggctctctcttgggtcaagggaccagctctgtgaacacggcaagtaacaacagagagaaaacgtgaggagaaaagagagaccgggattttgaaatcctgtttcctgaatgccatctcaccaggcacacgaaagaataaaattaaggaatcaagagccaagaatt

SEQ ID NO: 420033 - DNA, 410 bp, Homo sapiens
agacaaactaactgaagccacagccggaagcaggctgaccacaagtgctaaggttctggttagttcttttctaggttcaaaagaagaggctgttctaagaaagactaccgagtaatcaatcacctcctcagagaaagtctgctcaggaaactctcctcccaccagcccctgcacttggttccttgcgttgcctctggctggaagctgttgtccccaacttcagaaagtgtctgcagatttcacaggctctctcttgggtcaagcaccaactgctgtgtactacgccatcgtatctacgagagagatggggtccaggaccccccatagagctggacggtatcatacatgttcatagtgaccaatgatgcgcctatccccaactaaaaaataaacgcagagtgcgtcctgag

SEQ ID NO: 420034 - DNA, 291 bp, Homo sapiens
ccttcccctcgggattaatttacctctttggacggcttcctgagtacatctcctactccacccccgctccgcagcccgtgactcagcacagtgacaatgcacatcagcagcgtctcacatgtgtgctctttatcctgttccgtctcttctgcagggaccagctctgtgaacacggcaagtaacaacagagagaaaacgtgaggagaaaagagagaccgggattttgaaatcctgtttcctgaatgccatctcaccaggcacacgaaagaataaaattaaggaatcaagagc

SEQ ID NO: 420035 - DNA, 1659 bp, Homo sapiens
tcctctgctgggcctgggggtctgggccagcaacaagttagtattgcagacatgggccaaggagccagaggccatgcagtggctcagggtccgtgagtcgcctggggaggccacaggacacagggtcaccatggggacagccgccctgggtcccgtctgggcagcgctcctgctctttctcctgatgtgtgagatccctatggtggagctcacctttgacagagctgtggccagcggctgccaacggtgctgtgactctgaggaccccctggatcctgcccatgtatcctcagcctcttcctccggccgcccccacgccctgcctgagatcagaccctacattaatatcaccatcctgaagggtgacaaaggggacccaggcccaatgggcctgccagggtacatgggcagggagggtccccaaggggagcctggccctcagggcagcaagggtgacaagggggagatgggcagccccggcgccccgtgccagaagcgcttcttcgccttctcagtgggccgcaagacggccctgcacagcggcgaggacttccagacgctgctcttcgaaagggtctttgtgaaccttgatgggtgctttgacatggcgaccggccagtttgctgctcccctgcgtggcatctacttcttcagcctcaatgtgcacagctggaattacaaggagacgtacgtgcacattatgcataaccagaaagaggctgtcatcctgtacgcgcagcccagcgagcgcagcatcatgcagagccagagtgtgatgctggacctggcctacggggaccgcgtctgggtgcggctcttcaagcgccagcgcgagaacgccatctacagcaacgacttcgacacctacatcaccttcagcggccacctcatcaaggccgaggacgactgagggcctctgggccaccctcccggctggagagctcagctgatacggcatcctgcgagaagacctgccctcctcactgggatccccttcctgcctcctcccagggctctgccagggccttgctcagtcccttccaccaaagtcatctgaacttccgtttccccagggcctccagctgccctcagacactgatgtctgtccccaggtgctctctgcccctcatgcccctctcaccggcccagtgccccgactctccaggctttatcaaggtgctaaggcccgggtgggcagctcctcgtctcagagccctcctccggcctggtgctgcctttacaaacacctgcaggagaagggccacggaagccccaggctttagagccctcagcaggtctggggagctagagcaaaggagggacctcaggccttccgtttcttcttccagggtggggtggcctggtgttcccctagccttccaaacccaggtggcctgcccttctccccagagggaggcggcctccgcccattggtgctcatgcagactctggggctgaggtgccccggggggtgatctctggtgctcacagccgagggagccgtggctccatggccagatgacggaaacagggtctgaccaagtgccaggaagacctgtgctataaaccaccctgcctgatcctgcccctgcctgaccccgccacgccctgccgtccagcatgattaaagaatgctgtctcctcttggaaaaaaaaaaa

SEQ ID NO: 420036 - DNA, 486 bp, Homo sapiens
gggagggaaaatactgaagtgtaatattccagagttctctcttgtctgctctgactcctgccagctgccctgcacctagagggacaggaggctcttctccggggcattgcatggccgggagccaaatgagctggcaccagaacctgtgaaccacgaagggacgataccagaaaacaccctcaacccaaaggaaatagactacagccccaattggctgactttggctatagaaaaaagaaaggaacgaaaagagacagttttttttggaaagctaagtcttccctttatcgagtcaagaaacccccccttcttgagctatttacagcttttaacaattgagtaaagtacgctccggacacaattggagaaactggttatttaacaagggtttgactcgagtggcatgctttcaaatataaacagacttctttaaggaattaaagttgactaatagagccaataaaagcctcttggaaaaactggtct

SEQ ID NO: 420037 - DNA, 2133 bp, Homo sapiens
acactaattataatgcattagcatgctaaaagacactcccaccagcaccatgacaatttacaaatgccatggcaatgtccagaaattaccttatacggtctaaaagcgggaggaactctcagttctggggaaatctcccctttcttggaaaactgattaataatccaccctttgtttagcatataatcaagaaataaccataaaaacagccaaccagcagcgctcaggggtggtctgtctatggagtagccattcttttgtttctttacttctctgtaaacttgctttgacttcactctgtggactcacctcaaattctttcttgtgcgagtccaggaaccctctctttgggtctggattgggacccctttccagtaccattttttctagtgaaccacgaagggacgataccagaaaacaccctcaacccaaaggaaatagactacagccccaattggctgactttggctatagaaaaaagaaaggaacgaaaagagacagttttttttggaaagctaagtcttccctttatcgagtcaagaaacccccccttcttgagctatttacagcttttaacaattgagtaaagtacgctccggtcaccatggggacagccgccctgggtcccgtctgggcagcgctcctgctctttctcctgatgtgtgagatccctatggtggagctcacctttgacagagctgtggccagcggctgccaacggtgctgtgactctgaggaccccctggatcctgcccatgtatcctcagcctcttcctccggccgcccccacgccctgcctgagatcagaccctacattaatatcaccatcctgaagggtgacaaaggggacccaggcccaatgggcctgccagggtacatgggcagggagggtccccaaggggagcctggccctcagggcagcaagggtgacaagggggagatgggcagccccggcgccccgtgccagaagcgcttcttcgccttctcagtgggccgcaagacggccctgcacagcggcgaggacttccagacgctgctcttcgaaagggtctttgtgaaccttgatgggtgctttgacatggcgaccggccagtttgctgctcccctgcgtggcatctacttcttcagcctcaatgtgcacagctggaattacaaggagacgtacgtgcacattatgcataaccagaaagaggctgtcatcctgtacgcgcagcccagcgagcgcagcatcatgcagagccagagtgtgatgctggacctggcctacggggaccgcgtctgggtgcggctcttcaagcgccagcgcgagaacgccatctacagcaacgacttcgacacctacatcaccttcagcggccacctcatcaaggccgaggacgactgagggcctctgggccaccctcccggctggagagctcagctgatacggcatcctgcgagaagacctgccctcctcactgggatccccttcctgcctcctcccagggctctgccagggccttgctcagtcccttccaccaaagtcatctgaacttccgtttccccagggcctccagctgccctcagacactgatgtctgtccccaggtgctctctgcccctcatgcccctctcaccggcccagtgccccgactctccaggctttatcaaggtgctaaggcccgggtgggcagctcctcgtctcagagccctcctccggcctggtgctgcctttacaaacacctgcaggagaagggccacggaagccccaggctttagagccctcagcaggtctggggagctagagcaaaggagggacctcaggccttccgtttcttcttccagggtggggtggcctggtgttcccctagccttccaaacccaggtggcctgcccttctccccagagggaggcggcctccgcccattggtgctcatgcagactctggggctgaggtgccccggggggtgatctctggtgctcacagccgagggagccgtggctccatggccagatgacggaaacagggtctgaccaagtgccaggaagacctgtgctataaaccaccctgcctgatcctgcccctgcctgaccccgccacgccctgccgtccagcatgattaaagaatgctgtctcctcttggaaaaaaaaaaa

SEQ ID NO: 420038 - DNA, 1889 bp, Homo sapiens
gggagggaaaatactgaagtgtaatattccagagttctctcttgtctgctctgactcctgccagctgccctgcacctagagggacaggaggctcttctccggggcattgcatggccgggagccaaatgagctggcaccagaacctgtgaaccacgaagggacgataccagaaaacaccctcaacccaaaggaaatagactacagccccaattggctgactttggctatagaaaaaagaaaggaacgaaaagagacagttttttttggaaagctaagtcttccctttatcgagtcaagaaacccccccttcttgagctatttacagcttttaacaattgagtaaagtacgctccggtcaccatggggacagccgccctgggtcccgtctgggcagcgctcctgctctttctcctgatgtgtgagatccctatggtggagctcacctttgacagagctgtggccagcggctgccaacggtgctgtgactctgaggaccccctggatcctgcccatgtatcctcagcctcttcctccggccgcccccacgccctgcctgagatcagaccctacattaatatcaccatcctgaagggtgacaaaggggacccaggcccaatgggcctgccagggtacatgggcagggagggtccccaaggggagcctggccctcagggcagcaagggtgacaagggggagatgggcagccccggcgccccgtgccagaagcgcttcttcgccttctcagtgggccgcaagacggccctgcacagcggcgaggacttccagacgctgctcttcgaaagggtctttgtgaaccttgatgggtgctttgacatggcgaccggccagtttgctgctcccctgcgtggcatctacttcttcagcctcaatgtgcacagctggaattacaaggagacgtacgtgcacattatgcataaccagaaagaggctgtcatcctgtacgcgcagcccagcgagcgcagcatcatgcagagccagagtgtgatgctggacctggcctacggggaccgcgtctgggtgcggctcttcaagcgccagcgcgagaacgccatctacagcaacgacttcgacacctacatcaccttcagcggccacctcatcaaggccgaggacgactgagggcctctgggccaccctcccggctggagagctcagctgatacggcatcctgcgagaagacctgccctcctcactgggatccccttcctgcctcctcccagggctctgccagggccttgctcagtcccttccaccaaagtcatctgaacttccgtttccccagggcctccagctgccctcagacactgatgtctgtccccaggtgctctctgcccctcatgcccctctcaccggcccagtgccccgactctccaggctttatcaaggtgctaaggcccgggtgggcagctcctcgtctcagagccctcctccggcctggtgctgcctttacaaacacctgcaggagaagggccacggaagccccaggctttagagccctcagcaggtctggggagctagagcaaaggagggacctcaggccttccgtttcttcttccagggtggggtggcctggtgttcccctagccttccaaacccaggtggcctgcccttctccccagagggaggcggcctccgcccattggtgctcatgcagactctggggctgaggtgccccggggggtgatctctggtgctcacagccgagggagccgtggctccatggccagatgacggaaacagggtctgaccaagtgccaggaagacctgtgctataaaccaccctgcctgatcctgcccctgcctgaccccgccacgccctgccgtccagcatgattaaagaatgctgtctcctcttggaaaaaaaaaaa

SEQ ID NO: 420039 - DNA, 1282 bp, Homo sapiens
tcctctgctgggcctgggggtctgggccagcaacaagttagtattgcagacatgggccaaggagccagaggccatgcagtggctcagggtccgtgagtcgcctggggaggccacaggacacagggtcaccatggggacagccgccctgggtcccgtctgggcagcgctcctgctctttctcctgatgtgtgagatccctatggtggagctcacctttgacagagctgtggccagcggctgccaacggtgctgtgactctgaggaccccctggatcctgcccatgtatcctcagcctcttcctccggccgcccccacgccctgcctgagatcagaccctacattaatatcaccatcctgaaggcccagcgagcgcagcatcatgcagagccagagtgtgatgctggacctggcctacggggaccgcgtctgggtgcggctcttcaagcgccagcgcgagaacgccatctacagcaacgacttcgacacctacatcaccttcagcggccacctcatcaaggccgaggacgactgagggcctctgggccaccctcccggctggagagctcagctgatacggcatcctgcgagaagacctgccctcctcactgggatccccttcctgcctcctcccagggctctgccagggccttgctcagtcccttccaccaaagtcatctgaacttccgtttccccagggcctccagctgccctcagacactgatgtctgtccccaggtgctctctgcccctcatgcccctctcaccggcccagtgccccgactctccaggctttatcaaggtgctaaggcccgggtgggcagctcctcgtctcagagccctcctccggcctggtgctgcctttacaaacacctgcaggagaagggccacggaagccccaggctttagagccctcagcaggtctggggagctagagcaaaggagggacctcaggccttccgtttcttcttccagggtggggtggcctggtgttcccctagccttccaaacccaggtggcctgcccttctccccagagggaggcggcctccgcccattggtgctcatgcagactctggggctgaggtgccccggggggtgatctctggtgctcacagccgagggagccgtggctccatggccagatgacggaaacagggtctgaccaagtgccaggaagacctgtgctataaaccaccctgcctgatcctgcccctgcctgaccccgccacgccctgccgtccagcatgattaaagaatgctgtctcctcttggaaaaaaaaaaa

SEQ ID NO: 420040 - DNA, 777 bp, Homo sapiens
ggggcatttggggggtgaagtggcccccgaagaatggaacccacacccatagctctccccacagctgatacggcatcctgcgagaagacctgccctcctcactgggatccccttcctgcctcctcccagggctctgccagggccttgctcagtcccttccaccaaagtcatctgaacttccgtttccccagggcctccagctgccctcagacactgatgtctgtccccaggtgctctctgcccctcatgcccctctcaccggcccagtgccccgactctccaggctttatcaaggtgctaaggcccgggtgggcagctcctcgtctcagagccctcctccggcctggtgctgcctttacaaacacctgcaggagaagggccacggaagccccaggctttagagccctcagcaggtctggggagctagagcaaaggagggacctcaggccttccgtttcttcttccagggtggggtggcctggtgttcccctagccttccaaacccaggtggcctgcccttctccccagagggaggcggcctccgcccattggtgctcatgcagactctggggctgaggtgccccggggggtgatctctggtgctcacagccgagggagccgtggctccatggccagatgacggaaacagggtctgaccaagtgccaggaagacctgtgctataaaccaccctgcctgatcctgcccctgcctgaccccgccacgccctgccgtccagcatgattaaagaatgctgtctcctcttggaaaaaaaaaaa

SEQ ID NO: 420041 - DNA, 2623 bp, Homo sapiens
acactaattataatgcattagcatgctaaaagacactcccaccagcaccatgacaatttacaaatgccatggcaatgtccagaaattaccttatacggtctaaaagcgggaggaactctcagttctggggaaatctcccctttcttggaaaactgattaataatccaccctttgtttagcatataatcaagaaataaccataaaaacagccaaccagcagcgctcaggggtggtctgtctatggagtagccattcttttgtttctttacttctctgtaaacttgctttgacttcactctgtggactcacctcaaattctttcttgtgcgagtccaggaaccctctctttgggtctggattgggacccctttccagtaccattttttctagtgaaccacgaagggacgataccagaaaacaccctcaacccaaaggaaatagactacagccccaattggctgactttggctatagaaaaaagaaaggaacgaaaagagacagttttttttggaaagctaagtcttccctttatcgagtcaagaaacccccccttcttgagctatttacagcttttaacaattgagtaaagtacgctccggtcaccatggggacagccgccctgggtcccgtctgggcagcgctcctgctctttctcctgatgtgtgagatccctatggtggagctcacctttgacagagctgtggccagcggctgccaacggtgctgtgactctgaggaccccctggatcctgcccatgtatcctcagcctcttcctccggccgcccccacgccctgcctgagatcagaccctacattaatatcaccatcctgaagggtgacaaaggggacccaggcccaatgggcctgccagggtacatgggcagggagggtccccaaggggagcctggccctcagggcagcaagggtgacaagggggagatgggcagccccggcgccccgtgccagaagcgcttcttcgccttctcagtgggccgcaagacggccctgcacagcggcgaggacttccagacgctgctcttcgaaagggtctttgtgaaccttgatgggtgctttgacatggcgaccggccagtttgctgctcccctgcgtggcatctacttcttcagcctcaatgtgcacagctggaattacaaggagacgtacgtgcacattatgcataaccagaaagaggctgtcatcctgtacgcgcagcccagcgagcgcagcatcatgcagagccagagtgtgatgctggacctggcctacggggaccgcgtctgggtgcggctcttcaagcgccagcgcgagaacgccatctacagcaacgacttcgacacctacatcaccttcagcggccacctcatcaaggccgaggacgactgagggcctctgggccaccctcccggctggagagctcaggtgctggtcccgtcccctgcagggctcagtttgcactgctgtgaagcaggaaggccagggaggtccccggggacctggcattctggggagaccctgcttctatcttggctgccatcatccctcccagcctatttctgctcctctcttctctcttggacctattttaagaagcttgctaacctaaatattctagaactttcccagcctcgtagcccagcacttctcaaacttggaaatgcatgcgaatcacccggggttcgtgttaaatgcagattctgactcagcaggtctgagtgggtccaggattctgtgtttctcatatgttcctgggtgatgctgatggggtcagtctatgaaccacactggagcaaccaggttctaggactttctcaatattctagtactttctgaacattctggaatcctccccacattctagaattctcccaacatttttttttcttgagacagagtcttgctctgttgcccaggctagagtgcagtggtgcaatctcagttcactgcaacctctgcctcccgggttcaagcgattcttctgcctcagcctccctagtggctgggattacaggcgcctgctaccatgcctggctaatttttgtatttttagtagagatggggtttcaccatattggccaggctggtcttgaactcctgacttcaggtgacccacccgcctcggcctctcaaaatgctgggattacaggtgtgagccaccgtgcctggccaattccaacattcttaaattctctcatccctccagggctccccgtgctatgttctctttaccccttccccctcttctcttgctcaggcctgcaccactgcagccaccgttcatttattcattcattaaacactgagcactcactctgtgctgggtcccgggaagggtgagggggtcagacacaggccctgcccctgccctcagtgactggccagtccagcccaggcggggagagatgtgtacataggttttaaagcagacccagagctcatgggggcctgtgttctgggtgttcaggtgctgctggtcctccattacccactgctccccaaggctggtgggacggggtcccggtggcaggggcaggtatctccttcccgttcctcatccacctgcccagtgctcatcgttacagcaaaccccagggggccttggccaggtcaagggttctgtgagga

SEQ ID NO: 420042 - DNA, 1986 bp, Homo sapiens
  misc_feature (1978)..(1978): n is a, c, g, or t
  misc_feature (1980)..(1980): n is a, c, g, or t
acactaattataatgcattagcatgctaaaagacactcccaccagcaccatgacaatttacaaatgccatggcaatgtccagaaattaccttatacggtctaaaagcgggaggaactctcagttctggggaaatctcccctttcttggaaaactgattaataatccaccctttgtttagcatataatcaagaaataaccataaaaacagccaaccagcagcgctcaggggtggtctgtctatggagtagccattcttttgtttctttacttctctgtaaacttgctttgacttcactctgtggactcacctcaaattctttcttgtgcgagtccaggaaccctctctttgggtctggattgggacccctttccagtaccattttttctagtgaaccacgaagggacgataccagaaaacaccctcaacccaaaggaaatagactacagccccaattggctgactttggctatagaaaaaagaaaggaacgaaaagagacagttttttttggaaagctaagtcttccctttatcgagtcaagaaacccccccttcttgagctatttacagcttttaacaattgagtaaagtacgctccggtcaccatggggacagccgccctgggtcccgtctgggcagcgctcctgctctttctcctgatgtgtgagatccctatggtggagctcacctttgacagagctgtggccagcggctgccaacggtgctgtgactctgaggaccccctggatcctgcccatgtatcctcagcctcttcctccggccgcccccacgccctgcctgagatcagaccctacattaatatcaccatcctgaagggtgacaaaggggacccaggcccaatgggcctgccagggtacatgggcagggagggtccccaaggggagcctggccctcagggcagcaagggtgacaagggggagatgggcagccccggcgccccgtgccagaagcgcttcttcgccttctcagtgggccgcaagacggccctgcacagcggcgaggacttccagacgctgctcttcgaaagggtctttgtgaaccttgatgggtgctttgacatggcgaccggccagtttgctgctcccctgcgtggcatctacttcttcagcctcaatgtgcacagctggaattacaaggagacgtacgtgcacattatgcataaccagaaagaggctgtcatcctgtacgcgcagcccagcgagcgcagcatcatgcagagccagagtgtgatgctggacctggcctacggggaccgcgtctgggtgcggctcttcaagcgccagcgcgagaacgccatctacagcaacgacttcgacacctacatcaccttcagcggccacctcatcaaggccgaggacgactgagggcctctgggccaccctcccggctggagagctcaggtgctggtcccgtcccctgcagggctcagtttgcactgctgtgaagcaggaaggccagggaggtccccggggacctggcattctggggagaccctgcttctatcttggctgccatcatccctcccagcctatttctgctcctctcttctctcttggacctattttaagaagcttgctaacctaaatattctagaactttcccagcctcgtagcccagcacttctcaaacttggaaatgcatgcgaatcacccggggttcgtgttaaatgcagattctgactcagcaggtctgagtgggtccaggattctgtgtttctcatatgttcctgggtgatgctgatggggtcagtctatgaaccacactggagcaaccaggttctaggactttctcaatattctagtactttctgaacattctggaatcctccccacattctagaattctcccaactactagggaggctgaggcaggagaatcgcttgagcacaggaggcgttggctgcagtgagccaagatcacgccactgcactccagcctgggtaacaagagcgaaactngngtccaa

SEQ ID NO: 420043 - DNA, 1579 bp, Homo sapiens
acactaattataatgcattagcatgctaaaagacactcccaccagcaccatgacaatttacaaatgccatggcaatgtccagaaattaccttatacggtctaaaagcgggaggaactctcagttctggggaaatctcccctttcttggaaaactgattaataatccaccctttgtttagcatataatcaagaaataaccataaaaacagccaaccagcagcgctcaggggtggtctgtctatggagtagccattcttttgtttctttacttctctgtaaacttgctttgacttcactctgtggactcacctcaaattctttcttgtgcgagtccaggaaccctctctttgggtctggattgggacccctttccagtaccattttttctagtgaaccacgaagggacgataccagaaaacaccctcaacccaaaggaaatagactacagccccaattggctgactttggctatagaaaaaagaaaggaacgaaaagagacagttttttttggaaagctaagtcttccctttatcgagtcaagaaacccccccttcttgagctatttacagcttttaacaattgagtaaagtacgctccggtcaccatggggacagccgccctgggtcccgtctgggcagcgctcctgctctttctcctgatgtgtgagatccctatggtggagctcacctttgacagagctgtggccagcggctgccaacggtgctgtgactctgaggaccccctggatcctgcccatgtatcctcagcctcttcctccggccgcccccacgccctgcctgagatcagaccctacattaatatcaccatcctgaagggtgacaaaggggacccaggcccaatgggcctgccagggtacatgggcagggagggtccccaaggggagcctggccctcagggcagcaagggtgacaagggggagatgggcagccccggcgccccgtgccagaagcgcttcttcgccttctcagtgggccgcaagacggccctgcacagcggcgaggacttccagacgctgctcttcgaaagggtctttgtgaaccttgatgggtgctttgacatggcgaccggccagtttgctgctcccctgcgtggcatctacttcttcagcctcaatgtgcacagctggaattacaaggagacgtacgtgcacattatgcataaccagaaagaggctgtcatcctgtacgcgcagcccagcgagcgcagcatcatgcagagccagagtgtgatgctggacctggcctacggggaccgcgtctgggtgcggctcttcaagcgccagcgcgagaacgccatctacagcaacgacttcgacacctacatcaccttcagcggccacctcatcaaggccgaggacgactgagggcctctgggccaccctcccggctggagagctcaggtgctggtcccgtcccctgcagggctcagtttgcactgctgtgaagcaggaagacctgtgctataaaccaccctgcctgatcctgcccctgcctgaccccgccacgccctgccgtccagcatgattaaagaatgctgtctcctcttggaaaaaaaaaaa

SEQ ID NO: 420044 - DNA, 1503 bp, Homo sapiens
acactaattataatgcattagcatgctaaaagacactcccaccagcaccatgacaatttacaaatgccatggcaatgtccagaaattaccttatacggtctaaaagcgggaggaactctcagttctggggaaatctcccctttcttggaaaactgattaataatccaccctttgtttagcatataatcaagaaataaccataaaaacagccaaccagcagcgctcaggggtggtctgtctatggagtagccattcttttgtttctttacttctctgtaaacttgctttgacttcactctgtggactcacctcaaattctttcttgtgcgagtccaggaaccctctctttgggtctggattgggacccctttccagtaccattttttctagtgaaccacgaagggacgataccagaaaacaccctcaacccaaaggaaatagactacagccccaattggctgactttggctatagaaaaaagaaaggaacgaaaagagacagttttttttggaaagctaagtcttccctttatcgagtcaagaaacccccccttcttgagctatttacagcttttaacaattgagtaaagtacgctccggtcaccatggggacagccgccctgggtcccgtctgggcagcgctcctgctctttctcctgatgtgtgagatccctatggtggagctcacctttgacagagctgtggccagcggctgccaacggtgctgtgactctgaggaccccctggatcctgcccatgtatcctcagcctcttcctccggccgcccccacgccctgcctgagatcagaccctacattaatatcaccatcctgaagggtgacaaaggggacccaggcccaatgggcctgccagggtacatgggcagggagggtccccaaggggagcctggccctcagggcagcaagggtgacaagggggagatgggcagccccggcgccccgtgccagaagcgcttcttcgccttctcagtgggccgcaagacggccctgcacagcggcgaggacttccagacgctgctcttcgaaagggtctttgtgaaccttgatgggtgctttgacatggcgaccggccagtttgctgctcccctgcgtggcatctacttcttcagcctcaatgtgcacagctggaattacaaggagacgtacgtgcacattatgcataaccagaaagaggctgtcatcctgtacgcgcagcccagcgagcgcagcatcatgcagagccagagtgtgatgctggacctggcctacggggaccgcgtctgggtgcggctcttcaagcgccagcgcgagaacgccatctacagcaacgacttcgacacctacatcaccttcagcggccacctcatcaaggccgaggacgactgagggcctctgggccaccctcccggctggagagctcagctgatcctgcccctgcctgaccccgccacgccctgccgtccagcatgattaaagaatgctgtctcctcttggaaaaaaaaaaa

SEQ ID NO: 420045 - DNA, 987 bp, Homo sapiens
  misc_feature (31)..(31): n is a, c, g, or t
  misc_feature (36)..(36): n is a, c, g, or t
gggggtggggagattgattgcgttcgctagnagccncacctctgaggaggaattggaaattggtctcttttgagtgcagagggaactgagacgccagcttaaattggctcttgcagagagttacagaaatagtttcgatgagctagtgacacatcctaaagatgcaaagatcctcctggcggcagtagccttgacaagggccacctcttcacaggatgcagtctgtctgtgcaccaaactcttcaccaaatagaacacttgtgtctctctgtggaatgggggttttcttgtgccttgcttgctttcatagccttccattttattggcatggctgccttgatgtaacataattctctgtccccaagatttagaaaattcctcttcgttcaccttggctcatggtcttccagggtttttatcctggctgtctatgaactagggttttctcctgccttaggaaaaatactgcatcttctggaatctagaaaaaaaaaaaaaaaaaagacaaggctcctcttatagccaggcaagcagttgtttagggctagacctgttgtccccgctcgcgtggggtgaacgccccgcagtggatactgtcctcctgtgctctgggcgaggcgtcatagggtgagcacaagtcagcagtgccatggaagtgaacaggcatgtccccgcagaaacaatgcttccctctgaaaaatagagccaggctaggaacctgtaccctcttggtagaagcactttggtcttcactctcttgggtgggtgcagttggaggcaccgattggaggagagcaaggttgagtcaggtgtcagggtctggcaaatcttttgccaatgccctagcaatggagtttctctccgggcattgtcttaccttgggggaaggaaacaaaaccaatgggaaaacagtttctgtaaataataaaccttgaaagacaaatgctcacctagtggccaggaggtgcgctctgtctggttgagagc

SEQ ID NO: 420046 - DNA, 1684 bp, Homo sapiens
gggttcacaataagggcttcattgcatggactctgacctcttgtgctccttttgggctcattctaattgacaggccatttgtagctctgagctgtctagccccttcaccctcatatttggcaaaaatgtctttccagcatttattggcatcagcctttttcttcacctgagactcagcatttctgggctagcaagctctttgcatttgccagacaccccttagaaccctggtgaaagaaaggagccaatctccatgccaccctggcctgccccatgggcagccttctcggcccttttctccaactaaaaacagtaatcgtccctaggtgatttgtcattctttttaacatggatttttttttagttttaccccacccaaagcaccatgcttcatgctggaaggaataatgaagaggaaagagaaaccagaaatggtccctgctccctggaagctgtagtcgatggggggaagggtagataaatcaggcgaggacaggctggctcctggaggcatactccagcctcctgctctgagggccactgccagcaggatccagggagtggccagaaaaggggcagcagtggcgctgagccccgagcccaggcactgctacggtcacccttggttactcggtgattgattgatagggctgcatctgtcctctcactggtggttgcctgcctgtccctttggtagatgaccccgcatgagatcaagtttgctgtccatgtcgaatcggtgctgaaccgcgtgccgcagcccgagtaccggcagctgctggtggaagccatcatggtgctgacgctgctctcggacacggagatgaccagcatcgggggcatcatccacgtggaccagatcgtgcagatggccagtcagctgttcttgcaggaccaggtgggggtgccagggagctgggttggctggcatttatctctgttgaggctggagattcctgaaactgatgtatgttaaagccacagagatagagctgaggagtcctgtgttcccccgcaaggagcaccccgggatcattttctaggttcatttctctggaacatttgctgtagcatctggtctcacggacttggctcatggtcttccagggtttttatcctggctgtctatgaactagggttttctcctgccttaggaaaaatactgcatcttctggaatctagaaaaaaaaaaaaaaaaaagacaaggctcctcttatagccaggcaagcagttgtttagggctagacctgttgtccccgctcgcgtggggtgaacgccccgcagtggatactgtcctcctgtgctctgggcgaggcgtcatagggtgagcacaagtcagcagtgccatggaagtgaacaggcatgtccccgcagaaacaatgcttccctctgaaaaatagagccaggctaggaacctgtaccctcttggtagaagcactttggtcttcactctcttgggtgggtgcagttggaggcaccgattggaggagagcaaggttgagtcaggtgtcagggtctggcaaatcttttgccaatgccctagcaatggagtttctctccgggcattgtcttaccttgggggaaggaaacaaaaccaatgggaaaacagtttctgtaaataataaaccttgaaagacaaatgctcacctagtggccaggaggtgcgctctgtctggttgagagc

SEQ ID NO: 420047 - DNA, 1247 bp, Homo sapiens
gccgggggtggcgggggcaggaacttctacctccctgctcagagccaagaagtcaatttgaacctttgctggggctcggtattaacacgttctgccttggagggcaagccggtggggccaggaataagcattccttttaacaacttcagttgaaaagcagccaccgccccacccgctgctgtccctggctctcatcaggtgaattcagcattcctgccaccctgccagtgcctctgtgatcctgggcatgagttgaccactatgtacctcagtttacccatccacaaaaaatgcaaaaggccaggactaagcatgggggcgtgacgtgaactcccgctcctcctctggtcaagggcttcatgcttagaggaaaccagataagccctattgcaaccccacctggagtggagtgggggaggatgaggaggagggggagaccctaccttccacaggcccagggactcgaggggtggggctccattaggagatcagtcggggcatggtgaaggggaggagaggttgtcaaggctcagctgcctggacagagaggatggaaatactccctgtgtgaaaaaagaaaaggaaaagaccccagatcaggaggcaggaaatgcagtttggcagagttggttgatgccacttacttctggacaagaagactggaggcttggccacccttgatggaaattgcagcagaaccatctctctattctgttgattcccgcaccaggctggcaaatagcttttgtcttttctgcttccttgttgcaaaagggtacaaaagcctcccacccaccccacccccaatcgccctttgtgccattatctttcaaggtgacttagcttttgaagtccctgccatctgctctgcaggcctgtactttgcaggatgtgagagcaccgcgttcccagaatgccttctgttctacccgacgtggctactgatagctctgcctgtgaggggaaaagaaagctgcgctgtggcccccttaaagcccagtccctgctgtctccctcaaaaagccacttaggaaagccacggccttgaggtaccaagagagttctttgagaaatgagagtggaaactgtgagagaggctgctctgcagtcgagtgctgggcacgtctgacgatgcctgggagaggaaaaaattccatcaaaaaactaccatggttttctttagaggaacatatgtgcacttttggcaaaacatgccttctcaggagagctggaatagttggaaccaa

SEQ ID NO: 420048 - DNA, 856 bp, Homo sapiens
gcgacagagtgagactccgtctcggaaaaaaaaaaaacatatctcactgtgtcggggcttcctggccactgtgttataatggtgcttaagtactctgcacacttccgtttactcctttaagagctgagtgctgcacctgtgctgctctcggtgctggagacacagcgctggccaggcagagaaggccctcattgtcaagtgggggagacaggggcagatcctgcctcgggttggatgctgtagagttcctgagaaccacgtgtgtgtgtttcccacccagtgcgccctatccactcctccacatccagccctaccatctccatccacgaggtgggccataccggagtcaccaaaactgagaggagtggcattaacagactgaggagtgaaatgaaacaggtaagaacacctcagtggcagcgagggatgagtggtggtctccctacctgggcttaccccagaaagcgacagaaacctagggcatgaggctgcagcccactgtctgtagagtgggaggtcccttctgtctgggatctgaacacacccctgtccccagatagatattccagagccggtcatgcgcacccttacccactcatccttaaccttaacgtgatgttctcatgaacgttccagaaaatacccttgtccatgtttgcctctgttcccgagaaccactcttaggagtgggccacagccattgaaaaagtagagtcatgcaaaaagtcaccgaatcatctgtgtccttcaaacgaaatagcaagagggctctggaaatagaccagaatgcccatgatacttggattctccaccagccacaggggtctcttttcttagttcacctttaattcctggt

SEQ ID NO: 420049 - DNA, 358 bp, Homo sapiens
cctagttttagaagtttccatagcatgaaaaatctcctgcaccatattctaagtgggaaagagtttggcgttgaaagaagtgatacgaggtctcaccatgctgcccaggctggtcttgaactcctgggctcaagcagtcttcccacctcggcctcccaaagtgctgggattacaggtgtgagccaccgtgcctggcctcggtgcgccctatccactcctccacatccagccctaccatctccatccacgaggtgggccataccggagtcaccaaaactgagaggagtggcattaacagactgaggagtgaaatgaaacagatgactaggcggtttagtgctattgaaagttctaaaag

SEQ ID NO: 420050 - DNA, 5881 bp, Homo sapiens
tcctcccttggtagccactcttgtgacaggaaggccttcttcccagccggtgaagggtcacagtgtcgttaatgttcaaagtgtagcactcatgttgcaaaattacgggatggctaccagcactcgtgcttggctaacccatacgtggtcatcttgcgcgatcattgtgactgccggaagactcttgtctagccaccgcaggaaatattcacattgtggaaaggatctgtgcccctcagggttccaaacgttccactccgcggcaggggcgggggcgagtccggagggcgggtccaaggcgcccaggtggccgcggcagaagggcctgtttctctggccttggctgtggttggcagccggccggggagagaagggactcagggaggcaacctggttcccgcccgttgctgatttcgcagcggctctcccgggccgcccccttttccttcctcctcaggccgcgacttggagggttccgctccgcggcgggggcagagccaggggcggggctgagcgcggcctgggcgatctccccggcggctggggtgggctggcgtcttcttcgcgcccgggggacctcctcgcgaccgccgggacgtaaaaggggcttggcaggggcgtcctcgccccactcccggaacctggtttcccgctgctcccgcgagcgtcgggagcccagcaggcctggccgaggcgggaccttcgtcgctccagcccccgtccccgcccccgcgcctccccgccgcgcggagctctggttggcttgctttccaaccggactttggggctagcgtttagaaaagtctcgacctcctccggcccggtcccatcccaagaaccgactaaggctgtgagtgtccgggaaccagacccgcttggaggccacagccccgacgtcccgcgcccacgcggcagatcgggcgctgcggcctgggagcctcggggagatgcggagcaggagcaattccggggtccgcttggacgggtacgcgcggctggtgcagcaaaccatcctgtgttaccagaatcccgtcacggggctgctgtcagccagccatgagcagaaggatgcctgggtgcgggataacatctacagtatcctggccgtgtggggcctgggcatggcctaccgtaagaatgcagaccgcgatgaggacaaggccaaggcctacgagctggagcagaacgtggtgaagctgatgcgaggtcttctccagtgcatgatgagacaggtggccaaagtggagaagttcaaacacactcagagcaccaaggacagcctgcacgccaagtacaacaccgccacctgtggcacggtggtgggcgacgaccagtggggccacctccaggtggatgccacctctctcttcctcctgttcctggcccagatgaccgcctcaggcttacgtatcattttcactctcgatgaggtggccttcatacagaatcttgtcttttacatagaagctgcatataaagtcgctgattatggaatgtgggagcgtggagataagactaatcagggcatcccggaattgaatgcaagctccgtaggaatggccaaggcagctcttgaggcaattgatgaactggacctttttggagcccatggaggacgcaagtcagtgattcatgttctgccagatgaggtcgagcactgccagtctattctgttctccatgctgccaagagcgtcgacatctaaagaaattgatgctggacttctttccattatttccttcccggcctttgcagtggaagatgtaaaccttgtaaatgtgaccaaaaatgaaattatttctaagctccaggggcgttatggatgctgtcgcttccttcgagatggttataaaactccaagagaggaccctaatcgactgcattatgaccctgctgaactcaagctcttcgaaaacattgaatgtgagtggcctgtgttttggacatattttataatagatggagtcttcagtggtgatgctgttcaggtccaagaataccgagaggccctggagggaatactcatcagaggcaagaatgggatccgcctggtgcctgaactctacgctgtcccgcctaacaaggtagatgaagagtacaagaatcctcacacagtagaccgagttcctatggggaaggtgcctcatctgtggggccaatccttgtacatcctcagctcgctgttggcagagggattccttgccgctggtgaaatcgatcccttaaatagaagattttccacttcagtcaaacctgatgttgtagtacaagttactgttttggcagaaaacaatcacattaaggacttattgaggaaacacggggtgaacgtccagagtatcgcggacattcatccaattcaagtccagccgggccggattcttagtcacatatatgccaagcttggacggaataagaatatgaatttgagtgggcgaccgtatcgacatattggtgtccttggaacctctaaactatatgtgattaggaaccaaatctttacttttacaccccagttcaccgaccagcatcacttctacctggccctcgacaatgagatgatcgtggagatgctaaggatcgagctggcctacctgtgcacctgctggaggatgacgggcagacccacactcaccttccccatcagtcgcaccatgctcacaaatgatggctcagacattcattctgctgtgctctccacaattagaaaactagaggatggatattttggaggagccagagtaaaattagggaacctttcggaatttctcaccacatcgttctacacatatctgacttttctggatccagactgtgatgagaagttgtttgacaatgccagcgaagggactttcagtcctgatagtgattcagatttggtaggatatctggaagacacctgtaatcaagaaagccaagacgaacttgaccattatatcaaccaccttctgcaaagcacatcgttgaggtcctatctgcctcctctttgtaagaacacagaagaccgccatgtcttcagtgctatccactccacgcgggacatactttctgtgatggcaaaagcaaagggtttggaagttccatttgttcccatgactttgccgactaaagttctaagtgcccaccgtaaatcactgaatcttgttgattctcctcagccactcctagaaaaggttcctgaaagtgactttcagtggcccagagatgaccatggtgacgtggactgtgagaagctggttgagcagctaaaagattgttcgaacctacaggaccaagcagacattctgtacattctttatgtcataaagggtcccagctgggacacaaatctctctggacagcacggggtcaccgttcaaaaccttcttggtgagctctatgggaaagccggcttgaaccaggagtggggtctgattcgctacatctcaggccttctcaggaagaaagtggaggtcctggctgaggcctgcacagacctgctttcgcaccagaagcagctcaccgtgggcctgccgcccgagccccgggagaagatcatctctgcgccccttcccccagaggagctcacaaaactcatctacgaggccagtgggcaggacatcagcattgccgtcctcacgcaggagattgtggtttacctggccatgtatgtcagggcgcagcccagcctctttgtggagatgctgagactccggattggactgatcattcaggtgatggccacggagctggcacggagcctgaactgctcaggagaagaggcttctgaaagtttgatgaacctcagccctttcgatatgaaaaatctcctgcaccatattctaagtgggaaagagtttggcgttgaaagaagtgtgcgccctatccactcctccacatccagccctaccatctccatccacgaggtgggccataccggagtcaccaaaactgagaggagtggcattaacagactgaggagtgaaatgaaacagatgactaggcggtttagtgctgatgaacagttcttttctgtgggccaggccgcgtccagcagtgcgcattcctccaagtctgcgaggtccagcaccccatcctcgcccactggcacgtcatcctcagactcgggaggacatcacatcggctggggtgagcggcagggccagtggctgcgcaggagaaggctggatggggccatcaacagggtccccgtgggattctaccagagggtgtggaagatcctccagaagtgccacggtctctccatcgatggttatgtcctcccatcctcgacgacccgagagatgaccccgcatgagatcaagtttgctgtccatgtcgaatcggtgctgaaccgcgtgccgcagcccgagtaccggcagctgctggtggaagccatcatggtgctgacgctgctctcggacacggagatgaccagcatcgggggcatcatccacgtggaccagatcgtgcagatggccagtcagctgttcttgcaggaccaggtgtcaattggtgccatggacaccctggagaaagaccaagccacaggaatctgccacttcttttatgacagcgctccgagtggggcttatgggacgatgacctacctaacaagagcagtggcttcttatttgcaggaattgttgcccaattcgggctgccagatgcaatagggtctcacctggaaacatgatcacactctcaatctgtcacgtgccccctagccttactgggaaccttctgtcccccaagatcccctgtgctatcaggaaagcatgtcccatcagaaacactctcggggggcaatggtagcactcaccctgaaactgatgtatgttaaagccacagagatagagctgaggagtcctgtgttcccccgcaaggagcaccccgggatcattttctaggttcatttctctggaacatttgctgtagcatctggtctcacggactctgaggaggaattggaaattggtctcttttgagtgcagagggaactgagacgccagcttaaattggctcttgcagagagttacagaaatagtttcgatgagctagtgacacatcctaaagatgcaaagatcctcctggcggcagtagccttgacaagggccacctcttcacaggatgcagtctgtctgtgcaccaaactcttcaccaaatagaacacttgtgtctctctgtggaatgggggttttcttgtgccttgcttgctttcatagccttccattttattggcatggctgccttgatgtaacataattctctgtccccaagatttagaaaattcctcttcgttcaccttggctcatggtcttccagggtttttatcctggctgtctatgaactagggttttctcctgccttaggaaaaatactgcatcttctggaatctagaaaaaaaaaaaaaaaaaagacaaggctcctcttatagccaggcaagcagttgtttagggctagacctgttgtccccgctcgcgtggggtgaacgccccgcagtggatactgtcctcctgtgctctgggcgaggcgtcatagggtgagcacaagtcagcagtgccatggaagtgaacaggcatgtccccgcagaaacaatgcttccctctgaaaaatagagccaggctaggaacctgtaccctcttggtagaagcactttggtcttcactctcttgggtgggtgcagttggaggcaccgattggaggagagcaaggttgagtcaggtgtcagggtctggcaaatcttttgccaatgccctagcaatggagtttctctccgggcattgtcttaccttgggggaaggaaacaaaaccaatgggaaaacagtttctgtaaataataaaccttgaaagacaaatgctcacctagtggccaggaggtgcgctctgtctggttgagagc

SEQ ID NO: 420051 - DNA, 5168 bp, Homo sapiens
tcctcccttggtagccactcttgtgacaggaaggccttcttcccagccggtgaagggtcacagtgtcgttaatgttcaaagtgtagcactcatgttgcaaaattacgggatggctaccagcactcgtgcttggctaacccatacgtggtcatcttgcgcgatcattgtgactgccggaagactcttgtctagccaccgcaggaaatattcacattgtggaaaggatctgtgcccctcagggttccaaacgttccactccgcggcaggggcgggggcgagtccggagggcgggtccaaggcgcccaggtggccgcggcagaagggcctgtttctctggccttggctgtggttggcagccggccggggagagaagggactcagggaggcaacctggttcccgcccgttgctgatttcgcagcggctctcccgggccgcccccttttccttcctcctcaggccgcgacttggagggttccgctccgcggcgggggcagagccaggggcggggctgagcgcggcctgggcgatctccccggcggctggggtgggctggcgtcttcttcgcgcccgggggacctcctcgcgaccgccgggacgtaaaaggggcttggcaggggcgtcctcgccccactcccggaacctggtttcccgctgctcccgcgagcgtcgggagcccagcaggcctggccgaggcgggaccttcgtcgctccagcccccgtccccgcccccgcgcctccccgccgcgcggagctctggttggcttgctttccaaccggactttggggctagcgtttagaaaagtctcgacctcctccggcccggtcccatcccaagaaccgactaaggctgtgagtgtccgggaaccagacccgcttggaggccacagccccgacgtcccgcgcccacgcggcagatcgggcgctgcggcctgggagcctcggggagatgcggagcaggagcaattccggggtccgcttggacgggtacgcgcggctggtgcagcaaaccatcctgtgttaccagaatcccgtcacggggctgctgtcagccagccatgagcagaaggatgcctgggtgcgggataacatctacagtatcctggccgtgtggggcctgggcatggcctaccgtaagaatgcagaccgcgatgaggacaaggccaaggcctacgagctggagcagaacgtggtgaagctgatgcgaggtcttctccagtgcatgatgagacaggtggccaaagtggagaagttcaaacacactcagagcaccaaggacagcctgcacgccaagtacaacaccgccacctgtggcacggtggtgggcgacgaccagtggggccacctccaggtggatgccacctctctcttcctcctgttcctggcccagatgaccgcctcaggcttacgtatcattttcactctcgatgaggtggccttcatacagaatcttgtcttttacatagaagctgcatataaagtcgctgattatggaatgtgggagcgtggagataagactaatcagggcatcccggaattgaatgcaagctccgtaggaatggccaaggcagctcttgaggcaattgatgaactggacctttttggagcccatggaggacgcaagtcagtgattcatgttctgccagatgaggtcgagcactgccagtctattctgttctccatgctgccaagagcgtcgacatctaaagaaattgatgctggacttctttccattatttccttcccggcctttgcagtggaagatgtaaaccttgtaaatgtgaccaaaaatgaaattatttctaagctccaggggcgttatggatgctgtcgcttccttcgagatggttataaaactccaagagaggaccctaatcgactgcattatgaccctgctgaactcaagctcttcgaaaacattgaatgtgagtggcctgtgttttggacatattttataatagatggagtcttcagtggtgatgctgttcaggtccaagaataccgagaggccctggagggaatactcatcagaggcaagaatgggatccgcctggtgcctgaactctacgctgtcccgcctaacaaggtagatgaagagtacaagaatcctcacacagtagaccgagttcctatggggaaggtgcctcatctgtggggccaatccttgtacatcctcagctcgctgttggcagagggattccttgccgctggtgaaatcgatcccttaaatagaagattttccacttcagtcaaacctgatgttgtagtacaagttactgttttggcagaaaacaatcacattaaggacttattgaggaaacacggggtgaacgtccagagtatcgcggacattcatccaattcaagtccagccgggccggattcttagtcacatatatgccaagcttggacggaataagaatatgaatttgagtgggcgaccgtatcgacatattggtgtccttggaacctctaaactatatgtgattaggaaccaaatctttacttttacaccccagttcaccgaccagcatcacttctacctggccctcgacaatgagatgatcgtggagatgctaaggatcgagctggcctacctgtgcacctgctggaggatgacgggcagacccacactcaccttccccatcagtcgcaccatgctcacaaatgatggctcagacattcattctgctgtgctctccacaattagaaaactagaggatggatattttggaggagccagagtaaaattagggaacctttcggaatttctcaccacatcgttctacacatatctgacttttctggatccagactgtgatgagaagttgtttgacaatgccagcgaagggactttcagtcctgatagtgattcagatttggtaggatatctggaagacacctgtaatcaagaaagccaagacgaacttgaccattatatcaaccaccttctgcaaagcacatcgttgaggtcctatctgcctcctctttgtaagaacacagaagaccgccatgtcttcagtgctatccactccacgcgggacatactttctgtgatggcaaaagcaaagggtttggaagttccatttgttcccatgactttgccgactaaagttctaagtgcccaccgtaaatcactgaatcttgttgattctcctcagccactcctagaaaaggttcctgaaagtgactttcagtggcccagagatgaccatggtgacgtggactgtgagaagctggttgagcagctaaaagattgttcgaacctacaggaccaagcagacattctgtacattctttatgtcataaagggtcccagctgggacacaaatctctctggacagcacggggtcaccgttcaaaaccttcttggtgagctctatgggaaagccggcttgaaccaggagtggggtctgattcgctacatctcaggccttctcaggaagaaagtggaggtcctggctgaggcctgcacagacctgctttcgcaccagaagcagctcaccgtgggcctgccgcccgagccccgggagaagatcatctctgcgccccttcccccagaggagctcacaaaactcatctacgaggccagtgggcaggacatcagcattgccgtcctcacgcaggagattgtggtttacctggccatgtatgtcagggcgcagcccagcctctttgtggagatgctgagactccggattggactgatcattcaggtgatggccacggagctggcacggagcctgaactgctcaggagaagaggcttctgaaagtttgatgaacctcagccctttcgatatgaaaaatctcctgcaccatattctaagtgggaaagagtttggcgttgaaagaagtgtgcgccctatccactcctccacatccagccctaccatctccatccacgaggtgggccataccggagtcaccaaaactgagaggagtggcattaacagactgaggagtgaaatgaaacagatgactaggcggtttagtgctgatgaacagttcttttctgtgggccaggccgcgtccagcagtgcgcattcctccaagtctgcgaggtccagcaccccatcctcgcccactggcacgtcatcctcagactcgggaggacatcacatcggctggggtgagcggcagggccagtggctgcgcaggagaaggctggatggggccatcaacagggtccccgtgggattctaccagagggtgtggaagatcctccagaagtgccacggtctctccatcgatggttatgtcctcccatcctcgacgacccgagagatgaccccgcatgagatcaagtttgctgtccatgtcgaatcggtgctgaaccgcgtgccgcagcccgagtaccggcagctgctggtggaagccatcatggtgctgacgctgctctcggacacggagatgaccagcatcgggggcatcatccacgtggaccagatcgtgcagatggccagtcagctgttcttgcaggaccaggtgtcaattggtgccatggacaccctggagaaagaccaagccacaggaatctgccacttcttttatgacagcgctccgagtggggcttatgggacgatgacctacctaacaagagcagtggcttcttatttgcaggaattgttgcccaattcgggctgccagatgcaatagggtctcacctggaaacatgatcacactctcaatctgtcacgtgccccctagccttactgggaaccttctgtcccccaagatcccctgtgctatcaggaaagcatgtcccatcagaaacactctcggggggcaatggtagcactcaccctgaaactgatgtatgttaaagccacagagatagagctgaggagtcctgtgttcccccgcaaggagcaccccgggatcattttctaggttcatttctctggaacatttgctgtagcatctggtctcacggactctgaggaggaattggaaattggtctcttttgagtgcagagggaactgagacgccagcttaaattggctcttgcagagagttacagaaatagtttcgatgagctagtgacacatcctaaagatgcaaagatcctcctggcggcagtagccttgacaagggccacctcttcacaggatgcagtctgtctgtgcaccaaactcttcaccaaatagaacacttgtgtctctctgtgg

SEQ ID NO: 420052 - DNA, 6000 bp, Homo sapiens
tcctcccttggtagccactcttgtgacaggaaggccttcttcccagccggtgaagggtcacagtgtcgttaatgttcaaagtgtagcactcatgttgcaaaattacgggatggctaccagcactcgtgcttggctaacccatacgtggtcatcttgcgcgatcattgtgactgccggaagactcttgtctagccaccgcaggaaatattcacattgtggaaaggatctgtgcccctcagggttccaaacgttccactccgcggcaggggcgggggcgagtccggagggcgggtccaaggcgcccaggtggccgcggcagaagggcctgtttctctggccttggctgtggttggcagccggccggggagagaagggactcagggaggcaacctggttcccgcccgttgctgatttcgcagcggctctcccgggccgcccccttttccttcctcctcaggccgcgacttggagggttccgctccgcggcgggggcagagccaggggcggggctgagcgcggcctgggcgatctccccggcggctggggtgggctggcgtcttcttcgcgcccgggggacctcctcgcgaccgccgggacgtaaaaggggcttggcaggggcgtcctcgccccactcccggaacctggtttcccgctgctcccgcgagcgtcgggagcccagcaggcctggccgaggcgggaccttcgtcgctccagcccccgtccccgcccccgcgcctccccgccgcgcggagctctggttggcttgctttccaaccggactttggggctagcgtttagaaaagtctcgacctcctccggcccggtcccatcccaagaaccgactaaggctgtgagtgtccgggaaccagacccgcttggaggccacagccccgacgtcccgcgcccacgcggcagatcgggcgctgcggcctgggagcctcggggagatgcggagcaggagcaattccggggtccgcttggacgggtacgcgcggctggtgcagcaaaccatcctgtgttaccagaatcccgtcacggggctgctgtcagccagccatgagcagaaggatgcctgggtgcgggataacatctacagtatcctggccgtgtggggcctgggcatggcctaccgtaagaatgcagaccgcgatgaggacaaggccaaggcctacgagctggagcagaacgtggtgaagctgatgcgaggtcttctccagtgcatgatgagacaggtggccaaagtggagaagttcaaacacactcagagcaccaaggacagcctgcacgccaagtacaacaccgccacctgtggcacggtggtgggcgacgaccagtggggccacctccaggtggatgccacctctctcttcctcctgttcctggcccagatgaccgcctcaggcttacgtatcattttcactctcgatgaggtggccttcatacagaatcttgtcttttacatagaagctgcatataaagtcgctgattatggaatgtgggagcgtggagataagactaatcagggcatcccggaattgaatgcaagctccgtaggaatggccaaggcagctcttgaggcaattgatgaactggacctttttggagcccatggaggacgcaagtcagtgattcatgttctgccagatgaggtcgagcactgccagtctattctgttctccatgctgccaagagcgtcgacatctaaagaaattgatgctggacttctttccattatttccttcccggcctttgcagtggaagatgtaaaccttgtaaatgtgaccaaaaatgaaattatttctaagctccaggggcgttatggatgctgtcgcttccttcgagatggttataaaactccaagagaggaccctaatcgactgcattatgaccctgctgaactcaagctcttcgaaaacattgaatgtgagtggcctgtgttttggacatattttataatagatggagtcttcagtggtgatgctgttcaggtccaagaataccgagaggccctggagggaatactcatcagaggcaagaatgggatccgcctggtgcctgaactctacgctgtcccgcctaacaaggtagatgaagagtacaagaatcctcacacagtagaccgagttcctatggggaaggtgcctcatctgtggggccaatccttgtacatcctcagctcgctgttggcagagggattccttgccgctggtgaaatcgatcccttaaatagaagattttccacttcagtcaaacctgatgttgtagtacaagttactgttttggcagaaaacaatcacattaaggacttattgaggaaacacggggtgaacgtccagagtatcgcggacattcatccaattcaagtccagccgggccggattcttagtcacatatatgccaagcttggacggaataagaatatgaatttgagtgggcgaccgtatcgacatattggtgtccttggaacctctaaactatatgtgattaggaaccaaatctttacttttacaccccagttcaccgaccagcatcacttctacctggccctcgacaatgagatgatcgtggagatgctaaggatcgagctggcctacctgtgcacctgctggaggatgacgggcagacccacactcaccttccccatcagtcgcaccatgctcacaaatgatggctcagacattcattctgctgtgctctccacaattagaaaactagaggatggatattttggaggagccagagtaaaattagggaacctttcggaatttctcaccacatcgttctacacatatctgacttttctggatccagactgtgatgagaagttgtttgacaatgccagcgaagggactttcagtcctgatagtgattcagatttggtaggatatctggaagacacctgtaatcaagaaagccaagacgaacttgaccattatatcaaccaccttctgcaaagcacatcgttgaggtcctatctgcctcctctttgtaagaacacagaagaccgccatgtcttcagtgctatccactccacgcgggacatactttctgtgatggcaaaagcaaagggtttggaagttccatttgttcccatgactttgccgactaaagttctaagtgcccaccgtaaatcactgaatcttgttgattctcctcagccactcctagaaaaggttcctgaaagtgactttcagtggcccagagatgaccatggtgacgtggactgtgagaagctggttgagcagctaaaagattgttcgaacctacaggaccaagcagacattctgtacattctttatgtcataaagggtcccagctgggacacaaatctctctggacagcacggggtcaccgttcaaaaccttcttggtgagctctatgggaaagccggcttgaaccaggagtggggtctgattcgctacatctcaggccttctcaggaagaaagtggaggtcctggctgaggcctgcacagacctgctttcgcaccagaagcagctcaccgtgggcctgccgcccgagccccgggagaagatcatctctgcgccccttcccccagaggagctcacaaaactcatctacgaggccagtgggcaggacatcagcattgccgtcctcacgcaggagattgtggtttacctggccatgtatgtcagggcgcagcccagcctctttgtggagatgctgagactccggattggactgatcattcaggtgatggccacggagctggcacggagcctgaactgctcaggagaagaggcttctgaaagtttgatgaacctcagccctttcgatatgaaaaatctcctgcaccatattctaagtgggaaagagtttggcgttgaaagaagtgatacgaggtctcaccatgctgcccaggctggtcttgaactcctgggctcaagcagtcttcccacctcggcctcccaaagtgctgggattacaggtgtgagccaccgtgcctggcctcggtgcgccctatccactcctccacatccagccctaccatctccatccacgaggtgggccataccggagtcaccaaaactgagaggagtggcattaacagactgaggagtgaaatgaaacagatgactaggcggtttagtgctgatgaacagttcttttctgtgggccaggccgcgtccagcagtgcgcattcctccaagtctgcgaggtccagcaccccatcctcgcccactggcacgtcatcctcagactcgggaggacatcacatcggctggggtgagcggcagggccagtggctgcgcaggagaaggctggatggggccatcaacagggtccccgtgggattctaccagagggtgtggaagatcctccagaagtgccacggtctctccatcgatggttatgtcctcccatcctcgacgacccgagagatgaccccgcatgagatcaagtttgctgtccatgtcgaatcggtgctgaaccgcgtgccgcagcccgagtaccggcagctgctggtggaagccatcatggtgctgacgctgctctcggacacggagatgaccagcatcgggggcatcatccacgtggaccagatcgtgcagatggccagtcagctgttcttgcaggaccaggtgtcaattggtgccatggacaccctggagaaagaccaagccacaggaatctgccacttcttttatgacagcgctccgagtggggcttatgggacgatgacctacctaacaagagcagtggcttcttatttgcaggaattgttgcccaattcgggctgccagatgcaatagggtctcacctggaaacatgatcacactctcaatctgtcacgtgccccctagccttactgggaaccttctgtcccccaagatcccctgtgctatcaggaaagcatgtcccatcagaaacactctcggggggcaatggtagcactcaccctgaaactgatgtatgttaaagccacagagatagagctgaggagtcctgtgttcccccgcaaggagcaccccgggatcattttctaggttcatttctctggaacatttgctgtagcatctggtctcacggactctgaggaggaattggaaattggtctcttttgagtgcagagggaactgagacgccagcttaaattggctcttgcagagagttacagaaatagtttcgatgagctagtgacacatcctaaagatgcaaagatcctcctggcggcagtagccttgacaagggccacctcttcacaggatgcagtctgtctgtgcaccaaactcttcaccaaatagaacacttgtgtctctctgtggaatgggggttttcttgtgccttgcttgctttcatagccttccattttattggcatggctgccttgatgtaacataattctctgtccccaagatttagaaaattcctcttcgttcaccttggctcatggtcttccagggtttttatcctggctgtctatgaactagggttttctcctgccttaggaaaaatactgcatcttctggaatctagaaaaaaaaaaaaaaaaaagacaaggctcctcttatagccaggcaagcagttgtttagggctagacctgttgtccccgctcgcgtggggtgaacgccccgcagtggatactgtcctcctgtgctctgggcgaggcgtcatagggtgagcacaagtcagcagtgccatggaagtgaacaggcatgtccccgcagaaacaatgcttccctctgaaaaatagagccaggctaggaacctgtaccctcttggtagaagcactttggtcttcactctcttgggtgggtgcagttggaggcaccgattggaggagagcaaggttgagtcaggtgtcagggtctggcaaatcttttgccaatgccctagcaatggagtttctctccgggcattgtcttaccttgggggaaggaaacaaaaccaatgggaaaacagtttctgtaaataataaaccttgaaagacaaatgctcacctagtggccaggaggtgcgctctgtctggttgagagc

SEQ ID NO: 420053 - DNA, 5829 bp, Homo sapiens
tcctcccttggtagccactcttgtgacaggaaggccttcttcccagccggtgaagggtcacagtgtcgttaatgttcaaagtgtagcactcatgttgcaaaattacgggatggctaccagcactcgtgcttggctaacccatacgtggtcatcttgcgcgatcattgtgactgccggaagactcttgtctagccaccgcaggaaatattcacattgtggaaaggatctgtgcccctcagggttccaaacgttccactccgcggcaggggcgggggcgagtccggagggcgggtccaaggcgcccaggtggccgcggcagaagggcctgtttctctggccttggctgtggttggcagccggccggggagagaagggactcagggaggcaacctggttcccgcccgttgctgatttcgcagcggctctcccgggccgcccccttttccttcctcctcaggccgcgacttggagggttccgctccgcggcgggggcagagccaggggcggggctgagcgcggcctgggcgatctccccggcggctggggtgggctggcgtcttcttcgcgcccgggggacctcctcgcgaccgccgggacgtaaaaggggcttggcaggggcgtcctcgccccactcccggaacctggtttcccgctgctcccgcgagcgtcgggagcccagcaggcctggccgaggcgggaccttcgtcgctccagcccccgtccccgcccccgcgcctccccgccgcgcggagctctggttggcttgctttccaaccggactttggggctagcgtttagaaaagtctcgacctcctccggcccggtcccatcccaagaaccgactaaggctgtgagtgtccgggaaccagacccgcttggaggccacagccccgacgtcccgcgcccacgcggcagatcgggcgctgcggcctgggagcctcggggagatgcggagcaggagcaattccggggtccgcttggacgggtacgcgcggctggtgcagcaaaccatcctgtgttaccagaatcccgtcacggggctgctgtcagccagccatgagcagaaggatgcctgggtgcgggataacatctacagtatcctggccgtgtggggcctgggcatggcctaccgtaagaatgcagaccgcgatgaggacaaggccaaggcctacgagctggagcagaacgtggtgaagctgatgcgaggtcttctccagtgcatgatgagacaggtggccaaagtggagaagttcaaacacactcagagcaccaaggacagcctgcacgccaagtacaacaccgccacctgtggcacggtggtgggcgacgaccagtggggccacctccaggtggatgccacctctctcttcctcctgttcctggcccagatgaccgcctcaggcttacgtatcattttcactctcgatgaggtggccttcatacagaatcttgtcttttacatagaagctgcatataaagtcgctgattatggaatgtgggagcgtggagataagactaatcagggcatcccggaattgaatgcaagctccgtaggaatggccaaggcagctcttgaggcaattgatgaactggacctttttggagcccatggaggacgcaagtcagtgattcatgttctgccagatgaggtcgagcactgccagtctattctgttctccatgctgccaagagcgtcgacatctaaagaaattgatgctggacttctttccattatttccttcccggcctttgcagtggaagatgtaaaccttgtaaatgtgaccaaaaatgaaattatttctaagctccaggggcgttatggatgctgtcgcttccttcgagatggttataaaactccaagagaggaccctaatcgactgcattatgaccctgctgaactcaagctcttcgaaaacattgaatgtgagtggcctgtgttttggacatattttataatagatggagtcttcagtggtgatgctgttcaggtccaagaataccgagaggccctggagggaatactcatcagaggcaagaatgggatccgcctggtgcctgaactctacgctgtcccgcctaacaaggtagatgaagagtacaagaatcctcacacagtagaccgagttcctatggggaaggtgcctcatctgtggggccaatccttgtacatcctcagctcgctgttggcagagggattccttgccgctggtgaaatcgatcccttaaatagaagattttccacttcagtcaaacctgatgttgtagtacaagttactgttttggcagaaaacaatcacattaaggacttattgaggaaacacggggtgaacgtccagagtatcgcggacattcatccaattcaagtccagccgggccggattcttagtcacatatatgccaagcttggacggaataagaatatgaatttgagtgggcgaccgtatcgacatattggtgtccttggaacctctaaactatatgtgattaggaaccaaatctttacttttacaccccagttcaccgaccagcatcacttctacctggccctcgacaatgagatgatcgtggagatgctaaggatcgagctggcctacctgtgcacctgctggaggatgacgggcagacccacactcaccttccccatcagtcgcaccatgctcacaaatgatggctcagacattcattctgctgtgctctccacaattagaaaactagaggatggatattttggaggagccagagtaaaattagggaacctttcggaatttctcaccacatcgttctacacatatctgacttttctggatccagactgtgatgagaagttgtttgacaatgccagcgaagggactttcagtcctgatagtgattcagatttggtaggatatctggaagacacctgtaatcaagaaagccaagacgaacttgaccattatatcaaccaccttctgcaaagcacatcgttgaggtcctatctgcctcctctttgtaagaacacagaagaccgccatgtcttcagtgctatccactccacgcgggacatactttctgtgatggcaaaagcaaagggtttggaagttccatttgttcccatgactttgccgactaaagttctaagtgcccaccgtaaatcactgaatcttgttgattctcctcagccactcctagaaaaggttcctgaaagtgactttcagtggcccagagatgaccatggtgacgtggactgtgagaagctggttgagcagctaaaagattgttcgaacctacaggaccaagcagacattctgtacattctttatgtcataaagggtcccagctgggacacaaatctctctggacagcacggggtcaccgttcaaaaccttcttggtgagctctatgggaaagccggcttgaaccaggagtggggtctgattcgctacatctcaggccttctcaggaagaaagtggaggtcctggctgaggcctgcacagacctgctttcgcaccagaagcagctcaccgtgggcctgccgcccgagccccgggagaagatcatctctgcgtaagtcctcagccttggggacctcaggagattgtggtttacctggccatgtatgtcagggcgcagcccagcctctttgtggagatgctgagactccggattggactgatcattcaggtgatggccacggagctggcacggagcctgaactgctcaggagaagaggcttctgaaagtttgatgaacctcagccctttcgatatgaaaaatctcctgcaccatattctaagtgggaaagagtttggcgttgaaagaagtgtgcgccctatccactcctccacatccagccctaccatctccatccacgaggtgggccataccggagtcaccaaaactgagaggagtggcattaacagactgaggagtgaaatgaaacagatgactaggcggtttagtgctgatgaacagttcttttctgtgggccaggccgcgtccagcagtgcgcattcctccaagtctgcgaggtccagcaccccatcctcgcccactggcacgtcatcctcagactcgggaggacatcacatcggctggggtgagcggcagggccagtggctgcgcaggagaaggctggatggggccatcaacagggtccccgtgggattctaccagagggtgtggaagatcctccagaagtgccacggtctctccatcgatggttatgtcctcccatcctcgacgacccgagagatgaccccgcatgagatcaagtttgctgtccatgtcgaatcggtgctgaaccgcgtgccgcagcccgagtaccggcagctgctggtggaagccatcatggtgctgacgctgctctcggacacggagatgaccagcatcgggggcatcatccacgtggaccagatcgtgcagatggccagtcagctgttcttgcaggaccaggtgtcaattggtgccatggacaccctggagaaagaccaagccacaggaatctgccacttcttttatgacagcgctccgagtggggcttatgggacgatgacctacctaacaagagcagtggcttcttatttgcaggaattgttgcccaattcgggctgccagatgcaatagggtctcacctggaaacatgatcacactctcaatctgtcacgtgccccctagccttactgggaaccttctgtcccccaagatcccctgtgctatcaggaaagcatgtcccatcagaaacactctcggggggcaatggtagcactcaccctgaaactgatgtatgttaaagccacagagatagagctgaggagtcctgtgttcccccgcaaggagcaccccgggatcattttctaggttcatttctctggaacatttgctgtagcatctggtctcacggactctgaggaggaattggaaattggtctcttttgagtgcagagggaactgagacgccagcttaaattggctcttgcagagagttacagaaatagtttcgatgagctagtgacacatcctaaagatgcaaagatcctcctggcggcagtagccttgacaagggccacctcttcacaggatgcagtctgtctgtgcaccaaactcttcaccaaatagaacacttgtgtctctctgtggaatgggggttttcttgtgccttgcttgctttcatagccttccattttattggcatggctgccttgatgtaacataattctctgtccccaagatttagaaaattcctcttcgttcaccttggctcatggtcttccagggtttttatcctggctgtctatgaactagggttttctcctgccttaggaaaaatactgcatcttctggaatctagaaaaaaaaaaaaaaaaaagacaaggctcctcttatagccaggcaagcagttgtttagggctagacctgttgtccccgctcgcgtggggtgaacgccccgcagtggatactgtcctcctgtgctctgggcgaggcgtcatagggtgagcacaagtcagcagtgccatggaagtgaacaggcatgtccccgcagaaacaatgcttccctctgaaaaatagagccaggctaggaacctgtaccctcttggtagaagcactttggtcttcactctcttgggtgggtgcagttggaggcaccgattggaggagagcaaggttgagtcaggtgtcagggtctggcaaatcttttgccaatgccctagcaatggagtttctctccgggcattgtcttaccttgggggaaggaaacaaaaccaatgggaaaacagtttctgtaaataataaaccttgaaagacaaatgctcacctagtggccaggaggtgcgctctgtctggttgagagc

SEQ ID NO: 420054 - DNA, 3916 bp, Homo sapiens
aatgcatggttagaggcctgggtgtccaagaataccgagaggccctggagggaatactcatcagaggcaagaatgggatccgcctggtgcctgaactctacgctgtcccgcctaacaaggtagatgaagagtacaagaatcctcacacagtagaccgagttcctatggggaaggtgcctcatctgtggggccaatccttgtacatcctcagctcgctgttggcagagggattccttgccgctggtgaaatcgatcccttaaatagaagattttccacttcagtcaaacctgatgttgtagtacaagttactgttttggcagaaaacaatcacattaaggacttattgaggaaacacggggtgaacgtccagagtatcgcggacattcatccaattcaagtccagccgggccggattcttagtcacatatatgccaagcttggacggaataagaatatgaatttgagtgggcgaccgtatcgacatattggtgtccttggaacctctaaactatatgtgattaggaaccaaatctttacttttacaccccagttcaccgaccagcatcacttctacctggccctcgacaatgagatgatcgtggagatgctaaggatcgagctggcctacctgtgcacctgctggaggatgacgggcagacccacactcaccttccccatcagtcgcaccatgctcacaaatgatggctcagacattcattctgctgtgctctccacaattagaaaactagaggatggatattttggaggagccagagtaaaattagggaacctttcggaatttctcaccacatcgttctacacatatctgacttttctggatccagactgtgatgagaagttgtttgacaatgccagcgaagggactttcagtcctgatagtgattcagatttggtaggatatctggaagacacctgtaatcaagaaagccaagacgaacttgaccattatatcaaccaccttctgcaaagcacatcgttgaggtcctatctgcctcctctttgtaagaacacagaagaccgccatgtcttcagtgctatccactccacgcgggacatactttctgtgatggcaaaagcaaagggtttggaagttccatttgttcccatgactttgccgactaaagttctaagtgcccaccgtaaatcactgaatcttgttgattctcctcagccactcctagaaaaggttcctgaaagtgactttcagtggcccagagatgaccatggtgacgtggactgtgagaagctggttgagcagctaaaagattgttcgaacctacaggaccaagcagacattctgtacattctttatgtcataaagggtcccagctgggacacaaatctctctggacagcacggggtcaccgttcaaaaccttcttggtgagctctatgggaaagccggcttgaaccaggagtggggtctgattcgctacatctcaggccttctcaggaagaaagtggaggtcctggctgaggcctgcacagacctgctttcgcaccagaagcagctcaccgtgggcctgccgcccgagccccgggagaagatcatctctgcgccccttcccccagaggagctcacaaaactcatctacgaggccagtgggcaggacatcagcattgccgtcctcacgcaggagattgtggtttacctggccatgtatgtcagggcgcagcccagcctctttgtggagatgctgagactccggattggactgatcattcaggtgatggccacggagctggcacggagcctgaactgctcaggagaagaggcttctgaaagtttgatgaacctcagccctttcgatatgaaaaatctcctgcaccatattctaagtgggaaagagtttggcgttgaaagaagtgtgcgccctatccactcctccacatccagccctaccatctccatccacgaggtgggccataccggagtcaccaaaactgagaggagtggcattaacagactgaggagtgaaatgaaacagatgactaggcggtttagtgctgatgaacagttcttttctgtgggccaggccgcgtccagcagtgcgcattcctccaagtctgcgaggtccagcaccccatcctcgcccactggcacgtcatcctcagactcgggaggacatcacatcggctggggtgagcggcagggccagtggctgcgcaggagaaggctggatggggccatcaacagggtccccgtgggattctaccagagggtgtggaagatcctccagaagtgccacggtctctccatcgatggttatgtcctcccatcctcgacgacccgagagatgaccccgcatgagatcaagtttgctgtccatgtcgaatcggtgctgaaccgcgtgccgcagcccgagtaccggcagctgctggtggaagccatcatggtgctgacgctgctctcggacacggagatgaccagcatcgggggcatcatccacgtggaccagatcgtgcagatggccagtcagctgttcttgcaggaccaggtgtcaattggtgccatggacaccctggagaaagaccaagccacaggaatctgccacttcttttatgacagcgctccgagtggggcttatgggacgatgacctacctaacaagagcagtggcttcttatttgcaggaattgttgcccaattcgggctgccagatgcaatagggtctcacctggaaacatgatcacactctcaatctgtcacgtgccccctagccttactgggaaccttctgtcccccaagatcccctgtgctatcaggaaagcatgtcccatcagaaacactctcggggggcaatggtagcactcaccctgaaactgatgtatgttaaagccacagagatagagctgaggagtcctgtgttcccccgcaaggagcaccccgggatcattttctaggttcatttctctggaacatttgctgtagcatctggtctcacggactctgaggaggaattggaaattggtctcttttgagtgcagagggaactgagacgccagcttaaattggctcttgcagagagttacagaaatagtttcgatgagctagtgacacatcctaaagatgcaaagatcctcctggcggcagtagccttgacaagggccacctcttcacaggatgcagtctgtctgtgcaccaaactcttcaccaaatagaacacttgtgtctctctgtggaatgggggttttcttgtgccttgcttgctttcatagccttccattttattggcatggctgccttgatgtaacataattctctgtccccaagatttagaaaattcctcttcgttcaccttggctcatggtcttccagggtttttatcctggctgtctatgaactagggttttctcctgccttaggaaaaatactgcatcttctggaatctagaaaaaaaaaaaaaaaaaagacaaggctcctcttatagccaggcaagcagttgtttagggctagacctgttgtccccgctcgcgtggggtgaacgccccgcagtggatactgtcctcctgtgctctgggcgaggcgtcatagggtgagcacaagtcagcagtgccatggaagtgaacaggcatgtccccgcagaaacaatgcttccctctgaaaaatagagccaggctaggaacctgtaccctcttggtagaagcactttggtcttcactctcttgggtgggtgcagttggaggcaccgattggaggagagcaaggttgagtcaggtgtcagggtctggcaaatcttttgccaatgccctagcaatggagtttctctccgggcattgtcttaccttgggggaaggaaacaaaaccaatgggaaaacagtttctgtaaataataaaccttgaaagacaaatgctcacctagtggccaggaggtgcgctctgtctggttgagagc

SEQ ID NO: 420055 - DNA, 5890 bp, Homo sapiens
tcctcccttggtagccactcttgtgacaggaaggccttcttcccagccggtgaagggtcacagtgtcgttaatgttcaaagtgtagcactcatgttgcaaaattacgggatggctaccagcactcgtgcttggctaacccatacgtggtcatcttgcgcgatcattgtgactgccggaagactcttgtctagccaccgcaggaaatattcacattgtggaaaggatctgtgcccctcagggttccaaacgttccactccgcggcaggggcgggggcgagtccggagggcgggtccaaggcgcccaggtggccgcggcagaagggcctgtttctctggccttggctgtggttggcagccggccggggagagaagggactcagggaggcaacctggttcccgcccgttgctgatttcgcagcggctctcccgggccgcccccttttccttcctcctcaggccgcgacttggagggttccgctccgcggcgggggcagagccaggggcggggctgagcgcggcctgggcgatctccccggcggctggggtgggctggcgtcttcttcgcgcccgggggacctcctcgcgaccgccgggacgtaaaaggggcttggcaggggcgtcctcgccccactcccggaacctggtttcccgctgctcccgcgagcgtcgggagcccagcaggcctggccgaggcgggaccttcgtcgctccagcccccgtccccgcccccgcgcctccccgccgcgcggagctctggttggcttgctttccaaccggactttggggctagcgtttagaaaagtctcgacctcctccggcccggtcccatcccaagaaccgactaaggctgtgagtgtccgggaaccagacccgcttggaggccacagccccgacgtcccgcgcccacgcggcagatcgggcgctgcggcctgggagcctcggggagatgcggagcaggagcaattccggggtccgcttggacgggtacgcgcggctggtgcagcaaaccatcctgtgttaccagaatcccgtcacggggctgctgtcagccagccatgagcagaaggatgcctgggtgcgggataacatctacagtatcctggccgtgtggggcctgggcatggcctaccgtaagaatgcagaccgcgatgaggacaaggccaaggcctacgagctggagcagaacgtggtgaagctgatgcgaggtcttctccagtgcatgatgagacaggtggccaaagtggagaagttcaaacacactcagagcaccaaggacagcctgcacgccaagtacaacaccgccacctgtggcacggtggtgggcgacgaccagtggggccacctccaggtggatgccacctctctcttcctcctgttcctggcccagatgaccgcctcaggcttacgtatcattttcactctcgatgaggtggccttcatacagaatcttgtcttttacatagaagctgcatataaagtcgctgattatggaatgtgggagcgtggagataagactaatcagggcatcccggaattgaatgcaagctccgtaggaatggccaaggcagctcttgaggcaattgatgaactggacctttttggagcccatggaggacgcaagtcagtgattcatgttctgccagatgaggtcgagcactgccagtctattctgttctccatgctgccaagagcgtcgacatctaaagaaattgatgctggacttctttccattatttccttcccggcctttgcagtggaagatgtaaaccttgtaaatgtgaccaaaaatgaaattatttctaagctccaggggcgttatggatgctgtcgcttccttcgagatggttataaaactccaagagaggaccctaatcgactgcattatgaccctgctgaactcaagctcttcgaaaacattgaatgtgagtggcctgtgttttggacatattttataatagatggagtcttcagtggtgatgctgttcaggtccaagaataccgagaggccctggagggaatactcatcagaggcaagaatgggatccgcctggtgcctgaactctacgctgtcccgcctaacaaggtagatgaagagtacaagaatcctcacacagtagaccgagttcctatggggaaggtgcctcatctgtggggccaatccttgtacatcctcagctcgctgttggcagagggattccttgccgctggtgaaatcgatcccttaaatagaagattttccacttcagtcaaacctgatgttgtagtacaagttactgttttggcagaaaacaatcacattaaggacttattgaggaaacacggggtgaacgtccagagtatcgcggacattcatccaattcaagtccagccgggccggattcttagtcacatatatgccaagcttggacggaataagaatatgaatttgagtgggcgaccgtatcgacatattggtgtccttggaacctctaaactatatgtgattaggaaccaaatctttacttttacaccccagttcaccgaccagcatcacttctacctggccctcgacaatgagatgatcgtggagatgctaaggatcgagctggcctacctgtgcacctgctggaggatgacgggcagacccacactcaccttccccatcagtcgcaccatgctcacaaatgatggctcagacattcattctgctgtgctctccacaattagaaaactagaggatggatattttggaggagccagagtaaaattagggaacctttcggaatttctcaccacatcgttctacacatatctgacttttctggatccagactgtgatgagaagttgtttgacaatgccagcgaagggactttcagtcctgatagtgattcagatttggtaggatatctggaagacacctgtaatcaagaaagccaagacgaacttgaccattatatcaaccaccttctgcaaagcacatcgttgaggtcctatctgcctcctctttgtaagaacacagaagaccgccatgtcttcagtgctatccactccacgcgggacatactttctgtgatggcaaaagcaaagggtttggaagttccatttgttcccatgactttgccgactaaagttctaagtgcccaccgtaaatcactgaatcttgttgattctcctcagccactcctagaaaaggttcctgaaagtgactttcagtggcccagagatgaccatggtgacgtggactgtgagaagctggttgagcagctaaaagattgttcgaacctacaggaccaagcagacattctgtacattctttatgtcataaagggtcccagctgggacacaaatctctctggacagcacggggtcaccgttcaaaaccttcttggtgagctctatgggaaagccggcttgaaccaggagtggggtctgattcgctacatctcaggccttctcaggaagaaagtggaggtcctggctgaggcctgcacagacctgctttcgcaccagaagcagctcaccgtgggcctgccgcccgagccccgggagaagatcatctctgcgccccttcccccagaggagctcacaaaactcatctacgaggccagtgggcaggacatcagcattgccgtcctcacgcaggagattgtggtttacctggccatgtatgtcagggcgcagcccagcctctttgtggagatgctgagactccggattggactgatcattcaggtgatggccacggagctggcacggagcctgaactgctcaggagaagaggcttctgaaagtttgatgaacctcagccctttcgatatgaaaaatctcctgcaccatattctaagtgggaaagagtttggcgttgaaagaagtgatacgaggtctcaccatgctgcccaggctggtcttgaactcctgggctcaagcagtcttcccacctcggcctcccaaagtgctgggattacagtgcgccctatccactcctccacatccagccctaccatctccatccacgaggtgggccataccggagtcaccaaaactgagaggagtggcattaacagactgaggagtgaaatgaaacagaggtccagcaccccatcctcgcccactggcacgtcatcctcagactcgggaggacatcacatcggctggggtgagcggcagggccagtggctgcgcaggagaaggctggatggggccatcaacagggtccccgtgggattctaccagagggtgtggaagatcctccagaagtgccacggtctctccatcgatggttatgtcctcccatcctcgacgacccgagagatgaccccgcatgagatcaagtttgctgtccatgtcgaatcggtgctgaaccgcgtgccgcagcccgagtaccggcagctgctggtggaagccatcatggtgctgacgctgctctcggacacggagatgaccagcatcgggggcatcatccacgtggaccagatcgtgcagatggccagtcagctgttcttgcaggaccaggtgtcaattggtgccatggacaccctggagaaagaccaagccacaggaatctgccacttcttttatgacagcgctccgagtggggcttatgggacgatgacctacctaacaagagcagtggcttcttatttgcaggaattgttgcccaattcgggctgccagatgcaatagggtctcacctggaaacatgatcacactctcaatctgtcacgtgccccctagccttactgggaaccttctgtcccccaagatcccctgtgctatcaggaaagcatgtcccatcagaaacactctcggggggcaatggtagcactcaccctgaaactgatgtatgttaaagccacagagatagagctgaggagtcctgtgttcccccgcaaggagcaccccgggatcattttctaggttcatttctctggaacatttgctgtagcatctggtctcacggactctgaggaggaattggaaattggtctcttttgagtgcagagggaactgagacgccagcttaaattggctcttgcagagagttacagaaatagtttcgatgagctagtgacacatcctaaagatgcaaagatcctcctggcggcagtagccttgacaagggccacctcttcacaggatgcagtctgtctgtgcaccaaactcttcaccaaatagaacacttgtgtctctctgtggaatgggggttttcttgtgccttgcttgctttcatagccttccattttattggcatggctgccttgatgtaacataattctctgtccccaagatttagaaaattcctcttcgttcaccttggctcatggtcttccagggtttttatcctggctgtctatgaactagggttttctcctgccttaggaaaaatactgcatcttctggaatctagaaaaaaaaaaaaaaaaaagacaaggctcctcttatagccaggcaagcagttgtttagggctagacctgttgtccccgctcgcgtggggtgaacgccccgcagtggatactgtcctcctgtgctctgggcgaggcgtcatagggtgagcacaagtcagcagtgccatggaagtgaacaggcatgtccccgcagaaacaatgcttccctctgaaaaatagagccaggctaggaacctgtaccctcttggtagaagcactttggtcttcactctcttgggtgggtgcagttggaggcaccgattggaggagagcaaggttgagtcaggtgtcagggtctggcaaatcttttgccaatgccctagcaatggagtttctctccgggcattgtcttaccttgggggaaggaaacaaaaccaatgggaaaacagtttctgtaaataataaaccttgaaagacaaatgctcacctagtggccaggaggtgcgctctgtctggttgagagc

SEQ ID NO: 420056 - DNA, 5797 bp, Homo sapiens
tcctcccttggtagccactcttgtgacaggaaggccttcttcccagccggtgaagggtcacagtgtcgttaatgttcaaagtgtagcactcatgttgcaaaattacgggatggctaccagcactcgtgcttggctaacccatacgtggtcatcttgcgcgatcattgtgactgccggaagactcttgtctagccaccgcaggaaatattcacattgtggaaaggatctgtgcccctcagggttccaaacgttccactccgcggcaggggcgggggcgagtccggagggcgggtccaaggcgcccaggtggccgcggcagaagggcctgtttctctggccttggctgtggttggcagccggccggggagagaagggactcagggaggcaacctggttcccgcccgttgctgatttcgcagcggctctcccgggccgcccccttttccttcctcctcaggccgcgacttggagggttccgctccgcggcgggggcagagccaggggcggggctgagcgcggcctgggcgatctccccggcggctggggtgggctggcgtcttcttcgcgcccgggggacctcctcgcgaccgccgggacgtaaaaggggcttggcaggggcgtcctcgccccactcccggaacctggtttcccgctgctcccgcgagcgtcgggagcccagcaggcctggccgaggcgggaccttcgtcgctccagcccccgtccccgcccccgcgcctccccgccgcgcggagctctggttggcttgctttccaaccggactttggggctagcgtttagaaaagtctcgacctcctccggcccggtcccatcccaagaaccgactaaggctgtgagtgtccgggaaccagacccgcttggaggccacagccccgacgtcccgcgcccacgcggcagatcgggcgctgcggcctgggagcctcggggagatgcggagcaggagcaattccggggtccgcttggacgggtacgcgcggctggtgcagcaaaccatcctgtgttaccagaatcccgtcacggggctgctgtcagccagccatgagcagaaggatgcctgggtgcgggataacatctacagtatcctggccgtgtggggcctgggcatggcctaccgtaagaatgcagaccgcgatgaggacaaggccaaggcctacgagctggagcagaacgtggtgaagctgatgcgaggtcttctccagtgcatgatgagacaggtggccaaagtggagaagttcaaacacactcagagcaccaaggacagcctgcacgccaagtacaacaccgccacctgtggcacggtggtgggcgacgaccagtggggccacctccaggtggatgccacctctctcttcctcctgttcctggcccagatgaccgcctcaggcttacgtatcattttcactctcgatgaggtggccttcatacagaatcttgtcttttacatagaagctgcatataaagtcgctgattatggaatgtgggagcgtggagataagactaatcagggcatcccggaattgaatgcaagctccgtaggaatggccaaggcagctcttgaggcaattgatgaactggacctttttggagcccatggaggacgcaagtcagtgattcatgttctgccagatgaggtcgagcactgccagtctattctgttctccatgctgccaagagcgtcgacatctaaagaaattgatgctggacttctttccattatttccttcccggcctttgcagtggaagatgtaaaccttgtaaatgtgaccaaaaatgaaattatttctaagctccaggggcgttatggatgctgtcgcttccttcgagatggttataaaactccaagagaggaccctaatcgactgcattatgaccctgctgaactcaagctcttcgaaaacattgaatgtgagtggcctgtgttttggacatattttataatagatggagtcttcagtggtgatgctgttcaggtccaagaataccgagaggccctggagggaatactcatcagaggcaagaatgggatccgcctggtgcctgaactctacgctgtcccgcctaacaaggtagatgaagagtacaagaatcctcacacagtagaccgagttcctatggggaaggtgcctcatctgtggggccaatccttgtacatcctcagctcgctgttggcagagggattccttgccgctggtgaaatcgatcccttaaatagaagattttccacttcagtcaaacctgatgttgtagtacaagttactgttttggcagaaaacaatcacattaaggacttattgaggaaacacggggtgaacgtccagagtatcgcggacattcatccaattcaagtccagccgggccggattcttagtcacatatatgccaagcttggacggaataagaatatgaatttgagtgggcgaccgtatcgacatattggtgtccttggaacctctaaactatatgtgattaggaaccaaatctttacttttacaccccagttcaccgaccagcatcacttctacctggccctcgacaatgagatgatcgtggagatgctaaggatcgagctggcctacctgtgcacctgctggaggatgacgggcagacccacactcaccttccccatcagtcgcaccatgctcacaaatgatggctcagacattcattctgctgtgctctccacaattagaaaactagaggatggatattttggaggagccagagtaaaattagggaacctttcggaatttctcaccacatcgttctacacatatctgacttttctggatccagactgtgatgagaagttgtttgacaatgccagcgaagggactttcagtcctgatagtgattcagatttggtaggatatctggaagacacctgtaatcaagaaagccaagacgaacttgaccattatatcaaccaccttctgcaaagcacatcgttgaggtcctatctgcctcctctttgtaagaacacagaagaccgccatgtcttcagtgctatccactccacgcgggacatactttctgtgatggcaaaagcaaagggtttggaagttccatttgttcccatgactttgccgactaaagttctaagtgcccaccgtaaatcactgaatcttgttgattctcctcagccactcctagaaaaggttcctgaaagtgactttcagtggcccagagatgaccatggtgacgtggactgtgagaagctggttgagcagctaaaagattgttcgaacctacaggaccaagcagacattctgtacattctttatgtcataaagggtcccagctgggacacaaatctctctggacagcacggggtcaccgttcaaaaccttcttggtgagctctatgggaaagccggcttgaaccaggagtggggtctgattcgctacatctcaggccttctcaggaagaaagtggaggtcctggctgaggcctgcacagacctgctttcgcaccagaagcagctcaccgtgggcctgccgcccgagccccgggagaagatcatctctgcgccccttcccccagaggagctcacaaaactcatctacgaggccagtgggcaggacatcagcattgccgtcctcacgcaggagattgtggtttacctggccatgtatgtcagggcgcagcccagcctctttgtggagatgctgagactccggattggactgatcattcaggtgatggccacggagctggcacggagcctgaactgctcaggagaagaggcttctgaaagtttgatgaacctcagccctttcgatatgaaaaatctcctgcaccatattctaagtgggaaagagtttggcgttgaaagaagtgtgcgccctatccactcctccacatccagccctaccatctccatccacgaggtgggccataccggagtcaccaaaactgagaggagtggcattaacagactgaggagtgaaatgaaacagaggtccagcaccccatcctcgcccactggcacgtcatcctcagactcgggaggacatcacatcggctggggtgagcggcagggccagtggctgcgcaggagaaggctggatggggccatcaacagggtccccgtgggattctaccagagggtgtggaagatcctccagaagtgccacggtctctccatcgatggttatgtcctcccatcctcgacgacccgagagatgaccccgcatgagatcaagtttgctgtccatgtcgaatcggtgctgaaccgcgtgccgcagcccgagtaccggcagctgctggtggaagccatcatggtgctgacgctgctctcggacacggagatgaccagcatcgggggcatcatccacgtggaccagatcgtgcagatggccagtcagctgttcttgcaggaccaggtgtcaattggtgccatggacaccctggagaaagaccaagccacaggaatctgccacttcttttatgacagcgctccgagtggggcttatgggacgatgacctacctaacaagagcagtggcttcttatttgcaggaattgttgcccaattcgggctgccagatgcaatagggtctcacctggaaacatgatcacactctcaatctgtcacgtgccccctagccttactgggaaccttctgtcccccaagatcccctgtgctatcaggaaagcatgtcccatcagaaacactctcggggggcaatggtagcactcaccctgaaactgatgtatgttaaagccacagagatagagctgaggagtcctgtgttcccccgcaaggagcaccccgggatcattttctaggttcatttctctggaacatttgctgtagcatctggtctcacggactctgaggaggaattggaaattggtctcttttgagtgcagagggaactgagacgccagcttaaattggctcttgcagagagttacagaaatagtttcgatgagctagtgacacatcctaaagatgcaaagatcctcctggcggcagtagccttgacaagggccacctcttcacaggatgcagtctgtctgtgcaccaaactcttcaccaaatagaacacttgtgtctctctgtggaatgggggttttcttgtgccttgcttgctttcatagccttccattttattggcatggctgccttgatgtaacataattctctgtccccaagatttagaaaattcctcttcgttcaccttggctcatggtcttccagggtttttatcctggctgtctatgaactagggttttctcctgccttaggaaaaatactgcatcttctggaatctagaaaaaaaaaaaaaaaaaagacaaggctcctcttatagccaggcaagcagttgtttagggctagacctgttgtccccgctcgcgtggggtgaacgccccgcagtggatactgtcctcctgtgctctgggcgaggcgtcatagggtgagcacaagtcagcagtgccatggaagtgaacaggcatgtccccgcagaaacaatgcttccctctgaaaaatagagccaggctaggaacctgtaccctcttggtagaagcactttggtcttcactctcttgggtgggtgcagttggaggcaccgattggaggagagcaaggttgagtcaggtgtcagggtctggcaaatcttttgccaatgccctagcaatggagtttctctccgggcattgtcttaccttgggggaaggaaacaaaaccaatgggaaaacagtttctgtaaataataaaccttgaaagacaaatgctcacctagtggccaggaggtgcgctctgtctggttgagagc

SEQ ID NO: 420057 - DNA, 2636 bp, Homo sapiens
aatagggaaagccggaaatgggattgcaaagggtgggtggatggaccctgatctgcgaggtcctcgccactaaacgcgggcttcactgtttgtcttcccccgtgtcatgtattgccttctctgtggttcctgtcctgtggaaacgtgtctgtcacttctctgtggcactgcagcaatgaagtgggcactatggagtttgtctccctgagccatggatgcctgctccgagggcccgttgtcaccctcaaagctctcccactgcagtggcacaggcgccacgtgcgggtgacagctgcccctcatgggcacttagcgcacactaggtatgcctcaggggcttctgtgtctccacgtggtgaaggcttccgggcagctctttataggatgcctgactgtgtccccactgtgcagatgagactgaggcccagaatcagtgttcatggcagggccagacggcctcgggtgtgtccttggcaccgctggcattgagtggggattagcactccggcagtctgacccccaagcccgtgctcgccctgttcggcctcctccttatgggttctagctttgggggtgggactgcctctcggggggcagggcagagtgcaacatggaatgaagtgatcaacccaaagtatgcgagtcatctcacatgaggaaacagacaaggtggactggaggaaccgtgttcctctctggcgagtggtgttctggcatttgtgcctaggtcgcagggccgcccttcgagatggcgcactttccctggggcacctgctgcgtggcttctgaggccccaagctgtctgtcttgcagaggtccagcaccccatcctcgcccactggcacgtcatcctcagactcgggaggacatcacatcggctggggtgagcggcagggccagtggctgcgcaggagaaggctggatggggccatcaacagggtccccgtgggattctaccagagggtgtggaagatcctccagaagtgccacggtctctccatcgatggttatgtcctcccatcctcgacgacccgagagatgaccccgcatgagatcaagtttgctgtccatgtcgaatcggtgctgaaccgcgtgccgcagcccgagtaccggcagctgctggtggaagccatcatggtgctgacgctgctctcggacacggagatgaccagcatcgggggcatcatccacgtggaccagatcgtgcagatggccagtcagctgttcttgcaggaccaggtgtcaattggtgccatggacaccctggagaaagaccaagccacaggaatctgccacttcttttatgacagcgctccgagtggggcttatgggacgatgacctacctaacaagagcagtggcttcttatttgcaggaattgttgcccaattcgggctgccagatgcaatagggtctcacctggaaacatgatcacactctcaatctgtcacgtgccccctagccttactgggaaccttctgtcccccaagatcccctgtgctatcaggaaagcatgtcccatcagaaacactctcggggggcaatggtagcactcaccctgaaactgatgtatgttaaagccacagagatagagctgaggagtcctgtgttcccccgcaaggagcaccccgggatcattttctaggttcatttctctggaacatttgctgtagcatctggtctcacggactctgaggaggaattggaaattggtctcttttgagtgcagagggaactgagacgccagcttaaattggctcttgcagagagttacagaaatagtttcgatgagctagtgacacatcctaaagatgcaaagatcctcctggcggcagtagccttgacaagggccacctcttcacaggatgcagtctgtctgtgcaccaaactcttcaccaaatagaacacttgtgtctctctgtggaatgggggttttcttgtgccttgcttgctttcatagccttccattttattggcatggctgccttgatgtaacataattctctgtccccaagatttagaaaattcctcttcgttcaccttggctcatggtcttccagggtttttatcctggctgtctatgaactagggttttctcctgccttaggaaaaatactgcatcttctggaatctagaaaaaaaaaaaaaaaaaagacaaggctcctcttatagccaggcaagcagttgtttagggctagacctgttgtccccgctcgcgtggggtgaacgccccgcagtggatactgtcctcctgtgctctgggcgaggcgtcatagggtgagcacaagtcagcagtgccatggaagtgaacaggcatgtccccgcagaaacaatgcttccctctgaaaaatagagccaggctaggaacctgtaccctcttggtagaagcactttggtcttcactctcttgggtgggtgcagttggaggcaccgattggaggagagcaaggttgagtcaggtgtcagggtctggcaaatcttttgccaatgccctagcaatggagtttctctccgggcattgtcttaccttgggggaaggaaacaaaaccaatgggaaaacagtttctgtaaataataaaccttgaaagacaaatgctcacctagtggccaggaggtgcgctctgtctggttgagagc

SEQ ID NO: 420058 - DNA, 2187 bp, Homo sapiens
  misc_feature (16)..(16): n is a, c, g, or t
  misc_feature (35)..(35): n is a, c, g, or t
  misc_feature (38)..(38): n is a, c, g, or t
  misc_feature (44)..(44): n is a, c, g, or t
gtcttgtgcctgaggntcctcatagaggcacgganctngcacgnagctgaactgctcaggagaagaggcttctgaaagtttgatgaacctcagccctttcgatatgaaaaatctcctgcaccatattctaagtgggaaagagtttggcgttgaaagaagtgtgcgccctatccactcctccacatccagccctaccatctccatccacgaggtgggccataccggagtcaccaaaactgagaggagtggcattaacagactgaggagtgaaatgaaacagatgactaggcggtttagtgctgatgaacagttcttttctgtgggccaggccgcgtccagcagtgcgcattcctccaagtctgcgaggtccagcaccccatcctcgcccactggcacgtcatcctcagactcgggaggacatcacatcggctggggtgagcggcagggccagtggctgcgcaggagaaggctggatggggccatcaacagggtccccgtgggattctaccagagggtgtggaagatcctccagaagtgccacggtctctccatcgatggttatgtcctcccatcctcgacgacccgagagatgaccccgcatgagatcaagtttgctgtccatgtcgaatcggtgctgaaccgcgtgccgcagcccgagtaccggcagctgctggtggaagccatcatggtgctgacgctgctctcggacacggagatgaccagcatcgggggcatcatccacgtggaccagatcgtgcagatggccagtcagctgttcttgcaggaccaggtgtcaattggtgccatggacaccctggagaaagaccaagccacaggaatctgccacttcttttatgacagcgctccgagtggggcttatgggacgatgacctacctaacaagagcagtggcttcttatttgcaggaattgttgcccaattcgggctgccagatgcaatagggtctcacctggaaacatgatcacactctcaatctgtcacgtgccccctagccttactgggaaccttctgtcccccaagatcccctgtgctatcaggaaagcatgtcccatcagaaacactctcggggggcaatggtagcactcaccctgaaactgatgtatgttaaagccacagagatagagctgaggagtcctgtgttcccccgcaaggagcaccccgggatcattttctaggttcatttctctggaacatttgctgtagcatctggtctcacggactctgaggaggaattggaaattggtctcttttgagtgcagagggaactgagacgccagcttaaattggctcttgcagagagttacagaaatagtttcgatgagctagtgacacatcctaaagatgcaaagatcctcctggcggcagtagccttgacaagggccacctcttcacaggatgcagtctgtctgtgcaccaaactcttcaccaaatagaacacttgtgtctctctgtggaatgggggttttcttgtgccttgcttgctttcatagccttccattttattggcatggctgccttgatgtaacataattctctgtccccaagatttagaaaattcctcttcgttcaccttggctcatggtcttccagggtttttatcctggctgtctatgaactagggttttctcctgccttaggaaaaatactgcatcttctggaatctagaaaaaaaaaaaaaaaaaagacaaggctcctcttatagccaggcaagcagttgtttagggctagacctgttgtccccgctcgcgtggggtgaacgccccgcagtggatactgtcctcctgtgctctgggcgaggcgtcatagggtgagcacaagtcagcagtgccatggaagtgaacaggcatgtccccgcagaaacaatgcttccctctgaaaaatagagccaggctaggaacctgtaccctcttggtagaagcactttggtcttcactctcttgggtgggtgcagttggaggcaccgattggaggagagcaaggttgagtcaggtgtcagggtctggcaaatcttttgccaatgccctagcaatggagtttctctccgggcattgtcttaccttgggggaaggaaacaaaaccaatgggaaaacagtttctgtaaataataaaccttgaaagacaaatgctcacctagtggccaggaggtgcgctctgtctggttgagagc

SEQ ID NO: 420059 - DNA, 2306 bp, Homo sapiens
gcgacagagtgagactccgtctcggaaaaaaaaaaaacatatctcactgtgtcggggcttcctggccactgtgttataatggtgcttaagtactctgcacacttccgtttactcctttaagagctgagtgctgcacctgtgctgctctcggtgctggagacacagcgctggccaggcagagaaggccctcattgtcaagtgggggagacaggggcagatcctgcctcgggttggatgctgtagagttcctgagaaccacgtgtgtgtgtttcccacccagtgcgccctatccactcctccacatccagccctaccatctccatccacgaggtgggccataccggagtcaccaaaactgagaggagtggcattaacagactgaggagtgaaatgaaacagatgactaggcggtttagtgctgatgaacagttcttttctgtgggccaggccgcgtccagcagtgcgcattcctccaagtctgcgaggtccagcaccccatcctcgcccactggcacgtcatcctcagactcgggaggacatcacatcggctggggtgagcggcagggccagtggctgcgcaggagaaggctggatggggccatcaacagggtccccgtgggattctaccagagggtgtggaagatcctccagaagtgccacggtctctccatcgatggttatgtcctcccatcctcgacgacccgagagatgaccccgcatgagatcaagtttgctgtccatgtcgaatcggtgctgaaccgcgtgccgcagcccgagtaccggcagctgctggtggaagccatcatggtgctgacgctgctctcggacacggagatgaccagcatcgggggcatcatccacgtggaccagatcgtgcagatggccagtcagctgttcttgcaggaccaggtgtcaattggtgccatggacaccctggagaaagaccaagccacaggaatctgccacttcttttatgacagcgctccgagtggggcttatgggacgatgacctacctaacaagagcagtggcttcttatttgcaggaattgttgcccaattcgggctgccagatgcaatagggtctcacctggaaacatgatcacactctcaatctgtcacgtgccccctagccttactgggaaccttctgtcccccaagatcccctgtgctatcaggaaagcatgtcccatcagaaacactctcggggggcaatggtagcactcaccctgaaactgatgtatgttaaagccacagagatagagctgaggagtcctgtgttcccccgcaaggagcaccccgggatcattttctaggttcatttctctggaacatttgctgtagcatctggtctcacggactctgaggaggaattggaaattggtctcttttgagtgcagagggaactgagacgccagcttaaattggctcttgcagagagttacagaaatagtttcgatgagctagtgacacatcctaaagatgcaaagatcctcctggcggcagtagccttgacaagggccacctcttcacaggatgcagtctgtctgtgcaccaaactcttcaccaaatagaacacttgtgtctctctgtggaatgggggttttcttgtgccttgcttgctttcatagccttccattttattggcatggctgccttgatgtaacataattctctgtccccaagatttagaaaattcctcttcgttcaccttggctcatggtcttccagggtttttatcctggctgtctatgaactagggttttctcctgccttaggaaaaatactgcatcttctggaatctagaaaaaaaaaaaaaaaaaagacaaggctcctcttatagccaggcaagcagttgtttagggctagacctgttgtccccgctcgcgtggggtgaacgccccgcagtggatactgtcctcctgtgctctgggcgaggcgtcatagggtgagcacaagtcagcagtgccatggaagtgaacaggcatgtccccgcagaaacaatgcttccctctgaaaaatagagccaggctaggaacctgtaccctcttggtagaagcactttggtcttcactctcttgggtgggtgcagttggaggcaccgattggaggagagcaaggttgagtcaggtgtcagggtctggcaaatcttttgccaatgccctagcaatggagtttctctccgggcattgtcttaccttgggggaaggaaacaaaaccaatgggaaaacagtttctgtaaataataaaccttgaaagacaaatgctcacctagtggccaggaggtgcgctctgtctggttgagagc

SEQ ID NO: 420060 - DNA, 5580 bp, Homo sapiens
tcctcccttggtagccactcttgtgacaggaaggccttcttcccagccggtgaagggtcacagtgtcgttaatgttcaaagtgtagcactcatgttgcaaaattacgggatggctaccagcactcgtgcttggctaacccatacgtggtcatcttgcgcgatcattgtgactgccggaagactcttgtctagccaccgcaggaaatattcacattgtggaaaggatctgtgcccctcagggttccaaacgttccactccgcggcaggggcgggggcgagtccggagggcgggtccaaggcgcccaggtggccgcggcagaagggcctgtttctctggccttggctgtggttggcagccggccggggagagaagggactcagggaggcaacctggttcccgcccgttgctgatttcgcagcggctctcccgggccgcccccttttccttcctcctcaggccgcgacttggagggttccgctccgcggcgggggcagagccaggggcggggctgagcgcggcctgggcgatctccccggcggctggggtgggctggcgtcttcttcgcgcccgggggacctcctcgcgaccgccgggacgtaaaaggggcttggcaggggcgtcctcgccccactcccggaacctggtttcccgctgctcccgcgagcgtcgggagcccagcaggcctggccgaggcgggaccttcgtcgctccagcccccgtccccgcccccgcgcctccccgccgcgcggagctctggttggcttgctttccaaccggactttggggctagcgtttagaaaagtctcgacctcctccggcccggtcccatcccaagaaccgactaaggctgtgagtgtccgggaaccagacccgcttggaggccacagccccgacgtcccgcgcccacgcggcagatcgggcgctgcggcctgggagcctcggggagatgcggagcaggagcaattccggggtccgcttggacgggtacgcgcggctggtgcagcaaaccatcctgtgttaccagaatcccgtcacggggctgctgtcagccagccatgagcagaaggatgcctgggtgcgggataacatctacagtatcctggccgtgtggggcctgggcatggcctaccgtaagaatgcagaccgcgatgaggacaaggccaaggcctacgagctggagcagaacgtggtgaagctgatgcgaggtcttctccagtgcatgatgagacaggtggccaaagtggagaagttcaaacacactcagagcaccaaggacagcctgcacgccaagtacaacaccgccacctgtggcacggtggtgggcgacgaccagtggggccacctccaggtggatgccacctctctcttcctcctgttcctggcccagatgaccgcctcaggcttacgtatcattttcactctcgatgaggtggccttcatacagaatcttgtcttttacatagaagctgcatataaagtcgctgattatggaatgtgggagcgtggagataagactaatcagggcatcccggaattgaatgcaagctccgtaggaatggccaaggcagctcttgaggcaattgatgaactggacctttttggagcccatggaggacgcaagtcagtgattcatgttctgccagatgaggtcgagcactgccagtctattctgttctccatgctgccaagagcgtcgacatctaaagaaattgatgctggacttctttccattatttccttcccggcctttgcagtggaagatgtaaaccttgtaaatgtgaccaaaaatgaaattatttctaagctccaggggcgttatggatgctgtcgcttccttcgagatggttataaaactccaagagaggaccctaatcgactgcattatgaccctgctgaactcaagctcttcgaaaacattgaatgtgagtggcctgtgttttggacatattttataatagatggagtcttcagtggtgatgctgttcaggtccaagaataccgagaggccctggagggaatactcatcagaggcaagaatgggatccgcctggtgcctgaactctacgctgtcccgcctaacaaggtagatgaagagtacaagaatcctcacacagtagaccgagttcctatggggaaggtgcctcatctgtggggccaatccttgtacatcctcagctcgctgttggcagagggattccttgccgctggtgaaatcgatcccttaaatagaagattttccacttcagtcaaacctgatgttgtagtacaagttactgttttggcagaaaacaatcacattaaggacttattgaggaaacacggggtgaacgtccagagtatcgcggacattcatccaattcaagtccagccgggccggattcttagtcacatatatgccaagcttggacggaataagaatatgaatttgagtgggcgaccgtatcgacatattggtgtccttggaacctctaaactatatgtgattaggaaccaaatctttacttttacaccccagttcaccgaccagcatcacttctacctggccctcgacaatgagatgatcgtggagatgctaaggatcgagctggcctacctgtgcacctgctggaggatgacgggcagacccacactcaccttccccatcagtcgcaccatgctcacaaatgatggctcagacattcattctgctgtgctctccacaattagaaaactagaggatggatattttggaggagccagagtaaaattagggaacctttcggaatttctcaccacatcgttctacacatatctgacttttctggatccagactgtgatgagaagttgtttgacaatgccagcgaagggactttcagtcctgatagtgattcagatttggtaggatatctggaagacacctgtaatcaagaaagccaagacgaacttgaccattatatcaaccaccttctgcaaagcacatcgttgaggtcctatctgcctcctctttgtaagaacacagaagaccgccatgtcttcagtgctatccactccacgcgggacatactttctgtgatggcaaaagcaaagggtttggaagttccatttgttcccatgactttgccgactaaagttctaagtgcccaccgtaaatcactgaatcttgttgattctcctcagccactcctagaaaaggttcctgaaagtgactttcagtggcccagagatgaccatggtgacgtggactgtgagaagctggttgagcagctaaaagattgttcgaacctacaggaccaagcagacattctgtacattctttatgtcataaagggtcccagctgggacacaaatctctctggacagcacggggtcaccgttcaaaaccttcttggtgagctctatgggaaagccggcttgaaccaggagtggggtctgattcgctacatctcaggccttctcaggaagaaagtggaggtcctggctgaggcctgcacagacctgctttcgcaccagaagcagctcaccgtgggcctgccgcccgagccccgggagaagatcatctctgcgccccttcccccagaggagctcacaaaactcatctacgaggccagtgggcaggacatcagcattgccgtcctcacgcaggagattgtggtttacctggccatgtatgtcagggcgcagcccagcctctttgtggagatgctgagactccggattggactgatcattcaggtgatggccacggagctggcacggagcctgaactgctcaggagaagaggcttctgaaagtttgatgaacctcagccctttcgatatgaaaaatctcctgcaccatattctaagtgggaaagagtttggcgttgaaagaagtgtgcgccctatccactcctccacatccagccctaccatctccatccacgaggtgggccataccggagtcaccaaaactgagaggagtggcattaacagactgaggagtgaaatgaaacagatgactaggcggtttagtgctgatgaacagttcttttctgtgggccaggccgcgtccagcagtgcgcattcctccaagtctgcgaggtccagcaccccatcctcgcccactggcacgtcatcctcagactcgggaggacatcacatcggctggggtgagcggcagggccagtggctgcgcaggagaaggctggatggggccatcaacagggtccccgtgggattctaccagagggtgtggaagatcctccagaagtgccacggtctctccatcgatggttatgtcctcccatcctcgacgacccgagagatgaccccgcatgagatcaagtttgctgtccatgtcgaatcggtgctgaaccgcgctgccagatgcaatagggtctcacctggaaacatgatcacactctcaatctgtcacgtgccccctagccttactgggaaccttctgtcccccaagatcccctgtgctatcaggaaagcatgtcccatcagaaacactctcggggggcaatggtagcactcaccctgaaactgatgtatgttaaagccacagagatagagctgaggagtcctgtgttcccccgcaaggagcaccccgggatcattttctaggttcatttctctggaacatttgctgtagcatctggtctcacggactctgaggaggaattggaaattggtctcttttgagtgcagagggaactgagacgccagcttaaattggctcttgcagagagttacagaaatagtttcgatgagctagtgacacatcctaaagatgcaaagatcctcctggcggcagtagccttgacaagggccacctcttcacaggatgcagtctgtctgtgcaccaaactcttcaccaaatagaacacttgtgtctctctgtggaatgggggttttcttgtgccttgcttgctttcatagccttccattttattggcatggctgccttgatgtaacataattctctgtccccaagatttagaaaattcctcttcgttcaccttggctcatggtcttccagggtttttatcctggctgtctatgaactagggttttctcctgccttaggaaaaatactgcatcttctggaatctagaaaaaaaaaaaaaaaaaagacaaggctcctcttatagccaggcaagcagttgtttagggctagacctgttgtccccgctcgcgtggggtgaacgccccgcagtggatactgtcctcctgtgctctgggcgaggcgtcatagggtgagcacaagtcagcagtgccatggaagtgaacaggcatgtccccgcagaaacaatgcttccctctgaaaaatagagccaggctaggaacctgtaccctcttggtagaagcactttggtcttcactctcttgggtgggtgcagttggaggcaccgattggaggagagcaaggttgagtcaggtgtcagggtctggcaaatcttttgccaatgccctagcaatggagtttctctccgggcattgtcttaccttgggggaaggaaacaaaaccaatgggaaaacagtttctgtaaataataaaccttgaaagacaaatgctcacctagtggccaggaggtgcgctctgtctggttgagagc

SEQ ID NO: 420061 - DNA, 2295 bp, Homo sapiens
gggttcacaataagggcttcattgcatggactctgacctcttgtgctccttttgggctcattctaattgacaggccatttgtagctctgagctgtctagccccttcaccctcatatttggcaaaaatgtctttccagcatttattggcatcagcctttttcttcacctgagactcagcatttctgggctagcaagctctttgcatttgccagacaccccttagaaccctggtgaaagaaaggagccaatctccatgccaccctggcctgccccatgggcagccttctcggcccttttctccaactaaaaacagtaatcgtccctaggtgatttgtcattctttttaacatggatttttttttagttttaccccacccaaagcaccatgcttcatgctggaaggaataatgaagaggaaagagaaaccagaaatggtccctgctccctggaagctgtagtcgatggggggaagggtagataaatcaggcgaggacaggctggctcctggaggcatactccagcctcctgctctgagggccactgccagcaggatccagggagtggccagaaaaggggcagcagtggcgctgagccccgagcccaggcactgctacggtcacccttggttactcggtgattgattgatagggctgcatctgtcctctcactggtggttgcctgcctgtccctttggtagatgaccccgcatgagatcaagtttgctgtccatgtcgaatcggtgctgaaccgcgtgccgcagcccgagtaccggcagctgctggtggaagccatcatggtgctgacgctgctctcggacacggagatgaccagcatcgggggcatcatccacgtggaccagatcgtgcagatggccagtcagctgttcttgcaggaccaggtgtcaattggtgccatggacaccctggagaaagaccaagccacaggaatctgccacttcttttatgacagcgctccgagtggggcttatgggacgatgacctacctaacaagagcagtggcttcttatttgcaggaattgttgcccaattcgggctgccagatgcaatagggtctcacctggaaacatgatcacactctcaatctgtcacgtgccccctagccttactgggaaccttctgtcccccaagatcccctgtgctatcaggaaagcatgtcccatcagaaacactctcggggggcaatggtagcactcaccctgaaactgatgtatgttaaagccacagagatagagctgaggagtcctgtgttcccccgcaaggagcaccccgggatcattttctaggttcatttctctggaacatttgctgtagcatctggtctcacggactctgaggaggaattggaaattggtctcttttgagtgcagagggaactgagacgccagcttaaattggctcttgcagagagttacagaaatagtttcgatgagctagtgacacatcctaaagatgcaaagatcctcctggcggcagtagccttgacaagggccacctcttcacaggatgcagtctgtctgtgcaccaaactcttcaccaaatagaacacttgtgtctctctgtggaatgggggttttcttgtgccttgcttgctttcatagccttccattttattggcatggctgccttgatgtaacataattctctgtccccaagatttagaaaattcctcttcgttcaccttggctcatggtcttccagggtttttatcctggctgtctatgaactagggttttctcctgccttaggaaaaatactgcatcttctggaatctagaaaaaaaaaaaaaaaaaagacaaggctcctcttatagccaggcaagcagttgtttagggctagacctgttgtccccgctcgcgtggggtgaacgccccgcagtggatactgtcctcctgtgctctgggcgaggcgtcatagggtgagcacaagtcagcagtgccatggaagtgaacaggcatgtccccgcagaaacaatgcttccctctgaaaaatagagccaggctaggaacctgtaccctcttggtagaagcactttggtcttcactctcttgggtgggtgcagttggaggcaccgattggaggagagcaaggttgagtcaggtgtcagggtctggcaaatcttttgccaatgccctagcaatggagtttctctccgggcattgtcttaccttgggggaaggaaacaaaaccaatgggaaaacagtttctgtaaataataaaccttgaaagacaaatgctcacctagtggccaggaggtgcgctctgtctggttgagagc

SEQ ID NO: 420062 - DNA, 1651 bp, Homo sapiens
gactagaggatccatgcacgctcggtatgtctcccatctcgacgacccgagagatgaccccgcatgagatcaagtttgctgtccatgtcgaatcggtgctgaaccgcgtgccgcagcccgagtaccggcagctgctggtggaagccatcatggtgctgacgctgctctcggacacggagatgaccagcatcgggggcatcatccacgtggaccagatcgtgcagatggccagtcagctgttcttgcaggaccaggtgtcaattggtgccatggacaccctggagaaagaccaagccacaggaatctgccacttcttttatgacagcgctccgagtggggcttatgggacgatgacctacctaacaagagcagtggcttcttatttgcaggaattgttgcccaattcgggctgccagatgcaatagggtctcacctggaaacatgatcacactctcaatctgtcacgtgccccctagccttactgggaaccttctgtcccccaagatcccctgtgctatcaggaaagcatgtcccatcagaaacactctcggggggcaatggtagcactcaccctgaaactgatgtatgttaaagccacagagatagagctgaggagtcctgtgttcccccgcaaggagcaccccgggatcattttctaggttcatttctctggaacatttgctgtagcatctggtctcacggactctgaggaggaattggaaattggtctcttttgagtgcagagggaactgagacgccagcttaaattggctcttgcagagagttacagaaatagtttcgatgagctagtgacacatcctaaagatgcaaagatcctcctggcggcagtagccttgacaagggccacctcttcacaggatgcagtctgtctgtgcaccaaactcttcaccaaatagaacacttgtgtctctctgtggaatgggggttttcttgtgccttgcttgctttcatagccttccattttattggcatggctgccttgatgtaacataattctctgtccccaagatttagaaaattcctcttcgttcaccttggctcatggtcttccagggtttttatcctggctgtctatgaactagggttttctcctgccttaggaaaaatactgcatcttctggaatctagaaaaaaaaaaaaaaaaaagacaaggctcctcttatagccaggcaagcagttgtttagggctagacctgttgtccccgctcgcgtggggtgaacgccccgcagtggatactgtcctcctgtgctctgggcgaggcgtcatagggtgagcacaagtcagcagtgccatggaagtgaacaggcatgtccccgcagaaacaatgcttccctctgaaaaatagagccaggctaggaacctgtaccctcttggtagaagcactttggtcttcactctcttgggtgggtgcagttggaggcaccgattggaggagagcaaggttgagtcaggtgtcagggtctggcaaatcttttgccaatgccctagcaatggagtttctctccgggcattgtcttaccttgggggaaggaaacaaaaccaatgggaaaacagtttctgtaaataataaaccttgaaagacaaatgctcacctagtggccaggaggtgcgctctgtctggttgagagc

SEQ ID NO: 420063 - DNA, 1575 bp, Homo sapiens
cggcacgaggggagcctgaactgctcaggagaagaggcttctgaaagtttgatgaacctcagccctttcgatatgaaaaatctcgctgctctcggacacggagatgaccagcatcgggggcatcatccacgtggaccagatcgtgcagatggccagtcagctgttcttgcaggaccaggtgtcaattggtgccatggacaccctggagaaagaccaagccacaggaatctgccacttcttttatgacagcgctccgagtggggcttatgggacgatgacctacctaacaagagcagtggcttcttatttgcaggaattgttgcccaattcgggctgccagatgcaatagggtctcacctggaaacatgatcacactctcaatctgtcacgtgccccctagccttactgggaaccttctgtcccccaagatcccctgtgctatcaggaaagcatgtcccatcagaaacactctcggggggcaatggtagcactcaccctgaaactgatgtatgttaaagccacagagatagagctgaggagtcctgtgttcccccgcaaggagcaccccgggatcattttctaggttcatttctctggaacatttgctgtagcatctggtctcacggactctgaggaggaattggaaattggtctcttttgagtgcagagggaactgagacgccagcttaaattggctcttgcagagagttacagaaatagtttcgatgagctagtgacacatcctaaagatgcaaagatcctcctggcggcagtagccttgacaagggccacctcttcacaggatgcagtctgtctgtgcaccaaactcttcaccaaatagaacacttgtgtctctctgtggaatgggggttttcttgtgccttgcttgctttcatagccttccattttattggcatggctgccttgatgtaacataattctctgtccccaagatttagaaaattcctcttcgttcaccttggctcatggtcttccagggtttttatcctggctgtctatgaactagggttttctcctgccttaggaaaaatactgcatcttctggaatctagaaaaaaaaaaaaaaaaaagacaaggctcctcttatagccaggcaagcagttgtttagggctagacctgttgtccccgctcgcgtggggtgaacgccccgcagtggatactgtcctcctgtgctctgggcgaggcgtcatagggtgagcacaagtcagcagtgccatggaagtgaacaggcatgtccccgcagaaacaatgcttccctctgaaaaatagagccaggctaggaacctgtaccctcttggtagaagcactttggtcttcactctcttgggtgggtgcagttggaggcaccgattggaggagagcaaggttgagtcaggtgtcagggtctggcaaatcttttgccaatgccctagcaatggagtttctctccgggcattgtcttaccttgggggaaggaaacaaaaccaatgggaaaacagtttctgtaaataataaaccttgaaagacaaatgctcacctagtggccaggaggtgcgctctgtctggttgagagc

SEQ ID NO: 420064 - DNA, 1729 bp, Homo sapiens
ccccaccctctctcgctgtcctctcatatgatcctcttccgactcttcttcacacgctagctggatggggccatcaacagggtccccgtgggattctaccagagggtgtggaagatcctccagaagtgccacggtctctccatcgatggttatgtcctcccatcctcgacgacccgagagatgaccccgcatgagatcaagtttgctgtccatgtcgaatcggtgctgaaccgcgtgccgcagcccgagtaccggcagctgctggtggaagccatcatggtgctgacgctgctctcggacacggagatgaccagcatcgggggcatcatccacgtggaccagatcgtgcagatggccagtcagctgttcttgcaggaccaggtgtcaattggtgccatggacaccctggagaaagaccaagccacaggaatctgccacttcttttatgacagcgctccgagtggggcttatgggacgatgacctacctaacaagagcagtggcttcttatttgcaggaattgttgcccaattcgggctgccagatgcaatagggtctcacctggaaacatgatcacactctcaatctgtcacgtgccccctagccttactgggaaccttctgtcccccaagatcccctgtgctatcaggcctgaaactgatgtatgttaaagccacagagatagagctgaggagtcctgtgttcccccgcaaggagcaccccgggatcattttctaggttcatttctctggaacatttgctgtagcatctggtctcacggactctgaggaggaattggaaattggtctcttttgagtgcagagggaactgagacgccagcttaaattggctcttgcagagagttacagaaatagtttcgatgagctagtgacacatcctaaagatgcaaagatcctcctggcggcagtagccttgacaagggccacctcttcacaggatgcagtctgtctgtgcaccaaactcttcaccaaatagaacacttgtgtctctctgtggaatgggggttttcttgtgccttgcttgctttcatagccttccattttattggcatggctgccttgatgtaacataattctctgtccccaagatttagaaaattcctcttcgttcaccttggctcatggtcttccagggtttttatcctggctgtctatgaactagggttttctcctgccttaggaaaaatactgcatcttctggaatctagaaaaaaaaaaaaaaaaaagacaaggctcctcttatagccaggcaagcagttgtttagggctagacctgttgtccccgctcgcgtggggtgaacgccccgcagtggatactgtcctcctgtgctctgggcgaggcgtcatagggtgagcacaagtcagcagtgccatggaagtgaacaggcatgtccccgcagaaacaatgcttccctctgaaaaatagagccaggctaggaacctgtaccctcttggtagaagcactttggtcttcactctcttgggtgggtgcagttggaggcaccgattggaggagagcaaggttgagtcaggtgtcagggtctggcaaatcttttgccaatgccctagcaatggagtttctctccgggcattgtcttaccttgggggaaggaaacaaaaccaatgggaaaacagtttctgtaaataataaaccttgaaagacaaatgctcacctagtggccaggaggtgcgctctgtctggttgagagc

SEQ ID NO: 420065 - DNA, 5737 bp, Homo sapiens
tcctcccttggtagccactcttgtgacaggaaggccttcttcccagccggtgaagggtcacagtgtcgttaatgttcaaagtgtagcactcatgttgcaaaattacgggatggctaccagcactcgtgcttggctaacccatacgtggtcatcttgcgcgatcattgtgactgccggaagactcttgtctagccaccgcaggaaatattcacattgtggaaaggatctgtgcccctcagggttccaaacgttccactccgcggcaggggcgggggcgagtccggagggcgggtccaaggcgcccaggtggccgcggcagaagggcctgtttctctggccttggctgtggttggcagccggccggggagagaagggactcagggaggcaacctggttcccgcccgttgctgatttcgcagcggctctcccgggccgcccccttttccttcctcctcaggccgcgacttggagggttccgctccgcggcgggggcagagccaggggcggggctgagcgcggcctgggcgatctccccggcggctggggtgggctggcgtcttcttcgcgcccgggggacctcctcgcgaccgccgggacgtaaaaggggcttggcaggggcgtcctcgccccactcccggaacctggtttcccgctgctcccgcgagcgtcgggagcccagcaggcctggccgaggcgggaccttcgtcgctccagcccccgtccccgcccccgcgcctccccgccgcgcggagctctggttggcttgctttccaaccggactttggggctagcgtttagaaaagtctcgacctcctccggcccggtcccatcccaagaaccgactaaggctgtgagtgtccgggaaccagacccgcttggaggccacagccccgacgtcccgcgcccacgcggcagatcgggcgctgcggcctgggagcctcggggagatgcggagcaggagcaattccggggtccgcttggacgggtacgcgcggctggtgcagcaaaccatcctgtgttaccagaatcccgtcacggggctgctgtcagccagccatgagcagaaggatgcctgggtgcgggataacatctacagtatcctggccgtgtggggcctgggcatggcctaccgtaagaatgcagaccgcgatgaggacaaggccaaggcctacgagctggagcagaacgtggtgaagctgatgcgaggtcttctccagtgcatgatgagacaggtggccaaagtggagaagttcaaacacactcagagcaccaaggacagcctgcacgccaagtacaacaccgccacctgtggcacggtggtgggcgacgaccagtggggccacctccaggtggatgccacctctctcttcctcctgttcctggcccagatgaccgcctcaggcttacgtatcattttcactctcgatgaggtggccttcatacagaatcttgtcttttacatagaagctgcatataaagtcgctgattatggaatgtgggagcgtggagataagactaatcagggcatcccggaattgaatgcaagctccgtaggaatggccaaggcagctcttgaggcaattgatgaactggacctttttggagcccatggaggacgcaagtcagtgattcatgttctgccagatgaggtcgagcactgccagtctattctgttctccatgctgccaagagcgtcgacatctaaagaaattgatgctggacttctttccattatttccttcccggcctttgcagtggaagatgtaaaccttgtaaatgtgaccaaaaatgaaattatttctaagctccaggggcgttatggatgctgtcgcttccttcgagatggttataaaactccaagagaggaccctaatcgactgcattatgaccctgctgaactcaagctcttcgaaaacattgaatgtgagtggcctgtgttttggacatattttataatagatggagtcttcagtggtgatgctgttcaggtccaagaataccgagaggccctggagggaatactcatcagaggcaagaatgggatccgcctggtgcctgaactctacgctgtcccgcctaacaaggtagatgaagagtacaagaatcctcacacagtagaccgagttcctatggggaaggtgcctcatctgtggggccaatccttgtacatcctcagctcgctgttggcagagggattccttgccgctggtgaaatcgatcccttaaatagaagattttccacttcagtcaaacctgatgttgtagtacaagttactgttttggcagaaaacaatcacattaaggacttattgaggaaacacggggtgaacgtccagagtatcgcggacattcatccaattcaagtccagccgggccggattcttagtcacatatatgccaagcttggacggaataagaatatgaatttgagtgggcgaccgtatcgacatattggtgtccttggaacctctaaactatatgtgattaggaaccaaatctttacttttacaccccagttcaccgaccagcatcacttctacctggccctcgacaatgagatgatcgtggagatgctaaggatcgagctggcctacctgtgcacctgctggaggatgacgggcagacccacactcaccttccccatcagtcgcaccatgctcacaaatgatggctcagacattcattctgctgtgctctccacaattagaaaactagaggatggatattttggaggagccagagtaaaattagggaacctttcggaatttctcaccacatcgttctacacatatctgacttttctggatccagactgtgatgagaagttgtttgacaatgccagcgaagggactttcagtcctgatagtgattcagatttggtaggatatctggaagacacctgtaatcaagaaagccaagacgaacttgaccattatatcaaccaccttctgcaaagcacatcgttgaggtcctatctgcctcctctttgtaagaacacagaagaccgccatgtcttcagtgctatccactccacgcgggacatactttctgtgatggcaaaagcaaagggtttggaagttccatttgttcccatgactttgccgactaaagttctaagtgcccaccgtaaatcactgaatcttgttgattctcctcagccactcctagaaaaggttcctgaaagtgactttcagtggcccagagatgaccatggtgacgtggactgtgagaagctggttgagcagctaaaagattgttcgaacctacaggaccaagcagacattctgtacattctttatgtcataaagggtcccagctgggacacaaatctctctggacagcacggggtcaccgttcaaaaccttcttggtgagctctatgggaaagccggcttgaaccaggagtggggtctgattcgctacatctcaggccttctcaggaagaaagtggaggtcctggctgaggcctgcacagacctgctttcgcaccagaagcagctcaccgtgggcctgccgcccgagccccgggagaagatcatctctgcgccccttcccccagaggagctcacaaaactcatctacgaggccagtgggcaggacatcagcattgccgtcctcacgcaggagattgtggtttacctggccatgtatgtcagggcgcagcccagcctctttgtggagatgctgagactccggattggactgatcattcaggtgatggccacggagctggcacggagcctgaactgctcaggagaagaggcttctgaaagtttgatgaacctcagccctttcgatatgaaaaatctcctgcaccatattctaagtgggaaagagtttggcgttgaaagaagtgtgcgccctatccactcctccacatccagccctaccatctccatccacgaggtgggccataccggagtcaccaaaactgagaggagtggcattaacagactgaggagtgaaatgaaacagatgactaggcggtttagtgctgatgaacagttcttttctgtgggccaggccgcgtccagcagtgcgcattcctccaagtctgcgaggtccagcaccccatcctcgcccactggcacgtcatcctcagactcgggaggacatcacatcggctggggtgagcggcagggccagtggctgcgcaggagaaggctggatggggccatcaacagggtccccgtgggattctaccagagggtgtggaagatcctccagaagtgccacggtctctccatcgatggttatgtcctcccatcctcgacgacccgagagatgaccccgcatgagatcaagtttgctgtccatgtcgaatcggtgctgaaccgcgtgccgcagcccgagtaccggcagctgctggtggaagccatcatggtgctgacgctgctctcggacacggagatgaccagcatcgggggcatcatccacgtggaccagatcgtgcagatggccagtcagctgttcttgcaggaccaggtgtcaattggtgccatggacaccctggagaaagaccaagccacaggaatctgccacttcttttatgacagcgctccgagtggggcttatgggacgatgacctacctaacaagagcagtggcttcttatttgcaggaattgttgcccaattcgggctgccagatgcaatagggtctcacctggaaacatgatcacactctcaatctgtcacgtgccccctagccttactgggaaccttctgtcccccaagatcccctgtgctatcaggaaagcatgtcccatcagaaacactctcggggggcaatggtagcactcaccctgaaactgatgtatgttaaagccacagagatagagctgaggagtcctgtgttcccccgcaaggagcaccccgggatcattttctaggttcatttctctggaacatttgctgtagcatctggtctcacggacttccacaggcccagggactcgaggggtggggctccattaggagatcagtcggggcatggtgaaggggaggagaggttgtcaaggctcagctgcctggacagagaggatggaaatactccctgtgtgaaaaaagaaaaggaaaagaccccagatcaggaggcaggaaatgcagtttggcagagttggttgatgccacttacttctggacaagaagactggaggcttggccacccttgatggaaattgcagcagaaccatctctctattctgttgattcccgcaccaggctggcaaatagcttttgtcttttctgcttccttgttgcaaaagggtacaaaagcctcccacccaccccacccccaatcgccctttgtgccattatctttcaaggtgacttagcttttgaagtccctgccatctgctctgcaggcctgtactttgcaggatgtgagagcaccgcgttcccagaatgccttctgttctacccgacgtggctactgatagctctgcctgtgaggggaaaagaaagctgcgctgtggcccccttaaagcccagtccctgctgtctccctcaaaaagccacttaggaaagccacggccttgaggtaccaagagagttctttgagaaatgagagtggaaactgtgagagaggctgctctgcagtcgagtgctgggcacgtctgacgatgcctgggagaggaaaaaattccatcaaaaaactaccatggttttctttagaggaacatatgtgcacttttggcaaaacatgccttctcaggagagctggaatagttggaaccaa

SEQ ID NO: 420066 - DNA, 5477 bp, Homo sapiens
tcctcccttggtagccactcttgtgacaggaaggccttcttcccagccggtgaagggtcacagtgtcgttaatgttcaaagtgtagcactcatgttgcaaaattacgggatggctaccagcactcgtgcttggctaacccatacgtggtcatcttgcgcgatcattgtgactgccggaagactcttgtctagccaccgcaggaaatattcacattgtggaaaggatctgtgcccctcagggttccaaacgttccactccgcggcaggggcgggggcgagtccggagggcgggtccaaggcgcccaggtggccgcggcagaagggcctgtttctctggccttggctgtggttggcagccggccggggagagaagggactcagggaggcaacctggttcccgcccgttgctgatttcgcagcggctctcccgggccgcccccttttccttcctcctcaggccgcgacttggagggttccgctccgcggcgggggcagagccaggggcggggctgagcgcggcctgggcgatctccccggcggctggggtgggctggcgtcttcttcgcgcccgggggacctcctcgcgaccgccgggacgtaaaaggggcttggcaggggcgtcctcgccccactcccggaacctggtttcccgctgctcccgcgagcgtcgggagcccagcaggcctggccgaggcgggaccttcgtcgctccagcccccgtccccgcccccgcgcctccccgccgcgcggagctctggttggcttgctttccaaccggactttggggctagcgtttagaaaagtctcgacctcctccggcccggtcccatcccaagaaccgactaaggctgtgagtgtccgggaaccagacccgcttggaggccacagccccgacgtcccgcgcccacgcggcagatcgggcgctgcggcctgggagcctcggggagatgcggagcaggagcaattccggggtccgcttggacgggtacgcgcggctggtgcagcaaaccatcctgtgttaccagaatcccgtcacggggctgctgtcagccagccatgagcagaaggatgcctgggtgcgggataacatctacagtatcctggccgtgtggggcctgggcatggcctaccgtaagaatgcagaccgcgatgaggacaaggccaaggcctacgagctggagcagaacgtggtgaagctgatgcgaggtcttctccagtgcatgatgagacaggtggccaaagtggagaagttcaaacacactcagagcaccaaggacagcctgcacgccaagtacaacaccgccacctgtggcacggtggtgggcgacgaccagtggggccacctccaggtggatgccacctctctcttcctcctgttcctggcccagatgaccgcctcaggcttacgtatcattttcactctcgatgaggtggccttcatacagaatcttgtcttttacatagaagctgcatataaagtcgctgattatggaatgtgggagcgtggagataagactaatcagggcatcccggaattgaatgcaagctccgtaggaatggccaaggcagctcttgaggcaattgatgaactggacctttttggagcccatggaggacgcaagtcagtgattcatgttctgccagatgaggtcgagcactgccagtctattctgttctccatgctgccaagagcgtcgacatctaaagaaattgatgctggacttctttccattatttccttcccggcctttgcagtggaagatgtaaaccttgtaaatgtgaccaaaaatgaaattatttctaagctccaggggcgttatggatgctgtcgcttccttcgagatggttataaaactccaagagaggaccctaatcgactgcattatgaccctgctgaactcaagctcttcgaaaacattgaatgtgagtggcctgtgttttggacatattttataatagatggagtcttcagtggtgatgctgttcaggtccaagaataccgagaggccctggagggaatactcatcagaggcaagaatgggatccgcctggtgcctgaactctacgctgtcccgcctaacaaggtagatgaagagtacaagaatcctcacacagtagaccgagttcctatggggaaggtgcctcatctgtggggccaatccttgtacatcctcagctcgctgttggcagagggattccttgccgctggtgaaatcgatcccttaaatagaagattttccacttcagtcaaacctgatgttgtagtacaagttactgttttggcagaaaacaatcacattaaggacttattgaggaaacacggggtgaacgtccagagtatcgcggacattcatccaattcaagtccagccgggccggattcttagtcacatatatgccaagcttggacggaataagaatatgaatttgagtgggcgaccgtatcgacatattggtgtccttggaacctctaaactatatgtgattaggaaccaaatctttacttttacaccccagttcaccgaccagcatcacttctacctggccctcgacaatgagatgatcgtggagatgctaaggatcgagctggcctacctgtgcacctgctggaggatgacgggcagacccacactcaccttccccatcagtcgcaccatgctcacaaatgatggctcagacattcattctgctgtgctctccacaattagaaaactagaggatggatattttggaggagccagagtaaaattagggaacctttcggaatttctcaccacatcgttctacacatatctgacttttctggatccagactgtgatgagaagttgtttgacaatgccagcgaagggactttcagtcctgatagtgattcagatttggtaggatatctggaagacacctgtaatcaagaaagccaagacgaacttgaccattatatcaaccaccttctgcaaagcacatcgttgaggtcctatctgcctcctctttgtaagaacacagaagaccgccatgtcttcagtgctatccactccacgcgggacatactttctgtgatggcaaaagcaaagggtttggaagttccatttgttcccatgactttgccgactaaagttctaagtgcccaccgtaaatcactgaatcttgttgattctcctcagccactcctagaaaaggttcctgaaagtgactttcagtggcccagagatgaccatggtgacgtggactgtgagaagctggttgagcagctaaaagattgttcgaacctacaggaccaagcagacattctgtacattctttatgtcataaagggtcccagctgggacacaaatctctctggacagcacggggtcaccgttcaaaaccttcttggtgagctctatgggaaagccggcttgaaccaggagtggggtctgattcgctacatctcaggccttctcaggaagaaagtggaggtcctggctgaggcctgcacagacctgctttcgcaccagaagcagctcaccgtgggcctgccgcccgagccccgggagaagatcatctctgcgccccttcccccagaggagctcacaaaactcatctacgaggccagtgggcaggacatcagcattgccgtcctcacgcaggagattgtggtttacctggccatgtatgtcagggcgcagcccagcctctttgtggagatgctgagactccggattggactgatcattcaggtgatggccacggagctggcacggagcctgaactgctcaggagaagaggcttctgaaagtttgatgaacctcagccctttcgatatgaaaaatctcctgcaccatattctaagtgggaaagagtttggcgttgaaagaagtgtgcgccctatccactcctccacatccagccctaccatctccatccacgaggtgggccataccggagtcaccaaaactgagaggagtggcattaacagactgaggagtgaaatgaaacagatgactaggcggtttagtgctgatgaacagttcttttctgtgggccaggccgcgtccagcagtgcgcattcctccaagtctgcgaggtccagcaccccatcctcgcccactggcacgtcatcctcagactcgggaggacatcacatcggctggggtgagcggcagggccagtggctgcgcaggagaaggctggatggggccatcaacagggtccccgtgggattctaccagagggtgtggaagatcctccagaagtgccacggtctctccatcgatggttatgtcctcccatcctcgacgacccgagagatgaccccgcatgagatcaagtttgctgtccatgtcgaatcggtgctgaaccgcgtgccgcagcccgagtaccggcagctgctggtggaagccatcatggtgctgacgctgctctcggacacggagatgaccagcatcgggggcatcatccacgtggaccagatcgtgcagatggccagtcagctgttcttgcaggaccaggtgggggtgccagggagctgggttggctggcatttatctctgttgaggctggagattcctgaaactgatgtatgttaaagccacagagatagagctgaggagtcctgtgttcccccgcaaggagcaccccgggatcattttctaggttcatttctctggaacatttgctgtagcatctggtctcacggacttccacaggcccagggactcgaggggtggggctccattaggagatcagtcggggcatggtgaaggggaggagaggttgtcaaggctcagctgcctggacagagaggatggaaatactccctgtgtgaaaaaagaaaaggaaaagaccccagatcaggaggcaggaaatgcagtttggcagagttggttgatgccacttacttctggacaagaagactggaggcttggccacccttgatggaaattgcagcagaaccatctctctattctgttgattcccgcaccaggctggcaaatagcttttgtcttttctgcttccttgttgcaaaagggtacaaaagcctcccacccaccccacccccaatcgccctttgtgccattatctttcaaggtgacttagcttttgaagtccctgccatctgctctgcaggcctgtactttgcaggatgtgagagcaccgcgttcccagaatgccttctgttctacccgacgtggctactgatagctctgcctgtgaggggaaaagaaagctgcgctgtggcccccttaaagcccagtccctgctgtctccctcaaaaagccacttaggaaagccacggccttgaggtaccaagagagttctttgagaaatgagagtggaaactgtgagagaggctgctctgcagtcgagtgctgggcacgtctgacgatgcctgggagaggaaaaaattccatcaaaaaactaccatggttttctttagaggaacatatgtgcacttttggcaaaacatgccttctcaggagagctggaatagttggaaccaa

SEQ ID NO: 420067 - DNA, 4577 bp, Homo sapiens
tcctcccttggtagccactcttgtgacaggaaggccttcttcccagccggtgaagggtcacagtgtcgttaatgttcaaagtgtagcactcatgttgcaaaattacgggatggctaccagcactcgtgcttggctaacccatacgtggtcatcttgcgcgatcattgtgactgccggaagactcttgtctagccaccgcaggaaatattcacattgtggaaaggatctgtgcccctcagggttccaaacgttccactccgcggcaggggcgggggcgagtccggagggcgggtccaaggcgcccaggtggccgcggcagaagggcctgtttctctggccttggctgtggttggcagccggccggggagagaagggactcagggaggcaacctggttcccgcccgttgctgatttcgcagcggctctcccgggccgcccccttttccttcctcctcaggccgcgacttggagggttccgctccgcggcgggggcagagccaggggcggggctgagcgcggcctgggcgatctccccggcggctggggtgggctggcgtcttcttcgcgcccgggggacctcctcgcgaccgccgggacgtaaaaggggcttggcaggggcgtcctcgccccactcccggaacctggtttcccgctgctcccgcgagcgtcgggagcccagcaggcctggccgaggcgggaccttcgtcgctccagcccccgtccccgcccccgcgcctccccgccgcgcggagctctggttggcttgctttccaaccggactttggggctagcgtttagaaaagtctcgacctcctccggcccggtcccatcccaagaaccgactaaggctgtgagtgtccgggaaccagacccgcttggaggccacagccccgacgtcccgcgcccacgcggcagatcgggcgctgcggcctgggagcctcggggagatgcggagcaggagcaattccggggtccgcttggacgggtacgcgcggctggtgcagcaaaccatcctgtgttaccagaatcccgtcacggggctgctgtcagccagccatgagcagaaggatgcctgggtgcgggataacatctacagtatcctggccgtgtggggcctgggcatggcctaccgtaagaatgcagaccgcgatgaggacaaggccaaggcctacgagctggagcagaacgtggtgaagctgatgcgaggtcttctccagtgcatgatgagacaggtggccaaagtggagaagttcaaacacactcagagcaccaaggacagcctgcacgccaagtacaacaccgccacctgtggcacggtggtgggcgacgaccagtggggccacctccaggtggatgccacctctctcttcctcctgttcctggcccagatgaccgcctcaggcttacgtatcattttcactctcgatgaggtggccttcatacagaatcttgtcttttacatagaagctgcatataaagtcgctgattatggaatgtgggagcgtggagataagactaatcagggcatcccggaattgaatgcaagctccgtaggaatggccaaggcagctcttgaggcaattgatgaactggacctttttggagcccatggaggacgcaagtcagtgattcatgttctgccagatgaggtcgagcactgccagtctattctgttctccatgctgccaagagcgtcgacatctaaagaaattgatgctggacttctttccattatttccttcccggcctttgcagtggaagatgtaaaccttgtaaatgtgaccaaaaatgaaattatttctaagctccaggggcgttatggatgctgtcgcttccttcgagatggttataaaactccaagagaggaccctaatcgactgcattatgaccctgctgaactcaagctcttcgaaaacattgaatgtgagtggcctgtgttttggacatattttataatagatggagtcttcagtggtgatgctgttcaggtccaagaataccgagaggccctggagggaatactcatcagaggcaagaatgggatccgcctggtgcctgaactctacgctgtcccgcctaacaaggtagatgaagagtacaagaatcctcacacagtagaccgagttcctatggggaaggtgcctcatctgtggggccaatccttgtacatcctcagctcgctgttggcagagggattccttgccgctggtgaaatcgatcccttaaatagaagattttccacttcagtcaaacctgatgttgtagtacaagttactgttttggcagaaaacaatcacattaaggacttattgaggaaacacggggtgaacgtccagagtatcgcggacattcatccaattcaagtccagccgggccggattcttagtcacatatatgccaagcttggacggaataagaatatgaatttgagtgggcgaccgtatcgacatattggtgtccttggaacctctaaactatatgtgattaggaaccaaatctttacttttacaccccagttcaccgaccagcatcacttctacctggccctcgacaatgagatgatcgtggagatgctaaggatcgagctggcctacctgtgcacctgctggaggatgacgggcagacccacactcaccttccccatcagtcgcaccatgctcacaaatgatggctcagacattcattctgctgtgctctccacaattagaaaactagaggatggatattttggaggagccagagtaaaattagggaacctttcggaatttctcaccacatcgttctacacatatctgacttttctggatccagactgtgatgagaagttgtttgacaatgccagcgaagggactttcagtcctgatagtgattcagatttggtaggatatctggaagacacctgtaatcaagaaagccaagacgaacttgaccattatatcaaccaccttctgcaaagcacatcgttgaggtcctatctgcctcctctttgtaagaacacagaagaccgccatgtcttcagtgctatccactccacgcgggacatactttctgtgatggcaaaagcaaagggtttggaagttccatttgttcccatgactttgccgactaaagttctaagtgcccaccgtaaatcactgaatcttgttgattctcctcagccactcctagaaaaggttcctgaaagtgactttcagtggcccagagatgaccatggtgacgtggactgtgagaagctggttgagcagctaaaagattgttcgaacctacaggaccaagcagacattctgtacattctttatgtcataaagggtcccagctgggacacaaatctctctggacagcacggggtcaccgttcaaaaccttcttggtgagctctatgggaaagccggcttgaaccaggagtggggtctgattcgctacatctcaggccttctcaggaagaaagtggaggtcctggctgaggcctgcacagacctgctttcgcaccagaagcagctcaccgtgggcctgccgcccgagccccgggagaagatcatctctgcgccccttcccccagaggagctcacaaaactcatctacgaggccagtgggcaggacatcagcattgccgtcctcacgcaggagattgtggtttacctggccatgtatgtcagggcgcagcccagcctctttgtggagatgctgagactccggattggactgatcattcaggtgatggccacggagctggcacggagcctgaactgctcaggagaagaggcttctgaaagtttgatgaacctcagccctttcgatatgaaaaatctcctgcaccatattctaagtgggaaagagtttggcgttgaaagaagtgtgcgccctatccactcctccacatccagccctaccatctccatccacgaggtgggccataccggagtcaccaaaactgagaggagtggcattaacagactgaggagtgaaatgaaacagatgactaggcggtttagtgctgatgaacagttcttttctgtgggccaggccgcgtccagcagtgcgcattcctccaagtctgcgaggtccagcaccccatcctcgcccactggcacgtcatcctcagactcgggaggacatcacatcggctggggtgagcggcagggccagtggctgcgcaggagaaggctggatggggccatcaacagggtccccgtgggattctaccagagggtgtggaagatcctccagaagtgccacggtctctccatcgatggttatgtcctcccatcctcgacgacccgagagatgaccccgcatgagatcaagtttgctgtccatgtcgaatcggtgctgaaccgcgtgccgcagcccgagtaccggcagctgctggtggaagccatcatggtgctgacgctgctctcggacacggagatgaccagcatcgggggcatcatccacgtggaccagatcgtgcagatggccagtcagctgttcttgcaggaccaggtgggggtgccagggagctgggttggctggcatttatctctgttgaggctggagattctgtgtccaataggaaagaatatactcgaaccaaga

SEQ ID NO: 420068 - DNA, 4550 bp, Homo sapiens
tcctcccttggtagccactcttgtgacaggaaggccttcttcccagccggtgaagggtcacagtgtcgttaatgttcaaagtgtagcactcatgttgcaaaattacgggatggctaccagcactcgtgcttggctaacccatacgtggtcatcttgcgcgatcattgtgactgccggaagactcttgtctagccaccgcaggaaatattcacattgtggaaaggatctgtgcccctcagggttccaaacgttccactccgcggcaggggcgggggcgagtccggagggcgggtccaaggcgcccaggtggccgcggcagaagggcctgtttctctggccttggctgtggttggcagccggccggggagagaagggactcagggaggcaacctggttcccgcccgttgctgatttcgcagcggctctcccgggccgcccccttttccttcctcctcaggccgcgacttggagggttccgctccgcggcgggggcagagccaggggcggggctgagcgcggcctgggcgatctccccggcggctggggtgggctggcgtcttcttcgcgcccgggggacctcctcgcgaccgccgggacgtaaaaggggcttggcaggggcgtcctcgccccactcccggaacctggtttcccgctgctcccgcgagcgtcgggagcccagcaggcctggccgaggcgggaccttcgtcgctccagcccccgtccccgcccccgcgcctccccgccgcgcggagctctggttggcttgctttccaaccggactttggggctagcgtttagaaaagtctcgacctcctccggcccggtcccatcccaagaaccgactaaggctgtgagtgtccgggaaccagacccgcttggaggccacagccccgacgtcccgcgcccacgcggcagatcgggcgctgcggcctgggagcctcggggagatgcggagcaggagcaattccggggtccgcttggacgggtacgcgcggctggtgcagcaaaccatcctgtgttaccagaatcccgtcacggggctgctgtcagccagccatgagcagaaggatgcctgggtgcgggataacatctacagtatcctggccgtgtggggcctgggcatggcctaccgtaagaatgcagaccgcgatgaggacaaggccaaggcctacgagctggagcagaacgtggtgaagctgatgcgaggtcttctccagtgcatgatgagacaggtggccaaagtggagaagttcaaacacactcagagcaccaaggacagcctgcacgccaagtacaacaccgccacctgtggcacggtggtgggcgacgaccagtggggccacctccaggtggatgccacctctctcttcctcctgttcctggcccagatgaccgcctcaggcttacgtatcattttcactctcgatgaggtggccttcatacagaatcttgtcttttacatagaagctgcatataaagtcgctgattatggaatgtgggagcgtggagataagactaatcagggcatcccggaattgaatgcaagctccgtaggaatggccaaggcagctcttgaggcaattgatgaactggacctttttggagcccatggaggacgcaagtcagtgattcatgttctgccagatgaggtcgagcactgccagtctattctgttctccatgctgccaagagcgtcgacatctaaagaaattgatgctggacttctttccattatttccttcccggcctttgcagtggaagatgtaaaccttgtaaatgtgaccaaaaatgaaattatttctaagctccaggggcgttatggatgctgtcgcttccttcgagatggttataaaactccaagagaggaccctaatcgactgcattatgaccctgctgaactcaagctcttcgaaaacattgaatgtgagtggcctgtgttttggacatattttataatagatggagtcttcagtggtgatgctgttcaggtccaagaataccgagaggccctggagggaatactcatcagaggcaagaatgggatccgcctggtgcctgaactctacgctgtcccgcctaacaaggtagatgaagagtacaagaatcctcacacagtagaccgagttcctatggggaaggtgcctcatctgtggggccaatccttgtacatcctcagctcgctgttggcagagggattccttgccgctggtgaaatcgatcccttaaatagaagattttccacttcagtcaaacctgatgttgtagtacaagttactgttttggcagaaaacaatcacattaaggacttattgaggaaacacggggtgaacgtccagagtatcgcggacattcatccaattcaagtccagccgggccggattcttagtcacatatatgccaagcttggacggaataagaatatgaatttgagtgggcgaccgtatcgacatattggtgtccttggaacctctaaactatatgtgattaggaaccaaatctttacttttacaccccagttcaccgaccagcatcacttctacctggccctcgacaatgagatgatcgtggagatgctaaggatcgagctggcctacctgtgcacctgctggaggatgacgggcagacccacactcaccttccccatcagtcgcaccatgctcacaaatgatggctcagacattcattctgctgtgctctccacaattagaaaactagaggatggatattttggaggagccagagtaaaattagggaacctttcggaatttctcaccacatcgttctacacatatctgacttttctggatccagactgtgatgagaagttgtttgacaatgccagcgaagggactttcagtcctgatagtgattcagatttggtaggatatctggaagacacctgtaatcaagaaagccaagacgaacttgaccattatatcaaccaccttctgcaaagcacatcgttgaggtcctatctgcctcctctttgtaagaacacagaagaccgccatgtcttcagtgctatccactccacgcgggacatactttctgtgatggcaaaagcaaagggtttggaagttccatttgttcccatgactttgccgactaaagttctaagtgcccaccgtaaatcactgaatcttgttgattctcctcagccactcctagaaaaggttcctgaaagtgactttcagtggcccagagatgaccatggtgacgtggactgtgagaagctggttgagcagctaaaagattgttcgaacctacaggaccaagcagacattctgtacattctttatgtcataaagggtcccagctgggacacaaatctctctggacagcacggggtcaccgttcaaaaccttcttggtgagctctatgggaaagccggcttgaaccaggagtggggtctgattcgctacatctcaggccttctcaggaagaaagtggaggtcctggctgaggcctgcacagacctgctttcgcaccagaagcagctcaccgtgggcctgccgcccgagccccgggagaagatcatctctgcgccccttcccccagaggagctcacaaaactcatctacgaggccagtgggcaggacatcagcattgccgtcctcacgcaggagattgtggtttacctggccatgtatgtcagggcgcagcccagcctctttgtggagatgctgagactccggattggactgatcattcaggtgatggccacggagctggcacggagcctgaactgctcaggagaagaggcttctgaaagtttgatgaacctcagccctttcgatatgaaaaatctcctgcaccatattctaagtgggaaagagtttggcgttgaaagaagtgatacgaggtctcaccatgctgcccaggctggtcttgaactcctgggctcaagcagtcttcccacctcggcctcccaaagtgctgggattacaggtgtgagccaccgtgcctggcctcggtgcgccctatccactcctccacatccagccctaccatctccatccacgaggtgggccataccggagtcaccaaaactgagaggagtggcattaacagactgaggagtgaaatgaaacaggtaagaacacctcagtggcagcgagggatgagtggtggtctccctacctgggcttaccccagaaagcgacagaaacctagggcatgaggctgcagcccactgtctgtagagtgggaggtcccttctgtctgggatctgaacacacccctgtccccagatagatattccagagccggtcatgcgcacccttacccactcatccttaaccttaacgtgatgttctcatgaacgttccagaaaatacccttgtccatgtttgcctctgttcccgagaaccactcttaggagtgggccacagccattgaaaaagtagagtcatgcaaaaagtcaccgaatcatctgtgtccttcaaacgaaatagcaagagggctctggaaatagaccagaatgcccatgatacttggattctccaccagccacaggggtctcttttcttagttcacctttaattcctggt

SEQ ID NO: 420069 - DNA, 2878 bp, Homo sapiens
tcctcccttggtagccactcttgtgacaggaaggccttcttcccagccggtgaagggtcacagtgtcgttaatgttcaaagtgtagcactcatgttgcaaaattacgggatggctaccagcactcgtgcttggctaacccatacgtggtcatcttgcgcgatcattgtgactgccggaagactcttgtctagccaccgcaggaaatattcacattgtggaaaggatctgtgcccctcagggttccaaacgttccactccgcggcaggggcgggggcgagtccggagggcgggtccaaggcgcccaggtggccgcggcagaagggcctgtttctctggccttggctgtggttggcagccggccggggagagaagggactcagggaggcaacctggttcccgcccgttgctgatttcgcagcggctctcccgggccgcccccttttccttcctcctcaggccgcgacttggagggttccgctccgcggcgggggcagagccaggggcggggctgagcgcggcctgggcgatctccccggcggctggggtgggctggcgtcttcttcgcgcccgggggacctcctcgcgaccgccgggacgtaaaaggggcttggcaggggcgtcctcgccccactcccggaacctggtttcccgctgctcccgcgagcgtcgggagcccagcaggcctggccgaggcgggaccttcgtcgctccagcccccgtccccgcccccgcgcctccccgccgcgcggagctctggttggcttgctttccaaccggactttggggctagcgtttagaaaagtctcgacctcctccggcccggtcccatcccaagaaccgactaaggctgtgagtgtccgggaaccagacccgcttggaggccacagccccgacgtcccgcgcccacgcggcagatcgggcgctgcggcctgggagcctcggggagatgcggagcaggagcaattccggggtccgcttggacgggtacgcgcggctggtgcagcaaaccatcctgtgttaccagaatcccgtcacggggctgctgtcagccagccatgagcagaaggatgcctgggtgcgggataacatctacagtatcctggccgtgtggggcctgggcatggcctaccgtaagaatgcagaccgcgatgaggacaaggccaaggcctacgagctggagcagaacgtggtgaagctgatgcgaggtcttctccagtgcatgatgagacaggtggccaaagtggagaagttcaaacacactcagagcaccaaggacagcctgcacgccaagtacaacaccgccacctgtggcacggtggtgggcgacgaccagtggggccacctccaggtggatgccacctctctcttcctcctgttcctggcccagatgaccgcctcaggcttacgtatcattttcactctcgatgaggtggccttcatacagaatcttgtcttttacatagaagctgcatataaagtcgctgattatggaatgtgggagcgtggagataagactaatcagggcatcccggaattgaatgcaagctccgtaggaatggccaaggcagctcttgaggcaattgatgaactggacctttttggagcccatggaggacgcaagtcagtgattcatgttctgccagatgaggtcgagcactgccagtctattctgttctccatgctgccaagagcgtcgacatctaaagaaattgatgctggacttctttccattatttccttcccggcctttgcagtggaagatgtaaaccttgtaaatgtgaccaaaaatgaaattatttctaagctccaggggcgttatggatgctgtcgcttccttcgagatggttataaaactccaagagaggaccctaatcgactgcattatgaccctgctgaactcaagctcttcgaaaacattgaatgtgagtggcctgtgttttggacatattttataatagatggagtcttcagtggtgatgctgttcaggtccaagaataccgagaggccctggagggaatactcatcagaggcaagaatgggatccgcctggtgcctgaactctacgctgtcccgcctaacaaggtagatgaagagtacaagaatcctcacacagtagaccgagttcctatggggaaggtgcctcatctgtggggccaatccttgtacatcctcagctcgctgttggcagagggattccttgccgctggtgaaatcgatcccttaaatagaagattttccacttcagtcaaacctgatgttgtagtacaagttactgttttggcagaaaacaatcacattaaggacttattgaggaaacacggggtgaacgtccagagtatcgcggacattcatccaattcaagtccagccgggccggattcttagtcacatatatgccaagcttggacggaataagaatatgaatttgagtgggcgaccgtatcgacatattggtgtccttggaacctctaaactatatgtgattaggaaccaaatctttacttttacaccccagttcaccgaccagcatcacttctacctggccctcgacaatgagatgatcgtggagatgctaaggatcgagctggcctacctgtgcacctgctggaggatgacgggcagacccacactcaccttccccatcagtcgcaccatgctcagtaactccagggatttcagcaggctccctcctgccccaggggtggtttgggctcttacaaatgtttaaaatggctcccatggccagaactaagcactgaaggggcttcttagcagtttggtttcttatctcgggaatcttctatgccagaaatattttaattagatggtgttgatgaaaatgtttcagtgcataacggaaaaaaagtctgcccagac

SEQ ID NO: 420070 - DNA, 110 bp, Homo sapiens
gtgacacccctttgccttgttcgtcctttacttcctgttctttctggcttgaatgtggaaagtgaggctgtgactccgcagcgtgtgaatgtgtagagggcggctctatc

SEQ ID NO: 420071 - DNA, 820 bp, Homo sapiens
tgaaatgcgctctattctgcctccagtgccacggtctctccatcgatggttatgtcctcccatcctcgacgacccgagaggtacgatgagaaaaacgcagaggcgggcccctctgtgggttcacaataagggcttcattgcatggactctgacctcttgtgctccttttgggctcattctaattgacaggccatttgtagctctgagctgtctagccccttcaccctcatatttggcaaaaatgtctttccagcatttattggcatcagcctttttcttcacctgagactcagcatttctgggctagcaagctctttgcatttgccagacaccccttagaaccctggtgaaagaaaggagccaatctccatgccaccctggcctgccccatgggcagccttctcggcccttttctccaactaaaaacagtaatcgtccctaggtgatttgtcattctttttaacatggatttttttttagttttaccccacccaaagcaccatgcttcatgctggaaggaataatgaagaggaaagagaaaccagaaatggtccctgctccctggaagctgtagtcgatggggggaagggtagataaatcaggcgaggacaggctggctcctggaggcatactccagcctcctgctctgagggccactgccagcaggatccagggagtggccagaaaaggggcagcagtggcgctgagccccgagcccaggcactgctacggtcacccttggttactcggtgattgattgatagggctgcatctgtcctctcactggtggttgcctgcctgtccctttggtagatgaccc

SEQ ID NO: 420072 - DNA, 391 bp, Homo sapiens
tactctgcacacttccgtttactcctttaagagctgagtgctgcacctgtgctgctctcggtgctggagacacagcgctggccaggcagagaaggccctcattgtcaagtgggggagacaggggcagatcctgcctcgggttggatgctgtagagttcctgagaaccacgtgtgtgtgtttcccacccagtgcgccctatccactcctccacatccagccctaccatctccatccacgaggtgggccataccggagtcaccaaaactgagaggagtggcattaacagactgaggagtgaaatgaaacaggtaagaacacctcagtggcagcgagggatgagtggtggtctccctacctgggcttaccccagaaagcgacagaaacctaggg

SEQ ID NO: 420073 - DNA, 468 bp, Homo sapiens
cttctggactaaaatccttgctctgttggaaccttccccgcatcaatccaacctgtaccagaggtcccaaatctctctcatccctttctactcataggcacacacaggaaagtggagcccttcctttccttctccttattttccttccttccctccttccttccctcttttcggagattagacactcactgttatgccttacttaagacttcatttttgatgcctttggaagaaaaatgaaaatgagggtaaaagggtttatttcctagtgtgatatttgtaatttgtgactggcagctctctgcaacatggcttcataacctcattgtttttctttgctaggcttacgtatcattttcactctcgatgaggtggccttcatacagaatcttgtcttttacatagaagctgcatataaagtcgctgtaagtatcaaccctggtagtcttttcagatgttccagtcaac

SEQ ID NO: 420074 - DNA, 1569 bp, Homo sapiens
atcgtgcataagatcaccttatcgtgcagaagatcacctcatcgtgcagaagatcacttccatgtaggggttggtagcttggtccaggaaacccttgtagaagttggcagcccagctgaagagatccctgaggaggtcatccagccataccaggagttctctgtggaggttggcaggctggcccaggagacttctgcgatcaatctgttatctcagggcatccctgagattgataaaccatcccaagagttccctgaggagattgatctgcaggcccaggaggtccctgaggagataaattagaagtcctgggtggtccctgaagtgattgatcagctgcctggagagggtattcctcaagcccagcatccatctggtgatccaaaccctcagagccagtctctagcccatgaccagcactcaccccttccaccagcaacatgtgattaattttctcattagtggtatcacactataccagccatttgagccagcaaccttttctgttggctaactcactggccagctctcaccagcggtgtctggggaagtagttctctttgtatgaagcatacctgtgccagagctgtggttgaggaggagccagttttaggttcgaagaagccattggctcctcacttagccattagacttgaataggatttccttggggtgggttggtctgtcattacccagccttctctgagcatcctaggaaatcacagattgttaaaggaaatgccgcttcactgctgaagacaccatctggcgacagcaaatgcaaaagaggggactctagggtcttcacttttctggggaaatgttcacgacttctcaaggtacgcttagaccatatgtgcattcaggggactcttgtctttgccagcactcctcaggtgagcccgggatggctatctgaaatgtctggaaaatagagtcccttccccaaacatctgacatggccactaaatctttagacttgccttatagatccttccatatcatccccaagtgccccttctgcctcagtcctgttcctctgggcaatagctctagggaaaagtaggtattagactgctgtgcaaaattcagagcaactacttaaaatgctctagaggattcttagccagtctgtgaaagtgggcctcctctgtggtggggctgtttggcttaggagatgctgtagtagtagagataatcaggttctattttaagcaatcagcagagatcaatattgtacagatacaagcaaaggtttaataaatatatatatatatatttatttctgtagttgtgccagggacagactggccaaagaccaaacactgcagggtccccaagaaatttgtccttatatcattgtgtctgagggccagatatgattatgaagctttttccaaagatccagggatgggaatgggagtgggtaggaggggtaatgcggtcattggagtcgggggctggaacattatgagtgctcaataaatataaactaatgagaacaacatctactcttccccattacaaccccggcgctgtccctactcgcaaccatcatcttaacaaaaa

SEQ ID NO: 420075 - DNA, 2241 bp, Homo sapiens
gaattcttgagtagagtctgccagcgccacactgatgcccaggcacaggcatctgcagccctctttgattccatgcacagcagccaggcctcagataacccattttctccaccacgtactcttcattcacctcccctgcaactccagcagcgctctgagaagcccccttggtacagcagtggcccttctagcactgtgtccagtgctggtccttcttcccctactacagtagatggtaactcccaatttggcttcagtgatcaaccctccctaaattcacacgtggctgaagaacatcaaggccttgggctgctccaggagacccctgggagtggagcacaagagctctccatagaaggggagcaagagctttttgaaccaaatcagtccccacaggtgccacctatggaaaccagccagccatacgaggaggtcagccagccatgtcaggaggtccctgacatcagccagccatgccaggacatttctgaggcgctcagccagccatgtcagaaggtccctgacatcagccagcaatgccaggagaaccatgacaatggtaaccacacatgccaggaggtccctcacatcagccagccatgccagaagtccagccaactgtgccagaaagtctctgaggaagtttgccagctatgtctggagaactccgaggaggtcagccagccatgccagggggtctctgtggaggttggcaagctggtccataagttccatgtaggggttggtagcttggtccaggaaacccttgtagaagttggcagcccagctgaagagatccctgaggaggtcatccagccataccaggagttctctgtggaggttggcaggctggcccaggagacttctgcgatcaatctgttatctcagggcatccctgagattgataaaccatcccaagagttccctgaggagattgatctgcaggcccaggaggtccctgaggagataaattagaagtcctgggtggtccctgaagtgattgatcagctgcctggagagggtattcctcaagcccagcatccatctggtgatccaaaccctcagagccagtctctagcccatgaccagcactcaccccttccaccagcaacatgtgattaattttctcattagtggtatcacactataccagccatttgagccagcaaccttttctgttggctaactcactggccagctctcaccagcggtgtctggggaagtagttctctttgtatgaagcatacctgtgccagagctgtggttgaggaggagccagttttaggttcgaagaagccattggctcctcacttagccattagacttgaataggatttccttggggtgggttggtctgtcattacccagccttctctgagcatcctaggaaatcacagattgttaaaggaaatgccgcttcactgctgaagacaccatctggcgacagcaaatgcaaaagaggggactctagggtcttcacttttctggggaaatgttcacgacttctcaaggtacgcttagaccatatgtgcattcaggggactcttgtctttgccagcactcctcaggtgagcccgggatggctatctgaaatgtctggaaaatagagtcccttccccaaacatctgacatggccactaaatctttagacttgccttatagatccttccatatcatccccaagtgccccttctgcctcagtcctgttcctctgggcaatagctctagggaaaagtaggtattagactgctgtgcaaaattcagagcaactacttaaaatgctctagaggattcttagccagtctgtgaaagtgggcctcctctgtggtggggctgtttggcttaggagatgctgtagtagtagagataatcaggttctattttaagcaatcagcagagatcaatattgtacagatacaagcaaaggtttaataaatatatatatatatatttatttctgtagttgtgccagggacagactggccaaagaccaaacactgcagggtccccaagaaatttgtccttatatcattgtgtctgagggccagatatgattatgaagctttttccaaagatccagggatgggaatgggagtgggtaggaggggtaatgcggtcattggagtcgggggctggaacattatgagtgctcaataaatataaactaatgagaacaacatctactcttccccattacaaccccggcgctgtccctactcgcaaccatcatcttaacaaaaa

SEQ ID NO: 420076 - DNA, 1497 bp, Homo sapiens
  misc_feature (1462)..(1462): n is a, c, g, or t
  misc_feature (1465)..(1465): n is a, c, g, or t
gaattcttgagtagagtctgccagcgccacactgatgcccaggcacaggcatctgcagccctctttgattccatgcacagcagccaggcctcagataacccattttctccaccacgtactcttcattcacctcccctgcaactccagcagcgctctgagaagcccccttggtacagcagtggcccttctagcactgtgtccagtgctggtccttcttcccctactacagtagatggtaactcccaatttggcttcagtgatcaaccctccctaaattcacacgtggctgaagaacatcaaggccttgggctgctccaggagacccctgggagtggagcacaagagctctccatagaaggggagcaagagctttttgaaccaaatcagtccccacaggtgccacctatggaaaccagccagccatacgaggaggtcagccagccatgtcaggaggtccctgacatcagccagccatgccaggacatttctgaggcgctcagccagccatgtcagaaggtccctgacatcagccagcaatgccaggagaaccatgacaatggtaaccacacatgccaggaggtccctcacatcagccagccatgccagaagtccagccaactgtgccagaaagtctctgaggaagtttgccagctatgtctggagaactccgaggaggtcagccagccatgccagggggtctctgtggaggttggcaagctggtccataagttccatgtaggggttggtagcttggtccaggaaacccttgtagaagttggcagcccagctgaagagatccctgaggaggtcatccagccataccaggagttctctgtggaggttggcaggctggcccaggagacttctgcgatcaatctgttatctcagggcatccctgagattgataaaccatcccaagagttccctgaggagattgatctgcaggcccaggaggtccctgaggagataaattagaagtcctgggtggtccctgaagtgattgatcagctgcctggagagggtattcctcaagcccagcatccatctggtgatccaaaccctcagagccagtctctagcccatgaccagcactcaccccttccaccagcaacatgtgattaattttctcattagtggtatcacactataccagccatttgagccagcaaccttttctgttggctaactcactggccagctctcaccagcggtgtctggggaagtagttctctttgtatgaagcatacctgtgccagagctgtggttgaggaggagccagttttaggttcgaagaagccattggctcctcacttagccattagacttgaataggatttccttggggtgggttggtctgtcattacccagccttctctgagcatcctaggaaatcacagattgttaaaggaaatgccgcttcactgctgaagacaccatctggcgacagcaaggcaaagggccnggntccttcgggaaggcactccgggcgaattggtt

SEQ ID NO: 420077 - DNA, 1990 bp, Homo sapiens
acctgagtctgggcgggagggcgagagcgagggcgcctgggagaaacctcgcccagcggcggttgattagtcaggcctcagaaagatggcgtcctcggagcaggcagagcagccgagccagccaagctctactccaggaagtgaaaatgtgctgcctcgagagccgctgattgccacggcagtgaagtttctacagaattcccgggtccgccagagcccacttgcaaccaggagagcattcctaaagaagaaagggctgacagatgaagagattgatatggccttccagcagtcgggcactgctgccgatgagccttcgtccttgggcccagccacacaggtggttcctgtccagccccctcacctcatatctcagccatacagtcccgcaggctcccgatggcgagattacggcgccctggccatcatcatggcaggcattgcatttggctttcaccagctctacaagaaatacctgctccccctcatcctgggcggccgagaggacagaaagcagctggagaggatggaggccggtctctctgagctgagtggcagcgtggcccagacagtgactcagttacagacgaccctcgcctccgtccaggagctgctgattcagcagcagcagaagatccaggagcttgcccacgagctggccgctgccaaggccaccacatccaccaactggatcctggagtcccagaatatcaacgaactcaagtccgaaattaactccttgaaagggcttcttttaaatcggaggcagttccctccatccccatcagccccgaagatcccctcctggcagatcccagtcaagtcaccgtcaccctccagccctgcggccgtgaaccaccacagcagcagcgacatctcacctgtcagcaacgagtccacgtcgtcctcgcctgggaaggagggccacagccccgagggctccacggtcacctaccacttgctgggcccccaggaggaaggcgagggggtggtggacgtcaagggccaggtgcggatggaggtgcaaggcgaggaggagaagagggaggacaaggaggacgaggaggatgaggaggatgatgatgtgagccatgtggacgaggaggactgcctgggggtgcagagggaggaccgccggggcggggatgggcagatcaacgagcaggtggagaagctgcggcggcccgagggcgccagcaacgagagtgagcgggactagggctgcgcctgctgcctccagccctgaggatggcatctagtgtgcccgtgcgtggccataccctgcctccctctctggccctgggagggcagcttggagcccaggtagggggcagagctgtcctcagctgcactgcggcctggtggcagtgtggggagtcacacttctgtccacctggcctcctctcgcctggccgccagccccagccccagccccagccccaggcccagctgcctttggctttgatctcaagtcaggctgaaggcagcgaagcctcggggcccaagcccctccccagccccctctcccggacagacgccttgcccagggtgtgtttgctgagtgtcttgactaccgtgacaccacgcatggccagagctagcgtccctactgcctcccgactcctcagtggaggaggagctgcggtccctctggtgtctgccatccccctccctccctgggcccggccctggacccgtcaggtgcctgtccccagccccaaccccactcatgccccgtcgtcctcccagacaaatgaaaccacgctgcgcttccgatgcccccgcttgccgtgtaatggttcagctaatcccatggcgagatgggggctcactccggaggaggagccaggcagcagggccttcctgaccaacagccagctctgtccttccccccaggaaacacatgttcatttgtgtgatcatgtatagacctcagaacggaagataggactgtatataattgtaataaataccagttgccactatttaa

SEQ ID NO: 420078 - DNA, 993 bp, Homo sapiens
aattatgtcttcaattatatggtacacagtacaggcactgaagaattgaagagaatagggagatcagagatggcttgcttatttaggcaaggcttcgaggaatcagaacagactataaaagggctgtgctgatagagaacgtgtgtgtgtgtgtgtgcgtgtgtacgtgcgcgtggggtaacgtttagacaggtggaggcaggaaagggaggccttccagaaagacagcatacagggcacaagggcggcgacatgggtgcgcatggccacacctgccggggagtatgaagaatcagctcgaatggagatcaggaggaacaggaaggatcgtcgcaggcctgaagctcggcagagggattagatttgacagactcagatacaggaagccagtgaagacagggaaacaacatcgcctttcatttagattgccacggcagtgaagtttctacagaattcccgggtccgccagagcccacttgcaaccaggagagcattcctaaagaagaaagggctgacagatgaagagattgatatggccttccagcagtcgggcactgctgccgatgagccttcgtccttgggcccagccacacaggtggttcctgtccagccccctcacctcatatctcagccatacagtcccgcaggctcccgatggcgagattacggcgccctggccatcatcatggcaggcattgcatttggctttcaccagctctacaagaaatacctgctccccctcatcctgggcggccgagaggacagaaagcagctggagaggatggaggccggtctctctgagctgagtggcagcgtggcccagacaggtaaagattaatgactccatcaagtcacccctcacagccttctccaagcagccccttctctgcccctcccctctccctctgtctccactctatgtggtgacttcatttatctgctctgagaatctgttcacatttgcaaatgaagccgccgtcatttcggtttaat

SEQ ID NO: 420079 - DNA, 158 bp, Homo sapiens
gttggtcaggaaacaaatgaacatgtgtttcctggggggaaggacagagctggctgttggtcaggaaacacatgttcatttgtgtgatcatgtatagacctcagaacggaagataggactgtatataattgtaataaataccagttgccactatttaa

SEQ ID NO: 420080 - DNA, 2027 bp, Homo sapiens
  misc_feature (2011)..(2011): n is a, c, g, or t
acctgagtctgggcgggagggcgagagcgagggcgcctgggagaaacctcgcccagcggcggttgattagtcaggcctcagaaagatggcgtcctcggagcaggcagagcagccgagccagccaagctctactccaggaagtgaaaatgtgctgcctcgagagccgctgattgccacggcagtgaagtttctacagaattcccgggtccgccagagcccacttgcaaccaggagagcattcctaaagaagaaagggctgacagatgaagagattgatatggccttccagcagtcgggcactgctgccgatgagccttcgtccttgggcccagccacacaggtggttcctgtccagccccctcacctcatatctcagccatacagtcccgcaggctcccgatggcgagattacggcgccctggccatcatcatggcaggcattgcatttggctttcaccagctctacaagaaatacctgctccccctcatcctgggcggccgagaggacagaaagcagctggagaggatggaggccggtctctctgagctgagtggcagcgtggcccagacagtgactcagttacagacgaccctcgcctccgtccaggagctgctgattcagcagcagcagaagatccaggagcttgcccacgagctggccgctgccaaggccaccacatccaccaactggatcctggagtcccagaatatcaacgaactcaagtccgaaattaactccttgaaagggcttcttttaaatcggaggcagttccctccatccccatcagccccgaagatcccctcctggcagatcccagtcaagtcaccgtcaccctccagccctgcggccgtgaaccaccacagcagcagcgacatctcacctgtcagcaacgagtccacgtcgtcctcgcctgggaaggagggccacagccccgagggctccacggtcacctaccacttgctgggcccccaggaggaaggcgagggggtggtggacgtcaagggccaggtgcggatggaggtgcaaggcgaggaggagaagagggaggacaaggaggacgaggaggatgaggaggatgatgatgtgagccatgtggacgaggaggactgcctgggggtgcagagggaggaccgccggggcggggatgggcagatcaacgagcaggtggagaagctgcggcggcccgagggcgccagcaacgagagtgagcgggactagggctgcgcctgctgcctccagccctgaggatggcatctagtgtgcccgtgcgtggccataccctgcctccctctctggccctgggagggcagcttggagcccaggtagggggcagagctgtcctcagctgcactgcggcctggtggcagtgtggggagtcacacttctgtccacctggcctcctctcgcctggccgccagccccagccccagccccagccccaggcccagctgcctttggctttgatctcaagtcaggctgaaggcagcgaagcctcggggcccaagcccctccccagccccctctcccggacagacgccttgcccagggtgtgtttgctgagtgtcttgactaccgtgacaccacgcatggccagagctagcgtccctactgcctcccgactcctcagtggaggaggagctgcggtccctctggtgtctgccatccccctccctccctgggcccggccctggacccgtcaggtgcctgtccccagccccaaccccactcatgccccgtcgtcctcccagacaaatgaaaccacgctgcgcttccgatgcccccgcttgccgtgtaatggttcagctaatcccatggcgagatgggggctcactccggaggaggagccaggcagcagggccttcctgaccaacagccagctctgtccttccccccaggaaacacatgttcatttgtgtgatcatgtatagacctcagaacggaagataggactgtatataattgtaataaataccagttgccactatttaaaaaaaaaaaaaaaaaaaaaanaacaaaaaaaaaaggg

SEQ ID NO: 420081 - DNA, 1661 bp, Homo sapiens
acctgagtctgggcgggagggcgagagcgagggcgcctgggagaaacctcgcccagcggcggttgattagtcaggcctcagaaagatggcgtcctcggagcaggcagagcagccgagccagccaagctctactccaggaagtgaaaatgtgctgcctcgagagccgctgattgccacggcagtgaagtttctacagaattcccgggtccgccagagcccacttgcaaccaggagagcattcctaaagaagaaagggctgacagatgaagagattgatatggccttccagcagtcgggcactgctgccgatgagccttcgtccttgggcccagccacacaggtggttcctgtccagccccctcacctcatatctcagccatacagtcccgcaggctcccgatggcgagattacggcgccctggccatcatcatggcaggcattgcatttggctttcaccagctctacaagaaatacctgctccccctcatcctgggcggccgagaggacagaaagcagctggagaggatggaggccggtctctctgagctgagtggcagcgtggcccagacagtgactcagttacagacgaccctcgcctccgtccaggagctgctgattcagcagcagcagaagatccaggagcttgcccacgagctggccgctgccaaggccaccacatccaccaactggatcctggagtcccagaatatcaacgaactcaagtccgaaattaactccttgaaagggcttcttttaaatcggaggcagttccctccatccccatcagccccgaagatcccctcctggcagatcccagtcaagtcaccgtcaccctccagccctgcggccgtgaaccaccacagcagcagcgacatctcacctgtcagcaacgagtccacgtcgtcctcgcctgggaaggagggccacagccccgagggctccacggtcacctaccacttgctgggcccccaggaggaaggcgagggggtggtggacgtcaagggccaggtgcggatggaggtgcaaggcgaggaggagaagagggaggacaaggaggacgaggaggatgaggaggatgatgatgtgagccatgtggacgaggaggactgcctgggggtgcagagggaggaccgccggggcggggatgggcagatcaacgagcaggtggagaagctgcggcgccccagccccctctcccggacagacgccttgcccagggtgtgtttgctgagtgtcttgactaccgtgacaccacgcatggccagagctagcgtccctactgcctcccgactcctcagtggaggaggagctgcggtccctctggtgtctgccatccccctccctccctgggcccggccctggacccgtcaggtgcctgtccccagccccaaccccactcatgccccgtcgtcctcccagacaaatgaaaccacgctgcgcttccgatgcccccgcttgccgtgtaatggttcagctaatcccatggcgagatgggggctcactccggaggaggagccaggcagcagggccttcctgaccaacagccagctctgtccttccccccaggaaacacatgttcatttgtgtgatcatgtatagacctcagaacggaagataggactgtatataattgtaataaataccagttgccactatttaa

SEQ ID NO: 420082 - DNA, 1785 bp, Homo sapiens
acctgagtctgggcgggagggcgagagcgagggcgcctgggagaaacctcgcccagcggcggttgattagtcaggcctcagaaagatggcgtcctcggagcaggcagagcagccgagccagccaagctctactccaggaagtgaaaatgtgctgcctcgagagccgctgattgccacggcagtgaagtttctacagaattcccgggtccgccagagcccacttgcaaccaggagagcattcctaaagaagaaagggctgacagatgaagagattgatatggccttccagcagtcgggcactgctgccgatgagccttcgtccttgggcccagccacacaggtggttcctgtccagccccctcacctcatatctcagccatacagtcccgcaggctcccgatggcgagattacggcgccctggccatcatcatggcaggcattgcatttggctttcaccagctctacaagaaatacctgctccccctcatcctgggcggccgagaggacagaaagcagctggagaggatggaggccggtctctctgagctgagtggcagcgtggcccagacagtgactcagttacagacgaccctcgcctccgtccaggagctgctgattcagcagcagcagaagatccaggagcttgcccacgagctggccgctgccaaggccaccacatccaccaactggatcctggagtcccagaatatcaacgaactcaagtccgaaattaactccttgaaagggcttcttttaaatcggaggcagttccctccatccccatcagccccgaagatcccctcctggcagatcccagtcaagtcaccgtcaccctccagccctgcggccgtgaaccaccacagcagcagcgacatctcacctgtcagcaacgagtccacgtcgtcctcgcctgggaaggagggccacagccccgagggctccacggtcacctaccacttgctgggcccccaggaggaaggcgagggggtggtggacgtcaagggccaggtgcggatggaggtgcaaggcgaggaggagaagagggaggacaaggaggacgaggaggatgaggaggatgatgatgtgagccatgtggacgaggaggactgcctgggggtgcagagggaggaccgccggggcggggatgggcagatcaacgagcaggtggagaagctgcggcggcccgagggcgccagcaacgagagtgagcgggactagggctgcgcctgctgcctccagccctgaggatggcatctagtgtgcccgtgcgtggccataccctgcctccctctctggccctgggagggcagcttggagcccaggtagggggcagagctgtcctcagctgcactgcggcctggtggcagtgtggggagtcacacttctgtccacctggcctcctctcgcctggccgccagccccagccccagccccagccccaggcccagctgcctttggctttgatctcaagtcaggctgaaggcagcgaagcctcggggcccaagcccctcccaaccccactcatgccccgtcgtcctcccagacaaatgaaaccacgctgcgcttccgatgcccccgcttgccgtgtaatggttcagctaatcccatggcgagatgggggctcactccggaggaggagccaggcagcagggccttcctgaccaacagccagctctgtccttccccccaggaaacacatgttcatttgtgtgatcatgtatagacctcagaacggaagataggactgtatataattgtaataaataccagttgccactatttaa

SEQ ID NO: 420083 - DNA, 1924 bp, Homo sapiens
gctggtacggcctggaggtaagggatcctcggagcaggcagagcagccgagccagccaagctctactccaggaagtgaaaatgtgctgcctcgagagccgctgattgccacggcagtgaagtttctacagaattcccgggtccgccagagcccacttgcaaccaggagagcattcctaaagaagaaagggctgacagatgaagagattgatatggccttccagcagtcgggcactgctgccgatgagccttcgtccttgggcccagccacacaggtggttcctgtccagccccctcacctcatatctcagccatacagtcccgcaggctcccgatggcgagattacggcgccctggccatcatcatggcaggcattgcatttggctttcaccagctctacaagaaatacctgctccccctcatcctgggcggccgagaggacagaaagcagctggagaggatggaggccggtctctctgagctgagtggcagcgtggcccagacagtgactcagttacagacgaccctcgcctccgtccaggagctgctgattcagcagcagcagaagatccaggagcttgcccacgagctggccgctgccaaggccaccacatccaccaactggatcctggagtcccagaatatcaacgaactcaagtccgaaattaactccttgaaagggcttcttttaaatcggaggcagttccctccatccccatcagccccgaagatcccctcctggcagatcccagtcaagtcaccgtcaccctccagccctgcggccgtgaaccaccacagcagcagcgacatctcacctgtcagcaacgagtccacgtcgtcctcgcctgggaaggagggccacagccccgagggctccacggtcacctaccacttgctgggcccccaggaggaaggcgagggggtggtggacgtcaagggccaggtgcggatggaggtgcaaggcgaggaggagaagagggaggacaaggaggacgaggaggatgaggaggatgatgatgtgagccatgtggacgaggaggactgcctgggggtgcagagggaggaccgccggggcggggatgggcagatcaacgagcaggtggagaagctgcggcggcccgagggcgccagcaacgagagtgagcgggactagggctgcgcctgctgcctccagccctgaggatggcatctagtgtgcccgtgcgtggccataccctgcctccctctctggccctgggagggcagcttggagcccaggtagggggcagagctgtcctcagctgcactgcggcctggtggcagtgtggggagtcacacttctgtccacctggcctcctctcgcctggccgccagccccagccccagccccagccccaggcccagctgcctttggctttgatctcaagtcaggctgaaggcagcgaagcctcggggcccaagcccctccccagccccctctcccggacagacgccttgcccagggtgtgtttgctgagtgtcttgactaccgtgacaccacgcatggccagagctagcgtccctactgcctcccgactcctcagtggaggaggagctgcggtccctctggtgtctgccatccccctccctccctgggcccggccctggacccgtcaggtgcctgtccccagccccaaccccactcatgccccgtcgtcctcccagacaaatgaaaccacgctgcgcttccgatgcccccgcttgccgtgtaatggttcagctaatcccatggcgagatgggggctcactccggaggaggagccaggcagcagggccttcctgaccaacagccagctctgtccttccccccaggaaacacatgttcatttgtgtgatcatgtatagacctcagaacggaagataggactgtatataattgtaataaataccagttgccactatttaa

SEQ ID NO: 420084 - DNA, 1861 bp, Homo sapiens
acctgagtctgggcgggagggcgagagcgagggcgcctgggagaaacctcgcccagcggcggttgattagtcaggcctcagaaagatggcgtcctcggagcaggcagagcagccgagccagccaagctctactccaggaagtgaaaatgtgctgcctcgagagccgctgattgccacggcagtgaagtttctacagaattcccgggtccgccagagcccacttgcaaccaggagagcattcctaaagaagaaaggtcccgcaggctcccgatggcgagattacggcgccctggccatcatcatggcaggcattgcatttggctttcaccagctctacaagaaatacctgctccccctcatcctgggcggccgagaggacagaaagcagctggagaggatggaggccggtctctctgagctgagtggcagcgtggcccagacagtgactcagttacagacgaccctcgcctccgtccaggagctgctgattcagcagcagcagaagatccaggagcttgcccacgagctggccgctgccaaggccaccacatccaccaactggatcctggagtcccagaatatcaacgaactcaagtccgaaattaactccttgaaagggcttcttttaaatcggaggcagttccctccatccccatcagccccgaagatcccctcctggcagatcccagtcaagtcaccgtcaccctccagccctgcggccgtgaaccaccacagcagcagcgacatctcacctgtcagcaacgagtccacgtcgtcctcgcctgggaaggagggccacagccccgagggctccacggtcacctaccacttgctgggcccccaggaggaaggcgagggggtggtggacgtcaagggccaggtgcggatggaggtgcaaggcgaggaggagaagagggaggacaaggaggacgaggaggatgaggaggatgatgatgtgagccatgtggacgaggaggactgcctgggggtgcagagggaggaccgccggggcggggatgggcagatcaacgagcaggtggagaagctgcggcggcccgagggcgccagcaacgagagtgagcgggactagggctgcgcctgctgcctccagccctgaggatggcatctagtgtgcccgtgcgtggccataccctgcctccctctctggccctgggagggcagcttggagcccaggtagggggcagagctgtcctcagctgcactgcggcctggtggcagtgtggggagtcacacttctgtccacctggcctcctctcgcctggccgccagccccagccccagccccagccccaggcccagctgcctttggctttgatctcaagtcaggctgaaggcagcgaagcctcggggcccaagcccctccccagccccctctcccggacagacgccttgcccagggtgtgtttgctgagtgtcttgactaccgtgacaccacgcatggccagagctagcgtccctactgcctcccgactcctcagtggaggaggagctgcggtccctctggtgtctgccatccccctccctccctgggcccggccctggacccgtcaggtgcctgtccccagccccaaccccactcatgccccgtcgtcctcccagacaaatgaaaccacgctgcgcttccgatgcccccgcttgccgtgtaatggttcagctaatcccatggcgagatgggggctcactccggaggaggagccaggcagcagggccttcctgaccaacagccagctctgtccttccccccaggaaacacatgttcatttgtgtgatcatgtatagacctcagaacggaagataggactgtatataattgtaataaataccagttgccactatttaa

SEQ ID NO: 420085 - DNA, 1285 bp, Homo sapiens
acctgagtctgggcgggagggcgagagcgagggcgcctgggagaaacctcgcccagcggcggttgattagtcaggcctcagaaagatggcgtcctcggagcaggcagagcagccgagccagccaagctctactccaggaagtgaaaatgtgctgcctcgagagccgctgattgccacggcagtgaagtttctacagaattcccgggtccgccagagcccacttgcaaccaggagagcattcctaaagaagaaagggctgacagatgaagagattgatatggccttccagcagtcgggcactgctgccgatgagccttcgtccttgggcccagccacacaggtggttcctgtccagccccctcacctcatatctcagccatacagtcccgcaggctcccgatggcgagattacggcgccctggccatcatcatggcaggcattgcatttggctttcaccagctctacaagaaatacctgctccccctcatcctgggcggccgagaggacagaaagcagctggagaggatggaggccggtctctctgagctgagtggcagcgtggcccagacagtgactcagttacagacgaccctcgcctccgtccaggagctgctgattcagcagcagcagaagatccaggagcttgcccacgagctggccgctgccaaggccaccacatccaccaactggatcctggagtcccagaatatcaacgaactcaagtccgaaattaactccttgaaagggcttcttttaaatcggaggcagttccctccatccccatcagccccgaagatcccctcctggcagatcccagtcaagtcaccgtcaccctccagccctgcggccgtgaaccaccacgcatggccagagctagcgtccctactgcctcccgactcctcagtggaggaggagctgcggtccctctggtgtctgccatccccctccctccctgggcccggccctggacccgtcaggtgcctgtccccagcctctcccggacagacgccttgcccagggtgtgtttgctgagtgtcttgactacaaatgaaaccacgctgcgcttccgatgcccccgcttgccgtgtaatggttcagctaatcccatggcgagatgggggctcactccggaggaggagccaggcagcagggccttcctgaccaacagccagctctgtccttccccccaggaaacacatgttcatttgtgtgatcatgtatagacctcagaacggaagataggactgtatataattgtaataaataccagttgccactatttaa

SEQ ID NO: 420086 - DNA, 532 bp, Homo sapiens
  misc_feature (516)..(516): n is a, c, g, or t
cgcaagcaccaaccaacaagaaacgctagaagctggttgaatcggacgaggcggagcaggcagagcagccgagccagaccgagtctcactctgttgaccaggctggagtgcagtggcgcgatctcggcttactgcaacctccgcctcccaggttcaagtgattctcctgcctcagcctcccaagtagctggggctacagccaagctctactccaggaagtgaaaatgtgctgcctcgagagccgctgggacttgctgtgctgctcaggctggagtgcagtgtgcaaacacggcttactgcagccttcaccttccggccgaagtgatcctcccgcctcgacctccatgtagctgggaccatagatgtgtgccaccacacccagctcatttgaaatttttgttgttgttgttgaacagaagtggtgagagtaaaataaaaataaattaaataaataatatgttttggtaaaaaaaaaagaaaaaaaacagaaaaaacaaaaaaaaaaaaaaaaaaaanaacaaaaaaaaaaggg

SEQ ID NO: 420087 - DNA, 1220 bp, Homo sapiens
acctgagtctgggcgggagggcgagagcgagggcgcctgggagaaacctcgcccagcggcggttgattagtcaggcctcagaaagatggcgtcctcggagcaggcagagcagccgagccagccaagctctactccaggaagtgaaaatgtgctgcctcgagagccgctgatggaattttgctcgtatcgcccaagctggagtgcgtggcgcgatctcagcacactgcaacctctgcttcccaggttcaagtgattctcctgcctctgcctcccaagtagctgggattacaggtgccaccatgcccggctaatttttgtatttttagtagagggggtttcaccaggctggtctttaacccctgacctcaggtggtccacctgcctcagcctcctaaagctctaggattacaggcgtgagccaccacacccagcctaattgctgtatctttattatcaactttaatatgtacaagagcaaggctcacttcatcattcttctctttaaaaaacattctgaggccgagcgcagtggctcacgcctgtaatgccagcattttgggaggcagaggcaggtggataacagatggtcttgatctcctgacctggtgatctgctatacccagcctggacacagtattttaaaaatatagtttgaaggtactggagagccaccaaaagcaagcagaaattggagtgaatttgattcttgaaagaaagaccccacccaggggagccacctttataaggctttttccttgaggtattccccaatccatcaggtgctagcaaatagaactcaagcagaaagctgtgtcatattggtttgaggaatcaggggatattttgagactgtgtgtcgggaaattgaagatggcaatcatagaaaggagagaaccatgctggggatcaccccgaagtacatataaacacccctcacatgctagactaactgctgaactgcccatgcacaggggaagtgccacagattccagcagagatttcagtagctgcctgctgtgggagagagagaatttggaggtggagtcttgtcaagttagaggcgattcgataaacaccttggactttgctttgaaatcccagaagggctaccccttaggggcaaatactactccccagggctatggcattttccctaggactaagggcaaaacaaaaataaagcataaaattgtgcctacaccagatctacaggtgattta

SEQ ID NO: 420088 - DNA, 388 bp, Homo sapiens
  misc_feature (372)..(372): n is a, c, g, or t
gctggtacggcctggaggtaagggatcctcggagcaggcagagcagccgagccagccaagctctactccaggaagtgaaaatgtgctgcctcgagagccgctgggacttgctgtgctgctcaggctggagtgcagtgtgcaaacacggcttactgcagccttcaccttccggccgaagtgatcctcccgcctcgacctccatgtagctgggaccatagatgtgtgccaccacacccagctcatttgaaatttttgttgttgttgttgaacagaagtggtgagagtaaaataaaaataaattaaataaataatatgttttggtaaaaaaaaaagaaaaaaaacagaaaaaacaaaaaaaaaaaaaaaaaaaanaacaaaaaaaaaaggg

SEQ ID NO: 420089 - DNA, 1930 bp, Homo sapiens
acctgagtctgggcgggagggcgagagcgagggcgcctgggagaaacctcgcccagcggcggttgattagtcaggcctcagaaagatggcgtcctcggagcaggcagagcagccgagccagccaagctctactccaggaagtgaaaatgtgctgcctcgagagccgctgattgccacggcagtgaagtttctacagaattcccgggtccgccagagcccacttgcaaccaggagagcattcctaaagaagaaagggctgacagatgaagagattgatatggccttccagcagtcgggcactgctgccgatgagccttcgtccttgggcccagccacacaggtggttcctgtccagccccctcacctcatatctcagccatacagtcccgcaggctcccgatggcgagattacggcgccctggccatcatcatggcaggcattgcatttggctttcaccagctctacaagaaatacctgctccccctcatcctgggcggccgagaggacagaaagcagctggagaggatggaggccggtctctctgagctgagtggcagcgtggcccagacagtgactcagttacagacgaccctcgcctccgtccaggagctgctgattcagcagcagcagaagatccaggagcttgcccacgagctggccgctgccaaggccaccacatccaccaactggatcctggagtcccagaatatcaacgaactcaagtccgaaattaactccttgaaagggcttcttttaaatcggaggcagttccctccatccccatcagccccgaagatcccctcctggcagatcccagtcaagtcaccgtcaccctccagccctgcggccgtgaaccaccacagcagcagcgacatctcacctgtcagcaacgagtccacgtcgtcctcgcctgggaaggagggccacagccccgagggctccacggtcacctaccacttgctgggcccccaggaggaaggcgagggggtggtggacgtcaagggccaggtgcggatggaggtgcaaggcgaggaggagaagagggaggacaaggaggacgaggaggatgaggaggatgatgatgtgagccatgtggacgaggaggactgcctgggggtgcagagggaggaccgccggggcggggatgggcagatcaacgagcaggtggagaagctgcggcggcccgagggcgccagcaacgagagtgagcgggactagggctgcgcctgctgcctccagccctgaggatggcatctagtgtgcccgtgcgtggccataccctgcctccctctctggccctgggagggcagcttggagcccaggtagggggcagagctgtcctcagctgcactgcggcctggtggcagtgtggggagtcacacttctgtccacctggcctcctctcgcctggccgccagccccagccccagccccagccccaggcccagctgcctttggctttgatctcaagtcaggctgaaggcagcgaagcctcggggcccaagcccctccccagccccctctcccggacagacgccttgcccagggtgtgtttgctgagtgtcttgactaccgtgacaccacgcatggccagagctagcatccccctccctccctgggcccggccctggacccgtcaggtgcctgtccccagccccaaccccactcatgccccgtcgtcctcccagacaaatgaaaccacgctgcgcttccgatgcccccgcttgccgtgtaatggttcagctaatcccatggcgagatgggggctcactccggaggaggagccaggcagcagggccttcctgaccaacagccagctctgtccttccccccaggaaacacatgttcatttgtgtgatcatgtatagacctcagaacggaagataggactgtatataattgtaataaataccagttgccactatttaa

SEQ ID NO: 420090 - DNA, 1418 bp, Homo sapiens
acctgagtctgggcgggagggcgagagcgagggcgcctgggagaaacctcgcccagcggcggttgattagtcaggcctcagaaagatggcgtcctcggagcaggcagagcagccgagccagccaagctctactccaggaagtgaaaatgtgctgcctcgagagccgctgattgccacggcagtgaagtttctacagaattcccgggtccgccagagcccacttgcaaccaggagagcattcctaaagaagaaagggctgacagatgaagagattgatatggccttccagcagtcgggcactgctgccgatgagccttcgtccttgggcccagccacacaggtggttcctgtccagccccctcacctcatatctcagccatacagtcccgcaggctcccgatggcgagattacggcgccctggccatcatcatggcaggcattgcatttggctttcaccagctctacaagaaatacctgctccccctcatcctgggcggccgagaggacagaaagcagctggagaggatggaggccggtctctctgagctgagtggcagcgtggcccagacagtgactcagttacagacgaccctcgcctccgtccaggagctgctgattcagcagcagcagaagatccaggagcttgcccacgagctggccgctgccaaggccaccacatccaccaactggatcctggagtcccagaatatcaacgaactcaagtccgaaattaactccttgaaagggcttcttttaaatcggaggcagttccctccatccccatcagccccgaagatcccctcctggcagatcccagtcaagtcaccgtcaccctccagccctgcggccgtgaaccaccacagcagcagcgacatctcacctgtcagcaacgagtccacgtcgtcctcgcctgggaaggagggccacagccccgagggctccacggtcacctaccacttgctgggcccccaggaggaaggcgagggggtggtggacgtcaagggccaggtgcggatggaggtgcaaggcgaggaggagaagagggaggacaaggatggaggaggagctgcggtccctctggtgtctgccatccccctccctccctgggcccggccctggacccgtcaggtgcctgtccccagccccaaccccactcatgccccgtcgtcctcccagacaaatgaaaccacgctgcgcttccgatgcccccgcttgccgtgtaatggttcagctaatcccatggcgagatgggggctcactccggaggaggagccaggcagcagggccttcctgaccaacagccagctctgtccttccccccaggaaacacatgttcatttgtgtgatcatgtatagacctcagaacggaagataggactgtatataattgtaataaataccagttgccactatttaa

SEQ ID NO: 420091 - DNA, 2245 bp, Homo sapiens
aattatgtcttcaattatatggtacacagtacaggcactgaagaattgaagagaatagggagatcagagatggcttgcttatttaggcaaggcttcgaggaatcagaacagactataaaagggctgtgctgatagagaacgtgtgtgtgtgtgtgtgcgtgtgtacgtgcgcgtggggtaacgtttagacaggtggaggcaggaaagggaggccttccagaaagacagcatacagggcacaagggcggcgacatgggtgcgcatggccacacctgccggggagtatgaagaatcagctcgaatggagatcaggaggaacaggaaggatcgtcgcaggcctgaagctcggcagagggattagatttgacagactcagatacaggaagccagtgaagacagggaaacaacatcgcctttcatttagattgccacggcagtgaagtttctacagaattcccgggtccgccagagcccacttgcaaccaggagagcattcctaaagaagaaagggctgacagatgaagagattgatatggccttccagcagtcgggcactgctgccgatgagccttcgtccttgggcccagccacacaggtggttcctgtccagccccctcacctcatatctcagccatacagtcccgcaggctcccgatggcgagattacggcgccctggccatcatcatggcaggcattgcatttggctttcaccagctctacaagaaatacctgctccccctcatcctgggcggccgagaggacagaaagcagctggagaggatggaggccggtctctctgagctgagtggcagcgtggcccagacagtgactcagttacagacgaccctcgcctccgtccaggagctgctgattcagcagcagcagaagatccaggagcttgcccacgagctggccgctgccaaggccaccacatccaccaactggatcctggagtcccagaatatcaacgaactcaagtccgaaattaactccttgaaagggcttcttttaaatcggaggcagttccctccatccccatcagccccgaagatcccctcctggcagatcccagtcaagtcaccgtcaccctccagccctgcggccgtgaaccaccacagcagcagcgacatctcacctgtcagcaacgagtccacgtcgtcctcgcctgggaaggagggccacagccccgagggctccacggtcacctaccacttgctgggcccccaggaggaaggcgagggggtggtggacgtcaagggccaggtgcggatggaggtgcaaggcgaggaggagaagagggaggacaaggaggacgaggaggatgaggaggatgatgatgtgagccatgtggacgaggaggactgcctgggggtgcagagggaggaccgccggggcggggatgggcagatcaacgagcaggtggagaagctgcggcggcccgagggcgccagcaacgagagtgagcgggactagggctgcgcctgctgcctccagccctgaggatggcatctagtgtgcccgtgcgtggccataccctgcctccctctctggccctgggagggcagcttggagcccaggtagggggcagagctgtcctcagctgcactgcggcctggtggcagtgtggggagtcacacttctgtccacctggcctcctctcgcctggccgccagccccagccccagccccagccccaggcccagctgcctttggctttgatctcaagtcaggctgaaggcagcgaagcctcggggcccaagcccctccccagccccctctcccggacagacgccttgcccagggtgtgtttgctgagtgtcttgactaccgtgacaccacgcatggccagagctagcgtccctactgcctcccgactcctcagtggaggaggagctgcggtccctctggtgtctgccatccccctccctccctgggcccggccctggacccgtcaggtgcctgtccccagccccaaccccactcatgccccgtcgtcctcccagacaaatgaaaccacgctgcgcttccgatgcccccgcttgccgtgtaatggttcagctaatcccatggcgagatgggggctcactccggaggaggagccaggcagcagggccttcctgaccaacagccagctctgtccttccccccaggaaacacatgttcatttgtgtgatcatgtatagacctcagaacggaagataggactgtatataattgtaataaataccagttgccactatttaa

SEQ ID NO: 420092 - DNA, 743 bp, Homo sapiens
acctgagtctgggcgggagggcgagagcgagggcgcctgggagaaacctcgcccagcggcggttgattagtcaggcctcagaaagatggcgtcctcggagcaggcagagcagccgagccagccaagctctactccaggaagtgaaaatgtgctgcctcgagagccgctgattgccacggcagtgaagtttctacagaattcccgggtccgccagagcccacttgcaaccaggagagcattcctaaagaagaaagggctgacagatgaagagattgatatggccttccagcagtcgggcactgctgccgatgagccttcgtccttgggcccagccacacaggtggttcctgtccagccccctcacctcatatctcagccatacagtcccgcaggctcccgatggcgagattacggcgccctggccatcatcatggcaggcattgcatttggctttcaccagctctacaagcccaaccccactcatgccccgtcgtcctcccagacaaatgaaaccacgctgcgcttccgatgcccccgcttgccgtgtaatggttcagctaatcccatggcgagatgggggctcactccggaggaggagccaggcagcagggccttcctgaccaacagccagctctgtccttccccccaggaaacacatgttcatttgtgtgatcatgtatagacctcagaacggaagataggactgtatataattgtaataaataccagttgccactatttaa

SEQ ID NO: 420093 - DNA, 2614 bp, Homo sapiens
cgggtgttgtaagatctggggagaggggaagtactggctccttctaatcagcaacactgtgtgggcatacaatggaggaatccagtaatggaaactataggcctgagtaatttagaacagaatttcacaattatatacagcatataggtagggaaggacatggagtatataaggtgtttgcaaatattgtgtgggctccgcgcgctgcgggctgcgggagggtccggccgggcgtctctgcgagcctggagtttgcatgaaactttcacctgcgctccggggagactttcggctccggctcccaccgcgcgcctcgccgccctcgcgaccgcgggctccgtccaacccggcccgacatggacgtgctccccatgtgcagcatcttccaggagctccagatcgtgcacgagaccggctacttctcggcgctgccgtctctggaggagtactggcaacagacctgcctagagctggaacgttacctccagagcgagccctgctatgtttcagcctcagaaatcaaatttgacagccaggaagatctgtggaccaaaatcattctggctcgggagaaaaaggaggaatccgaactgaagatatcttccagtcctccagaggacactctcatcagcccgagcttttgttacaacttagagaccaacagcctgaactcagatgtcagcagcgaatcctctgacagctccgaggaactttctcccacggccaagtttacctccgaccccattggcgaagttttggtcagctcgggaaaattgagctcctctgtcacctccacgcctccatcttctccggaactgagcagggaaccttctcaactgtggggttgcgtgcccggggagctgccctcgccagggaaggtgcgcagcgggacttcggggaagccaggtgacaagggaaatggcgatgcctcccccgacggcaggaggagggtgcaccggtgccactttaacggctgcaggaaagtttacaccaaaagctcccacttgaaagcacaccagcggacgcacacagaggtcagtgcccacgcgggccccggagggcggccgctggtgggcgccactgcattgcaccagccctggagggagccgggcctggctgcacaggatgtggtcagggcagacaaatcctcacttcctcagatgttttccaccaaagcattaggtctttttggagttcagagtagaatcctaaagactggacttttgagttggataaatgtgtaacaattttcagattaaacaaacaagagactagatccttttctccacggacacccaaacctccaccccccaccccttagtagtgctggggatccgaggccactgccccttcaccagtgcactcgcacgaggctacctcgagcggccctggggtttcctaaatgaaactcaagggtcaggacagagggttgctgggcagcgtggagtgtgtgggtttgatgctgacggcccgaggcccgagtgggaccggcctgctctgtaagcagcagcattgatcagcgagtgtttcctgagaacttctccgtgtctcatgcagcctttgtttctgataccgcttgaaacagtttcttaatgaaatgccatacctaggtgaaagtgccatttaaaaataccttgacatgttctaggataattggtgaggaatcacagaacatttagaactgggaagggtcttagtgatcacgtgatgcaggctcttctcttatcagtaggagagcaaattgctgagagtcagtcccagacaggcttggtgacagctgagattgagatccgggtggcccaatatccaggcccaggcctgtctcaacataccctgagattggcttgacaactttgttttctcaggtagcacttgtagtaaattcatatttatgatttgaccaaggaatgaagtgaacccagttgttcaattgccatttagagaatgattccggggccctgtactggggctttccagaagctcgtaacttcagctttgtagaaaggtagaacgtccctgaggaaactgcagaggcacattccatagggaagtgaggatggaacagaagtgtgtttgggagaaacagttgccatgaagaaagcaatagctctgcctttgccggggctgtgggtccggcaggctgacacctcatcccgcaagcattttgctggtctgagtcgtggtcgttcttccacgttaactttgatgacagcaccatgggcttggctgaagctgtgtcccttggacagcagtgggaggcctgagactgggtcaggagagagctgctgttgtctctctgaggctgccagttgttgtgtgttaccgatgccagaagccactgggtccctcctcacatggcagaagaaatggaaaggaaagaaccttctcactctccccagcctttttataagggctctaatcccacctgtgagggctctgtcctcatcacttaatcacctcctaaaggccccacttcttactactatcacattgaccattaagtttcaacatacaacttttcatggacacattcagaccatacgtagcacctgctgaagaacatcttggttccttccaagttttggcaagtatgaataaagctgctataaacatg

SEQ ID NO: 420094 - DNA, 4284 bp, Homo sapiens
aagttttgcaggggttacgtttgcagtcagtccggggtgtttgcaaatattgtgtgggctccgcgcgctgcgggctgcgggagggtccggccgggcgtctctgcgagcctggagtttgcatgaaactttcacctgcgctccggggagactttcggctccggctcccaccgcgcgcctcgccgccctcgcgaccgcgggctccgtccaacccggcccgacatggacgtgctccccatgtgcagcatcttccaggagctccagatcgtgcacgagaccggctacttctcggcgctgccgtctctggaggagtactggcaacagacctgcctagagctggaacgttacctccagagcgagccctgctatgtttcagcctcagaaatcaaatttgacagccaggaagatctgtggaccaaaatcattctggctcgggagaaaaaggaggaatccgaactgaagatatcttccagtcctccagaggacactctcatcagcccgagcttttgttacaacttagagaccaacagcctgaactcagatgtcagcagcgaatcctctgacagctccgaggaactttctcccacggccaagtttacctccgaccccattggcgaagttttggtcagctcgggaaaattgagctcctctgtcacctccacgcctccatcttctccggaactgagcagggaaccttctcaactgtggggttgcgtgcccggggagctgccctcgccagggaaggtgcgcagcgggacttcggggaagccaggtgacaagggaaatggcgatgcctcccccgacggcaggaggagggtgcaccggtgccactttaacggctgcaggaaagtttacaccaaaagctcccacttgaaagcacaccagcggacgcacacaggagaaaagccttacagatgctcatgggaagggtgtgagtggcgttttgcaagaagtgatgagttaaccaggcacttccgaaagcacaccggggccaagccttttaaatgctcccactgtgacaggtgtttttccaggtctgaccacctggccctgcacatgaagaggcacctctgagggagcagagaggtggatcctgtaggctaaaaggcttccaggctgagagccggccgtggaaggagggatgcgtgttccagccaaagcatgccgttctgcaccctacccagttgcctccagggcctctccttggaaggtcttttgagggctaaaaaggtcctgtaagaagcggcatagcacccgtggtgcatggtatgtgggtgaccctggactcgccactggtacccgcccttccgagcggcgcctaagcctttgccgtgagcatgcacactgagaatgctaatggttgggttgattgtatgttgaggatctattactgaccgtatgatgaggccaactttttttccttgtggttagcaagactgcaagagatggaaaaaaagtagtttgaatgttttgtgtgtaaggagtataccatgagatgagatgaccaccaatcatttccttggggggagggggtgtctgcaccttagaaaaaaaaagaaaaatcaaaaaaacaaaaaaacaaaaacaaaaaaagaaggaaaatcttggagggtgggcgtgggaactcaggaccccagagtggcgagtggtgtggggagggagagcctctctcccccttttctgtgtgagaggaactcttagtgtctggtgcagctattaaatgtgcaatgtgtcaagtagcttgttttacacgctacaacatagctcatttgtaacccattgtataagctgtgtatttacaaatataacacaacaatttaacttttccttagaatacaaaaagtcatgcatggtctggggaactatatgcttttccatttttaagtcaggactgcaatactgattccagttaatgagcagctaagatccaatctgtctaatacagtgaccccctagccatccgggcctggcaatatacaattttttttcccctccaagtttgtaacactccccttccagaaaggcattgtgcaacacaggattatttttaaatgattctgaatttgaattaactttttggagaattctgtgatgcccttagaagaaattggacacgtattgagtgtcacaaagctggggctgggaattgctggtctaatgtttcattagacttaagaacctaaaatttttctcagttgggtggataaaaccactaacgcttagaaactgttttctcatgcagctatgtttctcttatttatgccttgaggactaatttctggttttctagctgttaatgcactgttgaccttcataatggtgccttacgcaagcgatcccttctgtgggggtctcatacaggggtgtgggcgatgcatgctttattaaggctcttgtttcacctggcagtgtactgtatcaacgtataatacagaaaaaaaatctctttaaggtcctccttcacaaagacatagagtgaaactccctttacatgtcagtatttgttcaacactttaggcaacttgactgtcagtgttaaaatggaaaacaggaaaatggaaaaatctgaccaattctgccaccttgagactttcatatagaccttgcacaacaattgtatagatcacacaccggctgtatttaatatgtaacattttcacacatattaaagatacagaagtattaaaaaacccccaatgttaatgtatttgcttaaaaggcacaagtttcacatatctgtctagctatctgttggtaatacagaaagtatactacttttttaaaaaagtgggcagaattcttgtgtatgtatatttgtgtgtacagtatgtgtatgtgtgtatatatatatattatatatatagataatatataaatattttttttaaggagaaactagaatgtttagctagaaaattccacagcctgtgaagaaatatttcaaaatggccataaaggaggtaaaaatgaaaaccataacctaacttttatagaggctttatctttaatttaacgatgtgcggaggactttcttgcttgaatctgttccgggctgtctgctctgtccatcaaatgggcaggtctggaatggggcaccttcggccgttcagaagtggcctgaacagaatgctggaacccaggctggactcggacacactaaggttttgattttgaatttcagccttattagaagatctaacctaagagtaagctaaccacagggattcttttgtagaacactttttatgcagatgaagctattttttccagcaagtagattcttccagtttttccaaggagtaatttccccgaattggcataccacggcgtggacagctgatatttcacccagctgctggcttgtgggtgtggctctttgctttatatatatatacacacatgtgagtctggctgggctggtattttgtttgatcttcctggaaatgagcagtgactaacgctcacataactggttttttttttatctgggctgatgaatacatttacctaagaaactcatttcgttttacttaagaggggaagtgcagttttcttttggcagttcagaatccaagcacttgatttgctgggtttggaaaactccttttttggccttctatgtgcttagccataacaattccattaagcaagaaggtaagcaaaagacaaaaaaaaaaaaaggaaaaaaaaaaacttgcactggcttgtctcacttacgaaacatgtcggagctgtttgcctgggtggggctgggtaccgtacctgtcaatgcctgtgattttcataattagcacgtacataaagaagtacattctgttcaggtgataactgagcctcaatcaagcagaaactttttgcttgaaattaaaaaaaaatttctattagtgaaatttctttttttttttttttggaagcaccctgttatctaaagaatctttgtaagatttttgtaaaattttgttttacaagattttatttgaaattgttttttgcaagattgttatatttctgtatgaatgtattttttattggaataacataaaagaattcttatcagcaaaaaaaaaaaaaaaaaaaaaaaaaaaaaaaaaaaaaaaaaaaaaaaaaaaaaaaaaaaaaaaaaaaaaaaaaaaaaaaaaaaaaaaaaaaaatttaaaaaaaaaaaaaaaaaaaaaaaaattttgggcccttttggcccaagggtttttaaacttgggttttttttttggggcccaatttggggcttatttggccaattccccctttggggggggttttttggggccg

SEQ ID NO: 420095 - DNA, 4623 bp, Homo sapiens
  misc_feature (4335)..(4335): n is a, c, g, or t
aagttttgcaggggttacgtttgcagtcagtccggggtgtttgcaaatattgtgtgggctccgcgcgctgcgggctgcgggagggtccggccgggcgtctctgcgagcctggagtttgcatgaaactttcacctgcgctccggggagactttcggctccggctcccaccgcgcgcctcgccgccctcgcgaccgcgggctccgtccaacccggcccgacatggacgtgctccccatgtgcagcatcttccaggagctccagatcgtgcacgagaccggctacttctcggcgctgccgtctctggaggagtactggcaacagacctgcctagagctggaacgttacctccagagcgagccctgctatgtttcagcctcagaaatcaaatttgacagccaggaagatctgtggaccaaaatcattctggctcgggagaaaaaggaggaatccgaactgaagatatcttccagtcctccagaggacactctcatcagcccgagcttttgttacaacttagagaccaacagcctgaactcagatgtcagcagcgaatcctctgacagctccgaggaactttctcccacggccaagtttacctccgaccccattggcgaagttttggtcagctcgggaaaattgagctcctctgtcacctccacgcctccatcttctccggaactgagcagggaaccttctcaactgtggggttgcgtgcccggggagctgccctcgccagggaaggtgcgcagcgggacttcggggaagccaggtgacaagggaaatggcgatgcctcccccgacggcaggaggagggtgcaccggtgccactttaacggctgcaggaaagtttacaccaaaagctcccacttgaaagcacaccagcggacgcacacaggagaaaagccttacagatgctcatgggaagggtgtgagtggcgttttgcaagaagtgatgagttaaccaggcacttccgaaagcacaccggggccaagccttttaaatgctcccactgtgacaggtgtttttccaggtctgaccacctggccctgcacatgaagaggcacctctgagggagcagagaggtggatcctgtaggctaaaaggcttccaggctgagagccggccgtggaaggagggatgcgtgttccagccaaagcatgccgttctgcaccctacccagttgcctccagggcctctccttggaaggtcttttgagggctaaaaaggtcctgtaagaagcggcatagcacccgtggtgcatggtatgtgggtgaccctggactcgccactggtacccgcccttccgagcggcgcctaagcctttgccgtgagcatgcacactgagaatgctaatggttgggttgattgtatgttgaggatctattactgaccgtatgatgaggccaactttttttccttgtggttagcaagactgcaagagatggaaaaaaagtagtttgaatgttttgtgtgtaaggagtataccatgagatgagatgaccaccaatcatttccttggggggagggggtgtctgcaccttagaaaaaaaaagaaaaatcaaaaaaacaaaaaaacaaaaacaaaaaaagaaggaaaatcttggagggtgggcgtgggaactcaggaccccagagtggcgagtggtgtggggagggagagcctctctcccccttttctgtgtgagaggaactcttagtgtctggtgcagctattaaatgtgcaatgtgtcaagtagcttgttttacacgctacaacatagctcatttgtaacccattgtataagctgtgtatttacaaatataacacaacaatttaacttttccttagaatacaaaaagtcatgcatggtctggggaactatatgcttttccatttttaagtcaggactgcaatactgattccagttaatgagcagctaagatccaatctgtctaatacagtgaccccctagccatccgggcctggcaatatacaattttttttcccctccaagtttgtaacactccccttccagaaaggcattgtgcaacacaggattatttttaaatgattctgaatttgaattaactttttggagaattctgtgatgcccttagaagaaattggacacgtattgagtgtcacaaagctggggctgggaattgctggtctaatgtttcattagacttaagaacctaaaatttttctcagttgggtggataaaaccactaacgcttagaaactgttttctcatgcagctatgtttctcttatttatgccttgaggactaatttctggttttctagctgttaatgcactgttgaccttcataatggtgccttacgcaagcgatcccttctgtgggggtctcatacaggggtgtgggcgatgcatgctttattaaggctcttgtttcacctggcagtgtactgtatcaacgtataatacagaaaaaaaatctctttaaggtcctccttcacaaagacatagagtgaaactccctttacatgtcagtatttgttcaacactttaggcaacttgactgtcagtgttaaaatggaaaacaggaaaatggaaaaatctgaccaattctgccaccttgagactttcatatagaccttgcacaacaattgtatagatcacacaccggctgtatttaatatgtaacattttcacacatattaaagatacagaagtattaaaaaacccccaatgttaatgtatttgcttaaaaggcacaagtttcacatatctgtctagctatctgttggtaatacagaaagtatactacttttttaaaaaagtgggcagaattcttgtgtatgtatatttgtgtgtacagtatgtgtatgtgtgtatatatatatattatatatatagataatatataaatattttttttaaggagaaactagaatgtttagctagaaaattccacagcctgtgaagaaatatttcaaaatggccataaaggaggtaaaaatgaaaaccataacctaacttttatagaggctttatctttaatttaacgatgtgcggaggactttcttgcttgaatctgttccgggctgtctgctctgtccatcaaatgggcaggtctggaatggggcaccttcggccgttcagaagtggcctgaacagaatgctggaacccaggctggactcggacacactaaggttttgattttgaatttcagccttattagaagatctaacctaagagtaagctaaccacagggattcttttgtagaacactttttatgcagatgaagctattttttccagcaagtagattcttccagtttttccaaggagtaatttccccgaattggcataccacggcgtggacagctgatatttcacccagctgctggcttgtgggtgtggctctttgctttatatatatatacacacatgtgagtctggctgggctggtattttgtttgatcttcctggaaatgagcagtgactaacgctcacataactggttttttttttatctgggctgatgaatacatttacctaagaaactcatttcgttttacttaagaggggaagtgcagttttcttttggcagttcagaatccaagcacttgatttgctgggtttggaaaactccttttttggccttctatgtgcttagccataacaattccattaagcaagaaggtaagcaaaagacaaaaaaaaaaaaaggaaaaaaaaaaacttgcactggcttgtctcacttacgaaacatgtcggagctgtttgcctgggtggggctgggtaccgtacctgtcaatgcctgtgattttcataattagcacgtacataaagaagtacattctgttcaggtgataactgagcctcaatcaagcagaaactttttgcttgaaattaaaaaaaaatttctattagtgaaatttctttttttttttttttggaagcaccctgttatctaaagaatctttgtaagatttttgtaaaattttgttttacaagattttatttgaaattgttttttgcaagattgttatatttctgtatgaatgtattttttattggaataacataaaagaattcttatcagcaaaaaaagaaacaacacaaaaacaagaacacaaaaacacaacatgttgttgggcccccgctgcggccccccgcggaaagatgctttatcataacaccacccatctgttttggtgggaacccgccggccccccaatttcgtaatcggtgcaaacgtggtgctcatctaggagctggtctccccaaacagaacaaccgctgggatcacaacacaaaggtgctggggaccttctccccccaaccagaaaaaaaagcggccgggcgagaaaaacacagacgcgntgttctgagaaaaaaccaccaagcggcgcgtcccagcaggccaaccaccgcgggacttctcaccaacgaggactccccacggagcgactcggcataaacaattaccccggccccggtgggtgtagacacgccggagctagcagcagccacgccagaacgacaagtgctggcccacaacaccaaacgcacagcgagcagacgcgagaccagacagaccagaacgcgcgatggagcgcgaaccaagagcgacgcacatccagacaaacgacagcagagacgaaccagccg

SEQ ID NO: 420096 - DNA, 4001 bp, Homo sapiens
aagttttgcaggggttacgtttgcagtcagtccggggtgtttgcaaatattgtgtgggctccgcgcgctgcgggctgcgggagggtccggccgggcgtctctgcgagcctggagtttgcatgaaactttcacctgcgctccggggagactttcggctccggctcccaccgcgcgcctcgccgccctcgcgaccgcgggctccgtccaacccggcccgacatggacgtgctccccatgtgcagcatcttccaggagctccagatcgtgcacgagaccggctacttctcggcgctgccgtctctggaggagtactggcaacagacctgcctagagctggaacgttacctccagagcgagccctgctatgtttcagcctcagaaatcaaatttgacagccaggaagatctgtggaccaaaatcattctggctcgggagaaaaaggaggaatccgaactgaagatatcttccagtcctccagaggacactctcatcagcccgagcttttgttacaacttagagaccaacagcctgaactcagatgtcagcagcgaatcctctgacagctccgaggaactttctcccacggccaagtttacctccgaccccattggcgaagttttggtcagctcgggaaaattgagctcctctgtcacctccacgcctccatcttctccggaactgagcagggaaccttctcaactgtggggttgcgtgcccggggagctgccctcgccagggaaggtgcgcagcgggacttcggggaagccaggtgacaagggaaatggcgatgcctcccccgacggcaggaggagggtgcaccggtgccactttaacggctgcaggaaagtttacaccaaaagctcccacttgaaagcacaccagcggacgcacacaggagaaaagccttacagatgctcatgggaagggtgtgagtggcgttttgcaagaagtgatgagttaaccaggcacttccgaaagcacaccggggccaagccttttaaatgctcccactgtgacaggtgtttttccaggtctgaccacctggccctgcacatgaagaggcacctctgagggagcagagaggtggatcctgtaggctaaaaggcttccaggctgagagccggccgtggaaggagggatgcgtgttccagccaaagcatgccgttctgcaccctacccagttgcctccagggcctctccttggaaggtcttttgagggctaaaaaggtcctgtaagaagcggcatagcacccgtggtgcatggtatgtgggtgaccctggactcgccactggtacccgcccttccgagcggcgcctaagcctttgccgtgagcatgcacactgagaatgctaatggttgggttgattgtatgttgaggatctattactgaccgtatgatgaggccaactttttttccttgtggttagcaagactgcaagagatggaaaaaaagtagtttgaatgttttgtgtgtaaggagtataccatgagatgagatgaccaccaatcatttccttggggggagggggtgtctgcaccttagaaaaaaaaagaaaaatcaaaaaaacaaaaaaacaaaaacaaaaaaagaaggaaaatcttggagggtgggcgtgggaactcaggaccccagagtggcgagtggtgtggggagggagagcctctctcccccttttctgtgtgagaggaactcttagtgtctggtgcagctattaaatgtgcaatgtgtcaagtagcttgttttacacgctacaacatagctcatttgtaacccattgtataagctgtgtatttacaaatataacacaacaatttaacttttccttagaatacaaaaagtcatgcatggtctggggaactatatgcttttccatttttaagtcaggactgcaatactgattccagttaatgagcagctaagatccaatctgtctaatacagtgaccccctagccatccgggcctggcaatatacaattttttttcccctccaagtttgtaacactccccttccagaaaggcattgtgcaacacaggattatttttaaatgattctgaatttgaattaactttttggagaattctgtgatgcccttagaagaaattggacacgtattgagtgtcacaaagctggggctgggaattgctggtctaatgtttcattagacttaagaacctaaaatttttctcagttgggtggattgccttgaggactaatttctggttttctagctgttaatgcactgttgaccttcataatggtgccttacgcaagcgatcccttctgtgggggtctcatacaggggtgtgggcgatgcatgctttattaaggctcttgtttcacctggcagtgtactgtatcaacgtataatacagaaaaaaaatctctttaaggtcctccttcacaaagacatagagtgaaactccctttacatgtcagtatttgttcaacactttaggcaacttgactgtcagtgttaaaatggaaaacaggaaaatggaaaaatctgaccaattctgccaccttgagactttcatatagaccttgcacaacaattgtatagatcacacaccggctgtatttaatatgtaacattttcacacatattaaagatacagaagtattaaaaaacccccaatgttaatgtatttgcttaaaaggcacaagtttcacatatctgtctagctatctgttggtaatacagaaagtatactacttttttaaaaaagtgggcagaattcttgtgtatgtatatttgtgtgtacagtatgtgtatgtgtgtatatatatatattatatatatagataatatataaatattttttttaaggagaaactagaatgtttagctagaaaattccacagcctgtgaagaaatatttcaaaatggccataaaggaggtaaaaatgaaaaccataacctaacttttatagaggctttatctttaatttaacgatgtgcggaggactttcttgcttgaatctgttccgggctgtctgctctgtccatcaaatgggcaggtctggaatggggcaccttcggccgttcagaagtggcctgaacagaatgctggaacccaggctggactcggacacactaaggttttgattttgaatttcagccttattagaagatctaacctaagagtaagctaaccacagggattcttttgtagaacactttttatgcagatgaagctattttttccagcaagtagattcttccagtttttccaaggagtaatttccccgaattggcataccacggcgtggacagctgatatttcacccagctgctggcttgtgggtgtggctctttgctttatatatatatacacacatgtgagtctggctgggctggtattttgtttgatcttcctggaaatgagcagtgactaacgctcacataactggttttttttttatctgggctgatgaatacatttacctaagaaactcatttcgttttacttaagaggggaagtgcagttttcttttggcagttcagaatccaagcacttgatttgctgggtttggaaaactccttttttggccttctatgtgcttagccataacaattccattaagcaagaaggtaagcaaaagacaaaaaaaaaaaaaggaaaaaaaaaaacttgcactggcttgtctcacttacgaaacatgtcggagctgtttgcctgggtggggctgggtaccgtacctgtcaatgcctgtgattttcataattagcacgtacataaagaagtacattctgttcaggtgataactgagcctcaatcaagcagaaactttttgcttgaaattaaaaaaaaatttctattagtgaaatttctttttttttttttttggaagcaccctgttatctaaagaatctttgtaagatttttgtaaaattttgttttacaagattttatttgaaattgttttttgcaagattgttatatttctgtatgaatgtattttttattggaataacataaaagaattcttatcagca

SEQ ID NO: 420097 - DNA, 4344 bp, Homo sapiens
  misc_feature (4344)..(4344): n is a, c, g, or t
aagttttgcaggggttacgtttgcagtcagtccggggtgtttgcaaatattgtgtgggctccgcgcgctgcgggctgcgggagggtccggccgggcgtctctgcgagcctggagtttgcatgaaactttcacctgcgctccggggagactttcggctccggctcccaccgcgcgcctcgccgccctcgcgaccgcgggctccgtccaacccggcccgacatggacgtgctccccatgtgcagcatcttccaggagctccagatcgtgcacgagaccggctacttctcggcgctgccgtctctggaggagtactggcaacagacctgcctagagctggaacgttacctccagagcgagccctgctatgtttcagcctcagaaatcaaatttgacagccaggaagatctgtggaccaaaatcattctggctcgggagaaaaaggaggaatccgaactgaagatatcttccagtcctccagaggacactctcatcagcccgagcttttgttacaacttagagaccaacagcctgaactcagatgtcagcagcgaatcctctgacagctccgaggaactttctcccacggccaagtttacctccgaccccattggcgaagttttggtcagctcgggaaaattgagctcctctgtcacctccacgcctccatcttctccggaactgagcagggaaccttctcaactgtggggttgcgtgcccggggagctgccctcgccagggaaggtgcgcagcgggacttcggggaagccaggtgacaagggaaatggcgatgcctcccccgacggcaggaggagggtgcaccggtgccactttaacggctgcaggaaagtttacaccaaaagctcccacttgaaagcacaccagcggacgcacacaggagaaaagccttacagatgctcatgggaagggtgtgagtggcgttttgcaagaagtgatgagttaaccaggcacttccgaaagcacaccggggccaagccttttaaatgctcccactgtgacaggtgtttttccaggtctgaccacctggccctgcacatgaagaggcacctctgagggagcagagaggtggatcctgtaggctaaaaggcttccaggctgagagccggccgtggaaggagggatgcgtgttccagccaaagcatgccgttctgcaccctacccagttgcctccagggcctctccttggaaggtcttttgagggctaaaaaggtcctgtaagaagcggcatagcacccgtggtgcatggtatgtgggtgaccctggactcgccactggtacccgcccttccgagcggcgcctaagcctttgccgtgagcatgcacactgagaatgctaatggttgggttgattgtatgttgaggatctattactgaccgtatgatgaggccaactttttttccttgtggttagcaagactgcaagagatggaaaaaaagtagtttgaatgttttgtgtgtaaggagtataccatgagatgagatgaccaccaatcatttccttggggggagggggtgtctgcaccttagaaaaaaaaagaaaaatcaaaaaaacaaaaaaacaaaaacaaaaaaagaaggaaaatcttggagggtgggcgtgggaactcaggaccccagagtggcgagtggtgtggggagggagagcctctctcccccttttctgtgtgagaggaactcttagtgtctggtgcagctattaaatgtgcaatgtgtcaagtagcttgttttacacgctacaacatagctcatttgtaacccattgtataagctgtgtatttacaaatataacacaacaatttaacttttccttagaatacaaaaagtcatgcatggtctggggaactatatgcttttccatttttaagtcaggactgcaatactgattccagttaatgagcagctaagatccaatctgtctaatacagtgaccccctagccatccgggcctggcaatatacaattttttttcccctccaagtttgtaacactccccttccagaaaggcattgtgcaacacaggattatttttaaatgattctgaatttgaattaactttttggagaattctgtgatgcccttagaagaaattggacacgtattgagtgtcacaaagctggggctgggaattgctggtctaatgtttcattagacttaagaacctaaaatttttctcagttgggtggataaaaccactaacgcttagaaactgttttctcatgcagctatgtttctcttatttatgccttgaggactaatttctggttttctagctgttaatgcactgttgaccttcataatggtgccttacgcaagcgatcccttctgtgggggtctcatacaggggtgtgggcgatgcatgctttattaaggctcttgtttcacctggcagtgtactgtatcaacgtataatacagaaaaaaaatctctttaaggtcctccttcacaaagacatagagtgaaactccctttacatgtcagtatttgttcaacactttaggcaacttgactgtcagtgttaaaatggaaaacaggaaaatggaaaaatctgaccaattctgccaccttgagactttcatatagaccttgcacaacaattgtatagatcacacaccggctgtatttaatatgtaacattttcacacatattaaagatacagaagtattaaaaaacccccaatgttaatgtatttgcttaaaaggcacaagtttcacatatctgtctagctatctgttggtaatacagaaagtatactacttttttaaaaaagtgggcagaattcttgtgtatgtatatttgtgtgtacagtatgtgtatgtgtgtatatatatatattatatatatagataatatataaatattttttttaaggagaaactagaatgtttagctagaaaattccacagcctgtgaagaaatatttcaaaatggccataaaggaggtaaaaatgaaaaccataacctaacttttatagaggctttatctttaatttaacgatgtgcggaggactttcttgcttgaatctgttccgggctgtctgctctgtccatcaaatgggcaggtctggaatggggcaccttcggccgttcagaagtggcctgaacagaatgctggaacccaggctggactcggacacactaaggttttgattttgaatttcagccttattagaagatctaacctaagagtaagctaaccacagggattcttttgtagaacactttttatgcagatgaagctattttttccagcaagtagattcttccagtttttccaaggagtaatttccccgaattggcataccacggcgtggacagctgatatttcacccagctgctggcttgtgggtgtggctctttgctttatatatatatacacacatgtgagtctggctgggctggtattttgtttgatcttcctggaaatgagcagtgactaacgctcacataactggttttttttttatctgggctgatgaatacatttacctaagaaactcatttcgttttacttaagaggggaagtgcagttttcttttggcagttcagaatccaagcacttgatttgctgggtttggaaaactccttttttggccttctatgtgcttagccataacaattccattaagcaagaaggtaagcaaaagacaaaaaaaaaaaaaggaaaaaaaaaacacctggccactgtggcttggtcctctctcaactttacgaaaacatttgtctcggaacctgtgtttggcctgtgggtgtgggggctgtggggttcaaccgtacctgtgtctcaaaagtgcccctgtggtgaaatttcccattaatttatagcgcacgttatactatataaagaaaagttacaatctctgtgtctccagagcggtgaattacactgtggagccctctcaaaatctccaagagccccgagaaaaacactttttgtggggcttgtgaaacaactttttaaacaaaaaaaacattctctcttctttattcagagcgtgaaaaattttctctttttttattttttttttgtgtgggaacagccccaccgggtgttttctctcttcagagagaaacattttgtggtgggagaagaaaaggaaaatttttggtgtgtgcgataaacaacatttgtgtgtgtgtcttacaccaaagagatattttttcatctgtgggcaacaaaatgtgtggtgttttttttgtcggggcaaaagaaaaaatgttggtggtggttaaataattttatttttcttctcgtggtggataatgaaatagagacgtgtgtataattttttataaagtggtggggagaaatatacactttttaaagan

SEQ ID NO: 420098 - DNA, 5469 bp, Homo sapiens
aagttttgcaggggttacgtttgcagtcagtccggggtgtttgcaaatattgtgtgggctccgcgcgctgcgggctgcgggagggtccggccgggcgtctctgcgagcctggagtttgcatgaaactttcacctgcgctccggggagactttcggctccggctcccaccgcgcgcctcgccgccctcgcgaccgcgggctccgtccaacccggcccgacatggacgtgctccccatgtgcagcatcttccaggagctccagatcgtgcacgagaccggctacttctcggcgctgccgtctctggaggagtactggcaacagacctgcctagagctggaacgttacctccagagcgagccctgctatgtttcagcctcagaaatcaaatttgacagccaggaagatctgtggaccaaaatcattctggctcgggagaaaaaggaggaatccgaactgaagatatcttccagtcctccagaggacactctcatcagcccgagcttttgttacaacttagagaccaacagcctgaactcagatgtcagcagcgaatcctctgacagctccgaggaactttctcccacggccaagtttacctccgaccccattggcgaagttttggtcagctcgggaaaattgagctcctctgtcacctccacgcctccatcttctccggaactgagcagggaaccttctcaactgtggggttgcgtgcccggggagctgccctcgccagggaaggtgcgcagcgggacttcggggaagccaggtgacaagggaaatggcgatgcctcccccgacggcaggaggagggtgcaccggtgccactttaacggctgcaggaaagtttacaccaaaagctcccacttgaaagcacaccagcggacgcacacagaggtcagtgcccacgcgggccccggagggcggccgctggtgggcgccactgcattgcaccagccctggagggagccgggcctggctgcacaggatgtggtcagggcagacaaatcctcacttcctcagatgttttccaccaaagcattaggtctttttggagttcagagtagaatcctaaagactggacttttgagttggataaatgtgtaacaattttcagattaaacaaacaagagactagatccttttctccacggacacccaaacctccaccccccaccccttagtagtgctggggatccgaggccactgccccttcaccagtgcactcgcacgaggctacctcgagcggccctggggtttcctaaatgaaactcaagggtcaggacagagggttgctgggcagcgtggagtgtgtgggtttgatgctgacggcccgaggcccgagtgggaccggcctgctctgtaagcagcagcattgatcagcgagtgtttcctgagaacttctccgtgtctcatgcagcctttgtttctgataccgcttgaaacagtttcttaatgaaatgccatacctaggtgaaagtgccatttaaaaataccttgacatgttctaggataattggtgaggaatcacagaacatttagaactgggaagggtcttagtgatcacgtgatgcaggctcttctcttatcagtaggagagcaaattgctgagagtcagtcccagacaggcttggtgacagctgagattgagatccgggtggcccaatatccaggcccaggcctgtctcaacataccctgagattggcttgacaactttgttttctcaggtagcacttgtagtaaattcatatttatgatttgaccaaggaatgaagtgaacccagttgttcaattgccatttagagaatgattccggggccctgtactggggctttccagaagctcgtaacttcagctttgtagaaaggtagaacgtccctgaggaaactgcagaggcacattccatagggaagtgaggatggaacagaagtgtgtttgggagaaacagttgccatgaagaaagcaatagctctgcctttgccggggctgtgggtccggcaggctgacacctcatcccgcaagcattttgctggtctgagtcgtggtcgttcttccacgttaactttgatgacagcaccatgggcttggctgaagctgtgtcccttggacagcagtgggaggcctgagactgggtcaggagagagctgctgttgtctctctgaggctgccagttgttgtgtgttaccgatgccagaagccactgggtccctggccttgcatcccaccactgtgtgtgttgttgaatttcccctttccgtctgcgggtcagtgaagtcatgggctgcttgtcctgtgctctctccccaggagaaaagccttacagatgctcatgggaagggtgtgagtggcgttttgcaagaagtgatgagttaaccaggcacttccgaaagcacaccggggccaagccttttaaatgctcccactgtgacaggtgtttttccaggtctgaccacctggccctgcacatgaagaggcacctctgagggagcagagaggtggatcctgtaggctaaaaggcttccaggctgagagccggccgtggaaggagggatgcgtgttccagccaaagcatgccgttctgcaccctacccagttgcctccagggcctctccttggaaggtcttttgagggctaaaaaggtcctgtaagaagcggcatagcacccgtggtgcatggtatgtgggtgaccctggactcgccactggtacccgcccttccgagcggcgcctaagcctttgccgtgagcatgcacactgagaatgctaatggttgggttgattgtatgttgaggatctattactgaccgtatgatgaggccaactttttttccttgtggttagcaagactgcaagagatggaaaaaaagtagtttgaatgttttgtgtgtaaggagtataccatgagatgagatgaccaccaatcatttccttggggggagggggtgtctgcaccttagaaaaaaaaagaaaaatcaaaaaaacaaaaaaacaaaaacaaaaaaagaaggaaaatcttggagggtgggcgtgggaactcaggaccccagagtggcgagtggtgtggggagggagagcctctctcccccttttctgtgtgagaggaactcttagtgtctggtgcagctattaaatgtgcaatgtgtcaagtagcttgttttacacgctacaacatagctcatttgtaacccattgtataagctgtgtatttacaaatataacacaacaatttaacttttccttagaatacaaaaagtcatgcatggtctggggaactatatgcttttccatttttaagtcaggactgcaatactgattccagttaatgagcagctaagatccaatctgtctaatacagtgaccccctagccatccgggcctggcaatatacaattttttttcccctccaagtttgtaacactccccttccagaaaggcattgtgcaacacaggattatttttaaatgattctgaatttgaattaactttttggagaattctgtgatgcccttagaagaaattggacacgtattgagtgtcacaaagctggggctgggaattgctggtctaatgtttcattagacttaagaacctaaaatttttctcagttgggtggataaaaccactaacgcttagaaactgttttctcatgcagctatgtttctcttatttatgccttgaggactaatttctggttttctagctgttaatgcactgttgaccttcataatggtgccttacgcaagcgatcccttctgtgggggtctcatacaggggtgtgggcgatgcatgctttattaaggctcttgtttcacctggcagtgtactgtatcaacgtataatacagaaaaaaaatctctttaaggtcctccttcacaaagacatagagtgaaactccctttacatgtcagtatttgttcaacactttaggcaacttgactgtcagtgttaaaatggaaaacaggaaaatggaaaaatctgaccaattctgccaccttgagactttcatatagaccttgcacaacaattgtatagatcacacaccggctgtatttaatatgtaacattttcacacatattaaagatacagaagtattaaaaaacccccaatgttaatgtatttgcttaaaaggcacaagtttcacatatctgtctagctatctgttggtaatacagaaagtatactacttttttaaaaaagtgggcagaattcttgtgtatgtatatttgtgtgtacagtatgtgtatgtgtgtatatatatatattatatatatagataatatataaatattttttttaaggagaaactagaatgtttagctagaaaattccacagcctgtgaagaaatatttcaaaatggccataaaggaggtaaaaatgaaaaccataacctaacttttatagaggctttatctttaatttaacgatgtgcggaggactttcttgcttgaatctgttccgggctgtctgctctgtccatcaaatgggcaggtctggaatggggcaccttcggccgttcagaagtggcctgaacagaatgctggaacccaggctggactcggacacactaaggttttgattttgaatttcagccttattagaagatctaacctaagagtaagctaaccacagggattcttttgtagaacactttttatgcagatgaagctattttttccagcaagtagattcttccagtttttccaaggagtaatttccccgaattggcataccacggcgtggacagctgatatttcacccagctgctggcttgtgggtgtggctctttgctttatatatatatacacacatgtgagtctggctgggctggtattttgtttgatcttcctggaaatgagcagtgactaacgctcacataactggttttttttttatctgggctgatgaatacatttacctaagaaactcatttcgttttacttaagaggggaagtgcagttttcttttggcagttcagaatccaagcacttgatttgctgggtttggaaaactccttttttggccttctatgtgcttagccataacaattccattaagcaagaaggtaagcaaaagacaaaaaaaaaaaaaggaaaaaaaaaaacttgcactggcttgtctcacttacgaaacatgtcggagctgtttgcctgggtggggctgggtaccgtacctgtcaatgcctgtgattttcataattagcacgtacataaagaagtacattctgttcaggtgataactgagcctcaatcaagcagaaactttttgcttgaaattaaaaaaaaatttctattagtgaaatttctttttttttttttttggaagcaccctgttatctaaagaatctttgtaagatttttgtaaaattttgttttacaagattttatttgaaattgttttttgcaagattgttatatttctgtatgaatgtattttttattggaataacataaaagaattcttatcagca

SEQ ID NO: 420099 - DNA, 5984 bp, Homo sapiens
aagttttgcaggggttacgtttgcagtcagtccggggtgtttgcaaatattgtgtgggctccgcgcgctgcgggctgcgggagggtccggccgggcgtctctgcgagcctggagtttgcatgaaactttcacctgcgctccggggagactttcggctccggctcccaccgcgcgcctcgccgccctcgcgaccgcgggctccgtccaacccggcccgacatggacgtgctccccatgtgcagcatcttccaggagctccagatcgtgcacgagaccggctacttctcggcgctgccgtctctggaggagtactggcaacagacctgcctagagctggaacgttacctccagagcgagccctgctatgtttcagcctcagaaatcaaatttgacagccaggaagatctgtggaccaaaatcattctggctcgggagaaaaaggaggaatccgaactgaagatatcttccagtcctccagaggacactctcatcagcccgagcttttgttacaacttagagaccaacagcctgaactcagatgtcagcagcgaatcctctgacagctccgaggaactttctcccacggccaagtttacctccgaccccattggcgaagttttggtcagctcgggaaaattgagctcctctgtcacctccacgcctccatcttctccggaactgagcagggaaccttctcaactgtggggttgcgtgcccggggagctgccctcgccagggaaggtgcgcagcgggacttcggggaagccaggtgacaagggaaatggcgatgcctcccccgacggcaggaggagggtgcaccggtgccactttaacggctgcaggaaagtttacaccaaaagctcccacttgaaagcacaccagcggacgcacacagaggtcagtgcccacgcgggccccggagggcggccgctggtgggcgccactgcattgcaccagccctggagggagccgggcctggctgcacaggatgtggtcagggcagacaaatcctcacttcctcagatgttttccaccaaagcattaggtctttttggagttcagagtagaatcctaaagactggacttttgagttggataaatgtgtaacaattttcagattaaacaaacaagagactagatccttttctccacggacacccaaacctccaccccccaccccttagtagtgctggggatccgaggccactgccccttcaccagtgcactcgcacgaggctacctcgagcggccctggggtttcctaaatgaaactcaagggtcaggacagagggttgctgggcagcgtggagtgtgtgggtttgatgctgacggcccgaggcccgagtgggaccggcctgctctgtaagcagcagcattgatcagcgagtgtttcctgagaacttctccgtgtctcatgcagcctttgtttctgataccgcttgaaacagtttcttaatgaaatgccatacctaggtgaaagtgccatttaaaaataccttgacatgttctaggataattggtgaggaatcacagaacatttagaactgggaagggtcttagtgatcacgtgatgcaggctcttctcttatcagtaggagagcaaattgctgagagtcagtcccagacaggcttggtgacagctgagattgagatccgggtggcccaatatccaggcccaggcctgtctcaacataccctgagattggcttgacaactttgttttctcaggtagcacttgtagtaaattcatatttatgatttgaccaaggaatgaagtgaacccagttgttcaattgccatttagagaatgattccggggccctgtactggggctttccagaagctcgtaacttcagctttgtagaaaggtagaacgtccctgaggaaactgcagaggcacattccatagggaagtgaggatggaacagaagtgtgtttgggagaaacagttgccatgaagaaagcaatagctctgcctttgccggggctgtgggtccggcaggctgacacctcatcccgcaagcattttgctggtctgagtcgtggtcgttcttccacgttaactttgatgacagcaccatgggcttggctgaagctgtgtcccttggacagcagtgggaggcctgagactgggtcaggagagagctgctgttgtctctctgaggctgccagttgttgtgtgttaccgatgccagaagccactgggtccctggccttgcatcccaccactgtgtgtgttgttgaatttcccctttccgtctgcgggtcagtgaagtcatgggctgcttgtcctgtgctctctccccaggagaaaagccttacagatgctcatgggaagggtgtgagtggcgttttgcaagaagtgatgagttaaccaggcacttccgaaagcacaccggggccaagccttttaaatgctcccactgtgacaggtacgtgcctgaggacaatgctgggcaaggagcgtggggccttgggaatgtgatgaccagggttgagtaggtgtgcagggcacattcgaaggaaggcatgcagtttcctatgtgtgaacatttcttttcaagcctgggactttttagaaagtttctggtgtgctcattgtccatggttaggaagaactgttccacatacacctgacattggagtcagtttattgatatgtttggagattggcctttcaacagttttcatatttgaagaattagaaatgaagtccgttcagattctccaaagaacctccagccactggtgggggacattcttaattcacattcctatcagttggtatctcctgtccctgaagacactgatgaggcttgggaggagaatcccacctttccctgcagggggttaggctgggcagggcagggaggtgagggcgctggtccagaacactggcaagggatgggaacctaaattcttctgtgcttctgatttgcccttgcaggtgtttttccaggtctgaccacctggccctgcacatgaagaggcacctctgagggagcagagaggtggatcctgtaggctaaaaggcttccaggctgagagccggccgtggaaggagggatgcgtgttccagccaaagcatgccgttctgcaccctacccagttgcctccagggcctctccttggaaggtcttttgagggctaaaaaggtcctgtaagaagcggcatagcacccgtggtgcatggtatgtgggtgaccctggactcgccactggtacccgcccttccgagcggcgcctaagcctttgccgtgagcatgcacactgagaatgctaatggttgggttgattgtatgttgaggatctattactgaccgtatgatgaggccaactttttttccttgtggttagcaagactgcaagagatggaaaaaaagtagtttgaatgttttgtgtgtaaggagtataccatgagatgagatgaccaccaatcatttccttggggggagggggtgtctgcaccttagaaaaaaaaagaaaaatcaaaaaaacaaaaaaacaaaaacaaaaaaagaaggaaaatcttggagggtgggcgtgggaactcaggaccccagagtggcgagtggtgtggggagggagagcctctctcccccttttctgtgtgagaggaactcttagtgtctggtgcagctattaaatgtgcaatgtgtcaagtagcttgttttacacgctacaacatagctcatttgtaacccattgtataagctgtgtatttacaaatataacacaacaatttaacttttccttagaatacaaaaagtcatgcatggtctggggaactatatgcttttccatttttaagtcaggactgcaatactgattccagttaatgagcagctaagatccaatctgtctaatacagtgaccccctagccatccgggcctggcaatatacaattttttttcccctccaagtttgtaacactccccttccagaaaggcattgtgcaacacaggattatttttaaatgattctgaatttgaattaactttttggagaattctgtgatgcccttagaagaaattggacacgtattgagtgtcacaaagctggggctgggaattgctggtctaatgtttcattagacttaagaacctaaaatttttctcagttgggtggataaaaccactaacgcttagaaactgttttctcatgcagctatgtttctcttatttatgccttgaggactaatttctggttttctagctgttaatgcactgttgaccttcataatggtgccttacgcaagcgatcccttctgtgggggtctcatacaggggtgtgggcgatgcatgctttattaaggctcttgtttcacctggcagtgtactgtatcaacgtataatacagaaaaaaaatctctttaaggtcctccttcacaaagacatagagtgaaactccctttacatgtcagtatttgttcaacactttaggcaacttgactgtcagtgttaaaatggaaaacaggaaaatggaaaaatctgaccaattctgccaccttgagactttcatatagaccttgcacaacaattgtatagatcacacaccggctgtatttaatatgtaacattttcacacatattaaagatacagaagtattaaaaaacccccaatgttaatgtatttgcttaaaaggcacaagtttcacatatctgtctagctatctgttggtaatacagaaagtatactacttttttaaaaaagtgggcagaattcttgtgtatgtatatttgtgtgtacagtatgtgtatgtgtgtatatatatatattatatatatagataatatataaatattttttttaaggagaaactagaatgtttagctagaaaattccacagcctgtgaagaaatatttcaaaatggccataaaggaggtaaaaatgaaaaccataacctaacttttatagaggctttatctttaatttaacgatgtgcggaggactttcttgcttgaatctgttccgggctgtctgctctgtccatcaaatgggcaggtctggaatggggcaccttcggccgttcagaagtggcctgaacagaatgctggaacccaggctggactcggacacactaaggttttgattttgaatttcagccttattagaagatctaacctaagagtaagctaaccacagggattcttttgtagaacactttttatgcagatgaagctattttttccagcaagtagattcttccagtttttccaaggagtaatttccccgaattggcataccacggcgtggacagctgatatttcacccagctgctggcttgtgggtgtggctctttgctttatatatatatacacacatgtgagtctggctgggctggtattttgtttgatcttcctggaaatgagcagtgactaacgctcacataactggttttttttttatctgggctgatgaatacatttacctaagaaactcatttcgttttacttaagaggggaagtgcagttttcttttggcagttcagaatccaagcacttgatttgctgggtttggaaaactccttttttggccttctatgtgcttagccataacaattccattaagcaagaaggtaagcaaaagacaaaaaaaaaaaaaggaaaaaaaaaaacttgcactggcttgtctcacttacgaaacatgtcggagctgtttgcctgggtggggctgggtaccgtacctgtcaatgcctgtgattttcataattagcacgtacataaagaagtacattctgttcaggtgataactgagcctcaatcaagcagaaactttttgcttgaaattaaaaaaaaatttctattagtgaaatttctttttttttttttttggaagcaccctgttatctaaagaatctttgtaagatttttgtaaaattttgttttacaagattttatttgaaattgttttttgcaagattgttatatttctgtatgaatgtattttttattggaataacataaaagaattcttatcagca

SEQ ID NO: 420100 - DNA, 5259 bp, Homo sapiens
cgggtgttgtaagatctggggagaggggaagtactggctccttctaatcagcaacactgtgtgggcatacaatggaggaatccagtaatggaaactataggcctgagtaatttagaacagaatttcacaattatatacagcatataggtagggaaggacatggagtatataaggtgtttgcaaatattgtgtgggctccgcgcgctgcgggctgcgggagggtccggccgggcgtctctgcgagcctggagtttgcatgaaactttcacctgcgctccggggagactttcggctccggctcccaccgcgcgcctcgccgccctcgcgaccgcgggctccgtccaacccggcccgacatggacgtgctccccatgtgcagcatcttccaggagctccagatcgtgcacgagaccggctacttctcggcgctgccgtctctggaggagtactggcaacagtggctagaaagtttgaaatggtggggagaggggatgctgatctcggcagttgtagcttcttgaaaggttggttgcggggctggggaaggggtactgtccatgccacactgcatgtccatttgagctgggtccttatttggctgctgatgagaatttcaaaaggaagtctcctttggcattgcgtgaaagaaatcagagtgatgactcatgcagttgtactcttggccagtagataaagttcttgttcattgtgggactcccagcagggccgtggagtaatttccccttgcacccttcacaatagcagatggccatgctggaattatttctgcactcctgttgttgaagttccttgtttttctctgaccactgtagaagtaattaaagttctgtgtcatgcaagggcctgcacttgggaacggcattctgtgaaaacataggcggtctgggctacacaggaaatgggtggtttttctgcagctccattcgatgcccctgaatacagacagctgctgtctcctctcccccgagtgtggccctgtgttgtcagccgtgtccccaagggggtccctcagaacacgctgtgtgccgtgcagtctttctgtcctgtgtgggtatctgtggagtgtgaagggtggatggctggggctttccttaaaacacatggttcttgacaatgtcagataatctggttgaacctgttggggaggagtatgtgtatggggccggttctcttcctctggtttcatgagaaacatcaacactggtaactacaacaaaaaaaccggcttagtgatcatcactcattgtggcccttggcccaacattgggaaagccaggagaggtttcaccctccgattttcctctgaattcttaccattctagaaacagatttcctctaacttccgtaaggacacggatgcttaattacaaaaggttttgcccctgtagtgaccgggcagcaatgttatctgtccttcattcttgcatgtttttggaaattgcttttgcttttacttttggtcgtcatggcaatcacgtgccttctctggttcattttgcacagacctgcctagagctggaacgttacctccagagcgagccctgctatgtttcagcctcagaaatcaaatttgacagccaggaagatctgtggaccaaaatcattctggctcgggagaaaaaggaggaatccgaactgaagatatcttccagtcctccagaggacactctcatcagcccgagcttttgttacaacttagagaccaacagcctgaactcagatgtcagcagcgaatcctctgacagctccgaggaactttctcccacggccaagtttacctccgaccccattggcgaagttttggtcagctcgggaaaattgagctcctctgtcacctccacgcctccatcttctccggaactgagcagggaaccttctcaactgtggggttgcgtgcccggggagctgccctcgccagggaaggtgcgcagcgggacttcggggaagccaggtgacaagggaaatggcgatgcctcccccgacggcaggaggagggtgcaccggtgccactttaacggctgcaggaaagtttacaccaaaagctcccacttgaaagcacaccagcggacgcacacaggagaaaagccttacagatgctcatgggaagggtgtgagtggcgttttgcaagaagtgatgagttaaccaggcacttccgaaagcacaccggggccaagccttttaaatgctcccactgtgacaggtgtttttccaggtctgaccacctggccctgcacatgaagaggcacctctgagggagcagagaggtggatcctgtaggctaaaaggcttccaggctgagagccggccgtggaaggagggatgcgtgttccagccaaagcatgccgttctgcaccctacccagttgcctccagggcctctccttggaaggtcttttgagggctaaaaaggtcctgtaagaagcggcatagcacccgtggtgcatggtatgtgggtgaccctggactcgccactggtacccgcccttccgagcggcgcctaagcctttgccgtgagcatgcacactgagaatgctaatggttgggttgattgtatgttgaggatctattactgaccgtatgatgaggccaactttttttccttgtggttagcaagactgcaagagatggaaaaaaagtagtttgaatgttttgtgtgtaaggagtataccatgagatgagatgaccaccaatcatttccttggggggagggggtgtctgcaccttagaaaaaaaaagaaaaatcaaaaaaacaaaaaaacaaaaacaaaaaaagaaggaaaatcttggagggtgggcgtgggaactcaggaccccagagtggcgagtggtgtggggagggagagcctctctcccccttttctgtgtgagaggaactcttagtgtctggtgcagctattaaatgtgcaatgtgtcaagtagcttgttttacacgctacaacatagctcatttgtaacccattgtataagctgtgtatttacaaatataacacaacaatttaacttttccttagaatacaaaaagtcatgcatggtctggggaactatatgcttttccatttttaagtcaggactgcaatactgattccagttaatgagcagctaagatccaatctgtctaatacagtgaccccctagccatccgggcctggcaatatacaattttttttcccctccaagtttgtaacactccccttccagaaaggcattgtgcaacacaggattatttttaaatgattctgaatttgaattaactttttggagaattctgtgatgcccttagaagaaattggacacgtattgagtgtcacaaagctggggctgggaattgctggtctaatgtttcattagacttaagaacctaaaatttttctcagttgggtggataaaaccactaacgcttagaaactgttttctcatgcagctatgtttctcttatttatgccttgaggactaatttctggttttctagctgttaatgcactgttgaccttcataatggtgccttacgcaagcgatcccttctgtgggggtctcatacaggggtgtgggcgatgcatgctttattaaggctcttgtttcacctggcagtgtactgtatcaacgtataatacagaaaaaaaatctctttaaggtcctccttcacaaagacatagagtgaaactccctttacatgtcagtatttgttcaacactttaggcaacttgactgtcagtgttaaaatggaaaacaggaaaatggaaaaatctgaccaattctgccaccttgagactttcatatagaccttgcacaacaattgtatagatcacacaccggctgtatttaatatgtaacattttcacacatattaaagatacagaagtattaaaaaacccccaatgttaatgtatttgcttaaaaggcacaagtttcacatatctgtctagctatctgttggtaatacagaaagtatactacttttttaaaaaagtgggcagaattcttgtgtatgtatatttgtgtgtacagtatgtgtatgtgtgtatatatatatattatatatatagataatatataaatattttttttaaggagaaactagaatgtttagctagaaaattccacagcctgtgaagaaatatttcaaaatggccataaaggaggtaaaaatgaaaaccataacctaacttttatagaggctttatctttaatttaacgatgtgcggaggactttcttgcttgaatctgttccgggctgtctgctctgtccatcaaatgggcaggtctggaatggggcaccttcggccgttcagaagtggcctgaacagaatgctggaacccaggctggactcggacacactaaggttttgattttgaatttcagccttattagaagatctaacctaagagtaagctaaccacagggattcttttgtagaacactttttatgcagatgaagctattttttccagcaagtagattcttccagtttttccaaggagtaatttccccgaattggcataccacggcgtggacagctgatatttcacccagctgctggcttgtgggtgtggctctttgctttatatatatatacacacatgtgagtctggctgggctggtattttgtttgatcttcctggaaatgagcagtgactaacgctcacataactggttttttttttatctgggctgatgaatacatttacctaagaaactcatttcgttttacttaagaggggaagtgcagttttcttttggcagttcagaatccaagcacttgatttgctgggtttggaaaactccttttttggccttctatgtgcttagccataacaattccattaagcaagaaggtaagcaaaagacaaaaaaaaaaaaaggaaaaaaaaaaacttgcactggcttgtctcacttacgaaacatgtcggagctgtttgcctgggtggggctgggtaccgtacctgtcaatgcctgtgattttcataattagcacgtacataaagaagtacattctgttcaggtgataactgagcctcaatcaagcagaaactttttgcttgaaattaaaaaaaaatttctattagtgaaatttctttttttttttttttggaagcaccctgttatctaaagaatctttgtaagatttttgtaaaattttgttttacaagattttatttgaaattgttttttgcaagattgttatatttctgtatgaatgtattttttattggaataacataaaagaattcttatcagca

SEQ ID NO: 420101 - DNA, 4259 bp, Homo sapiens
cgggtgttgtaagatctggggagaggggaagtactggctccttctaatcagcaacactgtgtgggcatacaatggaggaatccagtaatggaaactataggcctgagtaatttagaacagaatttcacaattatatacagcatataggtagggaaggacatggagtatataaggtgtttgcaaatattgtgtgggctccgcgcgctgcgggctgcgggagggtccggccgggcgtctctgcgagcctggagtttgcatgaaactttcacctgcgctccggggagactttcggctccggctcccaccgcgcgcctcgccgccctcgcgaccgcgggctccgtccaacccggcccgacatggacgtgctccccatgtgcagcatcttccaggagctccagatcgtgcacgagaccggctacttctcggcgctgccgtctctggaggagtactggcaacagtggctagaaagtttgaaatggtggggagaggggatgctgatctcggcagttgtagcttcttgaaagacctgcctagagctggaacgttacctccagagcgagccctgctatgtttcagcctcagaaatcaaatttgacagccaggaagatctgtggaccaaaatcattctggctcgggagaaaaaggaggaatccgaactgaagatatcttccagtcctccagaggacactctcatcagcccgagcttttgttacaacttagagaccaacagcctgaactcagatgtcagcagcgaatcctctgacagctccgaggaactttctcccacggccaagtttacctccgaccccattggcgaagttttggtcagctcgggaaaattgagctcctctgtcacctccacgcctccatcttctccggaactgagcagggaaccttctcaactgtggggttgcgtgcccggggagctgccctcgccagggaaggtgcgcagcgggacttcggggaagccaggtgacaagggaaatggcgatgcctcccccgacggcaggaggagggtgcaccggtgccactttaacggctgcaggaaagtttacaccaaaagctcccacttgaaagcacaccagcggacgcacacaggagaaaagccttacagatgctcatgggaagggtgtgagtggcgttttgcaagaagtgatgagttaaccaggcacttccgaaagcacaccggggccaagccttttaaatgctcccactgtgacaggtgtttttccaggtctgaccacctggccctgcacatgaagaggcacctctgagggagcagagaggtggatcctgtaggctaaaaggcttccaggctgagagccggccgtggaaggagggatgcgtgttccagccaaagcatgccgttctgcaccctacccagttgcctccagggcctctccttggaaggtcttttgagggctaaaaaggtcctgtaagaagcggcatagcacccgtggtgcatggtatgtgggtgaccctggactcgccactggtacccgcccttccgagcggcgcctaagcctttgccgtgagcatgcacactgagaatgctaatggttgggttgattgtatgttgaggatctattactgaccgtatgatgaggccaactttttttccttgtggttagcaagactgcaagagatggaaaaaaagtagtttgaatgttttgtgtgtaaggagtataccatgagatgagatgaccaccaatcatttccttggggggagggggtgtctgcaccttagaaaaaaaaagaaaaatcaaaaaaacaaaaaaacaaaaacaaaaaaagaaggaaaatcttggagggtgggcgtgggaactcaggaccccagagtggcgagtggtgtggggagggagagcctctctcccccttttctgtgtgagaggaactcttagtgtctggtgcagctattaaatgtgcaatgtgtcaagtagcttgttttacacgctacaacatagctcatttgtaacccattgtataagctgtgtatttacaaatataacacaacaatttaacttttccttagaatacaaaaagtcatgcatggtctggggaactatatgcttttccatttttaagtcaggactgcaatactgattccagttaatgagcagctaagatccaatctgtctaatacagtgaccccctagccatccgggcctggcaatatacaattttttttcccctccaagtttgtaacactccccttccagaaaggcattgtgcaacacaggattatttttaaatgattctgaatttgaattaactttttggagaattctgtgatgcccttagaagaaattggacacgtattgagtgtcacaaagctggggctgggaattgctggtctaatgtttcattagacttaagaacctaaaatttttctcagttgggtggataaaaccactaacgcttagaaactgttttctcatgcagctatgtttctcttatttatgccttgaggactaatttctggttttctagctgttaatgcactgttgaccttcataatggtgccttacgcaagcgatcccttctgtgggggtctcatacaggggtgtgggcgatgcatgctttattaaggctcttgtttcacctggcagtgtactgtatcaacgtataatacagaaaaaaaatctctttaaggtcctccttcacaaagacatagagtgaaactccctttacatgtcagtatttgttcaacactttaggcaacttgactgtcagtgttaaaatggaaaacaggaaaatggaaaaatctgaccaattctgccaccttgagactttcatatagaccttgcacaacaattgtatagatcacacaccggctgtatttaatatgtaacattttcacacatattaaagatacagaagtattaaaaaacccccaatgttaatgtatttgcttaaaaggcacaagtttcacatatctgtctagctatctgttggtaatacagaaagtatactacttttttaaaaaagtgggcagaattcttgtgtatgtatatttgtgtgtacagtatgtgtatgtgtgtatatatatatattatatatatagataatatataaatattttttttaaggagaaactagaatgtttagctagaaaattccacagcctgtgaagaaatatttcaaaatggccataaaggaggtaaaaatgaaaaccataacctaacttttatagaggctttatctttaatttaacgatgtgcggaggactttcttgcttgaatctgttccgggctgtctgctctgtccatcaaatgggcaggtctggaatggggcaccttcggccgttcagaagtggcctgaacagaatgctggaacccaggctggactcggacacactaaggttttgattttgaatttcagccttattagaagatctaacctaagagtaagctaaccacagggattcttttgtagaacactttttatgcagatgaagctattttttccagcaagtagattcttccagtttttccaaggagtaatttccccgaattggcataccacggcgtggacagctgatatttcacccagctgctggcttgtgggtgtggctctttgctttatatatatatacacacatgtgagtctggctgggctggtattttgtttgatcttcctggaaatgagcagtgactaacgctcacataactggttttttttttatctgggctgatgaatacatttacctaagaaactcatttcgttttacttaagaggggaagtgcagttttcttttggcagttcagaatccaagcacttgatttgctgggtttggaaaactccttttttggccttctatgtgcttagccataacaattccattaagcaagaaggtaagcaaaagacaaaaaaaaaaaaaggaaaaaaaaaaacttgcactggcttgtctcacttacgaaacatgtcggagctgtttgcctgggtggggctgggtaccgtacctgtcaatgcctgtgattttcataattagcacgtacataaagaagtacattctgttcaggtgataactgagcctcaatcaagcagaaactttttgcttgaaattaaaaaaaaatttctattagtgaaatttctttttttttttttttggaagcaccctgttatctaaagaatctttgtaagatttttgtaaaattttgttttacaagattttatttgaaattgttttttgcaagattgttatatttctgtatgaatgtattttttattggaataacataaaagaattcttatcagca

SEQ ID NO: 420102 - DNA, 3852 bp, Homo sapiens
aagttttgcaggggttacgtttgcagtcagtccggggtgtttgcaaatattgtgtgggctccgcgcgctgcgggctgcgggagggtccggccgggcgtctctgcgagcctggagtttgcatgaaactttcacctgcgctccggggagactttcggctccggctcccaccgcgcgcctcgccgccctcgcgaccgcgggctccgtccaacccggcccgacatggacgtgctccccatgtgcagcatcttccaggagctccagatcgtgcacgagaccggctacttctcggcgctgccgtctctggaggagtactggcaacagacctgcctagagctggaacgttacctccagagcgagccctgctatgtttcagcctcagaaatcaaatttgacagccaggaagatctgtggaccaaaatcattctggctcgggagaaaaaggaggaatccgaactgaagatatcttccagtcctccagaggacactctcatcagcccgagcttttgttacaacttagagaccaacagcctgaactcagatgtcagcagcgaatcctctgacagctccgaggaactttctcccacggccaagtttacctccgaccccattggcgaagttttggtcagctcgggaaaattgagctcctctgtcacctccacgcctccatcttctccggaactgagcagggaaccttctcaactgtggggttgcgtgcccggggagctgccctcgccagggaaggtgcgcagcgggacttcggggaagccaggtgacaagggaaatggcgatgcctcccccgacggcaggaggagggtgcaccggtgccactttaacggctgcaggaaagtttacaccaaaagctcccacttgaaagcacaccagcggacgcacacaggagaaaagccttacagatgctcatgggaagggtgtgagtggcgttttgcaagaagtgatgagttaaccaggcacttccgaaagcacaccgggggcctctccttggaaggtcttttgagggctaaaaaggtcctgtaagaagcggcatagcacccgtggtgcatggtatgtgggtgaccctggactcgccactggtacccgcccttccgagcggcgcctaagcctttgccgtgagcatgcacactgagaatgctaatggttgggttgattgtatgttgaggatctattactgaccgtatgatgaggccaactttttttccttgtggttagcaagactgcaagagatggaaaaaaagtagtttgaatgttttgtgtgtaaggagtataccatgagatgagatgaccaccaatcatttccttggggggagggggtgtctgcaccttagaaaaaaaaagaaaaatcaaaaaaacaaaaaaacaaaaacaaaaaaagaaggaaaatcttggagggtgggcgtgggaactcaggaccccagagtggcgagtggtgtggggagggagagcctctctcccccttttctgtgtgagaggaactcttagtgtctggtgcagctattaaatgtgcaatgtgtcaagtagcttgttttacacgctacaacatagctcatttgtaacccattgtataagctgtgtatttacaaatataacacaacaatttaacttttccttagaatacaaaaagtcatgcatggtctggggaactatatgcttttccatttttaagtcaggactgcaatactgattccagttaatgagcagctaagatccaatctgtctaatacagtgaccccctagccatccgggcctggcaatatacaattttttttcccctccaagtttgtaacactccccttccagaaaggcattgtgcaacacaggattatttttaaatgattctgaatttgaattaactttttggagaattctgtgatgcccttagaagaaattggacacgtattgagtgtcacaaagctggggctgggaattgctggtctaatgtttcattagacttaagaacctaaaatttttctcagttgggtggataaaaccactaacgcttagaaactgttttctcatgcagctatgtttctcttatttatgccttgaggactaatttctggttttctagctgttaatgcactgttgaccttcataatggtgccttacgcaagcgatcccttctgtgggggtctcatacaggggtgtgggcgatgcatgctttattaaggctcttgtttcacctggcagtgtactgtatcaacgtataatacagaaaaaaaatctctttaaggtcctccttcacaaagacatagagtgaaactccctttacatgtcagtatttgttcaacactttaggcaacttgactgtcagtgttaaaatggaaaacaggaaaatggaaaaatctgaccaattctgccaccttgagactttcatatagaccttgcacaacaattgtatagatcacacaccggctgtatttaatatgtaacattttcacacatattaaagatacagaagtattaaaaaacccccaatgttaatgtatttgcttaaaaggcacaagtttcacatatctgtctagctatctgttggtaatacagaaagtatactacttttttaaaaaagtgggcagaattcttgtgtatgtatatttgtgtgtacagtatgtgtatgtgtgtatatatatatattatatatatagataatatataaatattttttttaaggagaaactagaatgtttagctagaaaattccacagcctgtgaagaaatatttcaaaatggccataaaggaggtaaaaatgaaaaccataacctaacttttatagaggctttatctttaatttaacgatgtgcggaggactttcttgcttgaatctgttccgggctgtctgctctgtccatcaaatgggcaggtctggaatggggcaccttcggccgttcagaagtggcctgaacagaatgctggaacccaggctggactcggacacactaaggttttgattttgaatttcagccttattagaagatctaacctaagagtaagctaaccacagggattcttttgtagaacactttttatgcagatgaagctattttttccagcaagtagattcttccagtttttccaaggagtaatttccccgaattggcataccacggcgtggacagctgatatttcacccagctgctggcttgtgggtgtggctctttgctttatatatatatacacacatgtgagtctggctgggctggtattttgtttgatcttcctggaaatgagcagtgactaacgctcacataactggttttttttttatctgggctgatgaatacatttacctaagaaactcatttcgttttacttaagaggggaagtgcagttttcttttggcagttcagaatccaagcacttgatttgctgggtttggaaaactccttttttggccttctatgtgcttagccataacaattccattaagcaagaaggtaagcaaaagacaaaaaaaaaaaaaggaaaaaaaaaaacttgcactggcttgtctcacttacgaaacatgtcggagctgtttgcctgggtggggctgggtaccgtacctgtcaatgcctgtgattttcataattagcacgtacataaagaagtacattctgttcaggtgataactgagcctcaatcaagcagaaactttttgcttgaaattaaaaaaaaatttctattagtgaaatttctttttttttttttttggaagcaccctgttatctaaagaatctttgtaagatttttgtaaaattttgttttacaagattttatttgaaattgttttttgcaagattgttatatttctgtatgaatgtattttttattggaataacataaaagaattcttatcagca

SEQ ID NO: 420103 - DNA, 2825 bp, Homo sapiens
aagttttgcaggggttacgtttgcagtcagtccggggtgtttgcaaatattgtgtgggctccgcgcgctgcgggctgcgggagggtccggccgggcgtctctgcgagcctggagtttgcatgaaactttcacctgcgctccggggagactttcggctccggctcccaccgcgcgcctcgccgccctcgcgaccgcgggctccgtccaacccggcccgacatggacgtgctccccatgtgcagcatcttccaggagctccagatcgtgcacgagaccggctacttctcggcgctgccgtctctggaggagtactggcaacagacctgcctagagctggaacgttacctccagagcgagccctgctatgtttcagcctcagaaatcaaatttgacagccaggaagatctgtggaccaaaatcattctggctcgggagaaaaaggaggaatccgaactgaagatatcttccagtcctccagaggacactctcatcagcccgagcttttgttacaacttagagaccaacagcctgaactcagatgtcagcagcgaatcctctgacagctccgaggaactttctcccacggccaagtttacctccgaccccattggcgaagttttggtcagctcgggaaaattgagctcctctgtcacctccacgcctccatcttctccggaactgagcagggaaccttctcaactgtggggttgcgtgcccggggagctgccctcgccagggaaggtgcgcagcgggacttcggggaagccaggtgacaagggaaatggcgatgcctcccccgacggcaggaggagggtgcaccggtgccactttaacggctgcaggaaagtttacaccaaaagctcccacttgaaagcacaccagcggacgcacacaggagaaaagccttacagatgctcatgggaagggtgtgagtggcgttttgcaagaagtgatgagttaaccaggcacttccgaaagcacaccggggccaagccttttaaatgctcccactgtgacaggtgtttttccaggtctgaccacctggccctgcacatgaagaggcacctctgagggagcagagaggtggatcctgtaggctaaaaggcttccaggctgagagccggccgtggaaggagggatgcatgctttattaaggctcttgtttcacctggcagtgtactgtatcaacgtataatacagaaaaaaaatctctttaaggtcctccttcacaaagacatagagtgaaactccctttacatgtcagtatttgttcaacactttaggcaacttgactgtcagtgttaaaatggaaaacaggaaaatggaaaaatctgaccaattctgccaccttgagactttcatatagaccttgcacaacaattgtatagatcacacaccggctgtatttaatatgtaacattttcacacatattaaagatacagaagtattaaaaaacccccaatgttaatgtatttgcttaaaaggcacaagtttcacatatctgtctagctatctgttggtaatacagaaagtatactacttttttaaaaaagtgggcagaattcttgtgtatgtatatttgtgtgtacagtatgtgtatgtgtgtatatatatatattatatatatagataatatataaatattttttttaaggagaaactagaatgtttagctagaaaattccacagcctgtgaagaaatatttcaaaatggccataaaggaggtaaaaatgaaaaccataacctaacttttatagaggctttatctttaatttaacgatgtgcggaggactttcttgcttgaatctgttccgggctgtctgctctgtccatcaaatgggcaggtctggaatggggcaccttcggccgttcagaagtggcctgaacagaatgctggaacccaggctggactcggacacactaaggttttgattttgaatttcagccttattagaagatctaacctaagagtaagctaaccacagggattcttttgtagaacactttttatgcagatgaagctattttttccagcaagtagattcttccagtttttccaaggagtaatttccccgaattggcataccacggcgtggacagctgatatttcacccagctgctggcttgtgggtgtggctctttgctttatatatatatacacacatgtgagtctggctgggctggtattttgtttgatcttcctggaaatgagcagtgactaacgctcacataactggttttttttttatctgggctgatgaatacatttacctaagaaactcatttcgttttacttaagaggggaagtgcagttttcttttggcagttcagaatccaagcacttgatttgctgggtttggaaaactccttttttggccttctatgtgcttagccataacaattccattaagcaagaaggtaagcaaaagacaaaaaaaaaaaaaggaaaaaaaaaaacttgcactggcttgtctcacttacgaaacatgtcggagctgtttgcctgggtggggctgggtaccgtacctgtcaatgcctgtgattttcataattagcacgtacataaagaagtacattctgttcaggtgataactgagcctcaatcaagcagaaactttttgcttgaaattaaaaaaaaatttctattagtgaaatttctttttttttttttttggaagcaccctgttatctaaagaatctttgtaagatttttgtaaaattttgttttacaagattttatttgaaattgttttttgcaagattgttatatttctgtatgaatgtattttttattggaataacataaaagaattcttatcagca

SEQ ID NO: 420104 - DNA, 2538 bp, Homo sapiens
gggaacttctttcactactaaacaaaaaaaagtctacacgacaagtgaaacaaaaaaacaaaaacaaaaaaagaaggaaaatcttggagggtgggcgtgggaactcaggaccccagagtggcgagtggtgtggggagggagagcctctctcccccttttctgtgtgagaggaactcttagtgtctggtgcagctattaaatgtgcaatgtgtcaagtagcttgttttacacgctacaacatagctcatttgtaacccattgtataagctgtgtatttacaaatataacacaacaatttaacttttccttagaatacaaaaagtcatgcatggtctggggaactatatgcttttccatttttaagtcaggactgcaatactgattccagttaatgagcagctaagatccaatctgtctaatacagtgaccccctagccatccgggcctggcaatatacaattttttttcccctccaagtttgtaacactccccttccagaaaggcattgtgcaacacaggattatttttaaatgattctgaatttgaattaactttttggagaattctgtgatgcccttagaagaaattggacacgtattgagtgtcacaaagctggggctgggaattgctggtctaatgtttcattagacttaagaacctaaaatttttctcagttgggtggataaaaccactaacgcttagaaactgttttctcatgcagctatgtttctcttatttatgccttgaggactaatttctggttttctagctgttaatgcactgttgaccttcataatggtgccttacgcaagcgatcccttctgtgggggtctcatacaggggtgtgggcgatgcatgctttattaaggctcttgtttcacctggcagtgtactgtatcaacgtataatacagaaaaaaaatctctttaaggtcctccttcacaaagacatagagtgaaactccctttacatgtcagtatttgttcaacactttaggcaacttgactgtcagtgttaaaatggaaaacaggaaaatggaaaaatctgaccaattctgccaccttgagactttcatatagaccttgcacaacaattgtatagatcacacaccggctgtatttaatatgtaacattttcacacatattaaagatacagaagtattaaaaaacccccaatgttaatgtatttgcttaaaaggcacaagtttcacatatctgtctagctatctgttggtaatacagaaagtatactacttttttaaaaaagtgggcagaattcttgtgtatgtatatttgtgtgtacagtatgtgtatgtgtgtatatatatatattatatatatagataatatataaatattttttttaaggagaaactagaatgtttagctagaaaattccacagcctgtgaagaaatatttcaaaatggccataaaggaggtaaaaatgaaaaccataacctaacttttatagaggctttatctttaatttaacgatgtgcggaggactttcttgcttgaatctgttccgggctgtctgctctgtccatcaaatgggcaggtctggaatggggcaccttcggccgttcagaagtggcctgaacagaatgctggaacccaggctggactcggacacactaaggttttgattttgaatttcagccttattagaagatctaacctaagagtaagctaaccacagggattcttttgtagaacactttttatgcagatgaagctattttttccagcaagtagattcttccagtttttccaaggagtaatttccccgaattggcataccacggcgtggacagctgatatttcacccagctgctggcttgtgggtgtggctctttgctttatatatatatacacacatgtgagtctggctgggctggtattttgtttgatcttcctggaaatgagcagtgactaacgctcacataactggttttttttttatctgggctgatgaatacatttacctaagaaactcatttcgttttacttaagaggggaagtgcagttttcttttggcagttcagaatccaagcacttgatttgctgggtttggaaaactccttttttggccttctatgtgcttagccataacaattccattaagcaagaaggtaagcaaaagacaaaaaaaaaaaaaggaaaaaaaaaaacttgcactggcttgtctcacttacgaaacatgtcggagctgtttgcctgggtggggctgggtaccgtacctgtcaatgcctgtgattttcataattagcacgtacataaagaagtacattctgttcaggtgataactgagcctcaatcaagcagaaactttttgcttgaaattaaaaaaaaatttctattagtgaaatttctttttttttttttttggaagcaccctgttatctaaagaatctttgtaagatttttgtaaaattttgttttacaagattttatttgaaattgttttttgcaagattgttatatttctgtatgaatgtattttttattggaataacataaaagaattcttatcagca

SEQ ID NO: 420105 - DNA, 2479 bp, Homo sapiens
agggggtgtctgactaatcaaaaacaaaaaaacgaaggaacatctgggtgacgaccaagtggcgagtggtgtggggagggagagcctctctcccccttttctgtgtgagaggaactcttagtgtctggtgcagctattaaatgtgcaatgtgtcaagtagcttgttttacacgctacaacatagctcatttgtaacccattgtataagctgtgtatttacaaatataacacaacaatttaacttttccttagaatacaaaaagtcatgcatggtctggggaactatatgcttttccatttttaagtcaggactgcaatactgattccagttaatgagcagctaagatccaatctgtctaatacagtgaccccctagccatccgggcctggcaatatacaattttttttcccctccaagtttgtaacactccccttccagaaaggcattgtgcaacacaggattatttttaaatgattctgaatttgaattaactttttggagaattctgtgatgcccttagaagaaattggacacgtattgagtgtcacaaagctggggctgggaattgctggtctaatgtttcattagacttaagaacctaaaatttttctcagttgggtggataaaaccactaacgcttagaaactgttttctcatgcagctatgtttctcttatttatgccttgaggactaatttctggttttctagctgttaatgcactgttgaccttcataatggtgccttacgcaagcgatcccttctgtgggggtctcatacaggggtgtgggcgatgcatgctttattaaggctcttgtttcacctggcagtgtactgtatcaacgtataatacagaaaaaaaatctctttaaggtcctccttcacaaagacatagagtgaaactccctttacatgtcagtatttgttcaacactttaggcaacttgactgtcagtgttaaaatggaaaacaggaaaatggaaaaatctgaccaattctgccaccttgagactttcatatagaccttgcacaacaattgtatagatcacacaccggctgtatttaatatgtaacattttcacacatattaaagatacagaagtattaaaaaacccccaatgttaatgtatttgcttaaaaggcacaagtttcacatatctgtctagctatctgttggtaatacagaaagtatactacttttttaaaaaagtgggcagaattcttgtgtatgtatatttgtgtgtacagtatgtgtatgtgtgtatatatatatattatatatatagataatatataaatattttttttaaggagaaactagaatgtttagctagaaaattccacagcctgtgaagaaatatttcaaaatggccataaaggaggtaaaaatgaaaaccataacctaacttttatagaggctttatctttaatttaacgatgtgcggaggactttcttgcttgaatctgttccgggctgtctgctctgtccatcaaatgggcaggtctggaatggggcaccttcggccgttcagaagtggcctgaacagaatgctggaacccaggctggactcggacacactaaggttttgattttgaatttcagccttattagaagatctaacctaagagtaagctaaccacagggattcttttgtagaacactttttatgcagatgaagctattttttccagcaagtagattcttccagtttttccaaggagtaatttccccgaattggcataccacggcgtggacagctgatatttcacccagctgctggcttgtgggtgtggctctttgctttatatatatatacacacatgtgagtctggctgggctggtattttgtttgatcttcctggaaatgagcagtgactaacgctcacataactggttttttttttatctgggctgatgaatacatttacctaagaaactcatttcgttttacttaagaggggaagtgcagttttcttttggcagttcagaatccaagcacttgatttgctgggtttggaaaactccttttttggccttctatgtgcttagccataacaattccattaagcaagaaggtaagcaaaagacaaaaaaaaaaaaaggaaaaaaaaaaacttgcactggcttgtctcacttacgaaacatgtcggagctgtttgcctgggtggggctgggtaccgtacctgtcaatgcctgtgattttcataattagcacgtacataaagaagtacattctgttcaggtgataactgagcctcaatcaagcagaaactttttgcttgaaattaaaaaaaaatttctattagtgaaatttctttttttttttttttggaagcaccctgttatctaaagaatctttgtaagatttttgtaaaattttgttttacaagattttatttgaaattgttttttgcaagattgttatatttctgtatgaatgtattttttattggaataacataaaagaattcttatcagca

SEQ ID NO: 420106 - DNA, 2413 bp, Homo sapiens
aagttttgcaggggttacgtttgcagtcagtccggggtgtttgcaaatattgtgtgggctccgcgcgctgcgggctgcgggagggtccggccgggcgtctctgcgagcctggagtttgcatgaaactttcacctgcgctccggggagactttcggctccggctcccaccgcgcgcctcgccgccctcgcgaccgcgggctccgtccaacccggcccgacatggacgtgctccccatgtgcagcatcttccaggagctccagatcgtgcacgagaccggctacttctcggcgctgccgtctctggaggagtactggcaacagacctgcctagagctggaacgttacctccagagcgagccctgctatgtttcagcctcagaaatcaaatttgacagccaggaagatctgtggaccaaaatcattctggctcgggagaaaaaggaggaatccgaactgaagatatcttccagtcctccagaggacactctcatcagcccgagcttttgttacaacttagagaccaacagcctgaactcagatgtcagcagcgaatcctctgacagctccgaggaactttctcccacggccaagtttacctccgaccccattggcgaagttttggtcagctcgggaaaattgagctcctctgtcacctccacgcctccatcttctccggaactgagcagggaaccttctcaactgtggggttgcgtgcccggggagctgccctcgccagggaaggtgcgcagcgggacttcggggaagccaggtgacaagggaaatggcgatgcctcccccgacggcaggaggagggtgcaccggtgccactttaacggctgcaggaaagtttacaccaaaagctcccacttgaaagcacaccagcggacgcacacagaggtcagtgcccacgcgggccccggagggcggccgctggtgggcgccactgcattgcaccagccctggagggagccgggcctggctgcacaggatgtggtcagggcagacaaatcctcacttcctcagatgttttccaccaaagcattaggtctttttggagttcagagtagaatcctaaagactggacttttgagttggataaatgtgtaacaattttcagattaaacaaacaagagactagatccttttctccacggacacccaaacctccaccccccaccccttagtagtgctggggatccgaggccactgccccttcaccagtgcactcgcacgaggctacctcgagcggccctggggtttcctaaatgaaactcaagggtcaggacagagggttgctgggcagcgtggagtgtgtgggtttgatgctgacggcccgaggcccgagtgggaccggcctgctctgtaagcagcagcattgatcagcgagtgtttcctgagaacttctccgtgtctcatgcagcctttgtttctgataccgcttgaaacagtttcttaatgaaatgccatacctaggtgaaagtgccatttaaaaataccttgacatgttctaggataattggtgaggaatcacagaacatttagaactgggaagggtcttagtgatcacgtgatgcaggctcttctcttatcagtaggagagcaaattgctgagagtcagtcccagacaggcttggtgacagctgagattgagatccgggtggcccaatatccaggcccaggcctgtctcaacataccctgagattggcttgacaactttgttttctcaggtagcacttgtagtaaattcatatttatgatttgaccaaggaatgaagtgaacccagttgttcaattgccatttagagaatgattccggggccctgtactggggctttccagaagctcgtaacttcagctttgtagaaaggtagaacgtccctgaggaaactgcagaggcacattccatagggaagtgaggatggaacagaagtgtgtttgggagaaacagttgccatgaagaaagcaatagctctgcctttgccggggctgtgggtccggcaggctgacacctcatcccgcaagcattttgctggtctgagtcgtggtcgttcttccacgttaactttgatgacagcaccatgggcttggctgaagctgtgtcccttggacagcagtgggaggcctgagactgggtcaggagagagctgctgttgtctctctgaggctgccagttgttgtgtgttaccgatgccagaagccactgggtccctggccttgcatcccaccactgtgtgtgttgtcagactgtgcaagagtgtgtctcttttttttttttggaaaggaattttggctcttgtggcgattgagggctggagtgcaatgggcttgatctcgggtcacagaaacctttgcctcccaggttcaggcgattctcttgcctcagcctccaaagtagctgcggataacgggcac

SEQ ID NO: 420107 - DNA, 726 bp, Homo sapiens
ttgatactgtatctgtttttctgtaaagttagagcttttggggaagcgaagtattgaactgggggttggtctggcctactgggctggtattttgtttgatcttcctggaaatgagcagtgactaacgctcacataactggttttttttttatctgggctgatgaatacatttacctaagaaactcatttcgttttacttaagaggggaagtgcagttttcttttggcagttcagaatccaagcacttgatttgctgggtttggaaaactccttttttggccttctatgtgcttagccataacaattccattaagcaagaaggtaagcaaaagacaaaaaaaaaaaaaggaaaaaaaaaaacttgcactggcttgtctcacttacgaaacatgtcggagctgtttgcctgggtggggctgggtaccgtacctgtcaatgcctgtgattttcataattagcacgtacataaagaagtacattctgttcaggtgataactgagcctcaatcaagcagaaactttttgcttgaaattaaaaaaaaatttctattagtgaaatttctttttttttttttttggaagcaccctgttatctaaagaatctttgtaagatttttgtaaaattttgttttacaagattttatttgaaattgttttttgcaagattgttatatttctgtatgaatgtattttttattggaataacataaaagaattcttatcagca

SEQ ID NO: 420108 - DNA, 1036 bp, Homo sapiens
cgggtgttgtaagatctggggagaggggaagtactggctccttctaatcagcaacactgtgtgggcatacaatggaggaatccagtaatggaaactataggcctgagtaatttagaacagaatttcacaattatatacagcatataggtagggaaggacatggagtatataaggtgtttgcaaatattgtgtgggctccgcgcgctgcgggctgcgggagggtccggccgggcgtctctgcgagcctggagtttgcatgaaactttcacctgcgctccggggagactttcggctccggctcccaccgcgcgcctcgccgccctcgcgaccgcgggctccgtccaacccggcccgacatggacgtgctccccatgtgcagcatcttccaggagctccagatcgtgcacgagaccggctacttctcggcgctgccgtctctggaggagtactggcaacaggtaaacgcagccggccgcggttccctgcgggcgccggggcgcgggccgggtcggctgtttggggttcagacccggtgctctctgcggtccgctgggcctgggccccgcgctgtcaccgggggagcgggcgcagcgcccccgccgatcgatcctccaggctgcgatcagcgtccgcccagggaagccccaactcccggcacagcccggccgagcccctggcacgagttcggagcctgtccccgctccagacgccacagctggagcttgtcatggggaccaacttgctctgcctgccaaggtctatcaaaggtaagaaggtaaaagaagatctaattaaacggattcggtcaagtagggtaacttggtgcttgtacttaacagttttttaaaaaaatcacattttgcccccagaacgtagaccagctctcttttatttttgtcttttttaaactgtagaccatttccaatgtgttttctgctctttggaatgcctaacatttcccctagatctgccttatttgtcttccctgcttctcttgttgaccaagaaaaataaaaataaaactgtgtacacccca

SEQ ID NO: 420109 - DNA, 4056 bp, Homo sapiens
aagttttgcaggggttacgtttgcagtcagtccggggtgtttgcaaatattgtgtgggctccgcgcgctgcgggctgcgggagggtccggccgggcgtctctgcgagcctggagtttgcatgaaactttcacctgcgctccggggagactttcggctccggctcccaccgcgcgcctcgccgccctcgcgaccgcgggctccgtccaacccggcccgacatggacgtgctccccatgtgcagcatcttccaggagctccagatcgtgcacgagaccggctacttctcggcgctgccgtctctggaggagtactggcaacagacctgcctagagctggaacgttacctccagagcgagccctgctatgtttcagcctcagaaatcaaatttgacagccaggaagatctgtggaccaaaatcattctggctcgggagaaaaaggaggaatccgaactgaagatatcttccagtcctccagaggacactctcatcagcccgagcttttgttacaacttagagaccaacagcctgaactcagatgtcagcagcgaatcctctgacagctccgaggaactttctcccacggccaagtttacctccgaccccattggcgaagttttggtcagctcgggaaaattgagctcctctgtcacctccacgcctccatcttctccggaactgagcagggaaccttctcaactgtggggttgcgtgcccggggagctgccctcgccagggaaggtgcgcagcgggacttcggggaagccaggtgacaagggaaatggcgatgcctcccccgacggcaggaggagggtgcaccggtgccactttaacggctgcaggaaagtttacaccaaaagctcccacttgaaagcacaccagcggacgcacacaggagaaaagccttacagatgctcatgggaagggtgtgagtggcgttttgcaagaagtgatgagttaaccaggcacttccgaaagcacaccggggccaagccttttaaatgctcccactgtgacaggtgtttttccaggtctgaccacctggccctgcacatgaagaggcacctctgagggagcagagaggtggatcctgtaggctaaaaggcttccaggctgagagccggccgtggaaggagggatgcgtgttccagccaaagcatgccgttctgcaccctacccagttgcctccagggcctctccttggaaggtcttttgagggctaaaaaggtcctgtaagaagcggcatagcacccgtggtgcatggtatgtgggtgaccctggactcgccactggtacccgcccttccgagcggcgcctaagcctttgccgtgagcatgcacactgagaatgctaatggttgggttgattgtatgttgaggatctattactgaccgtatgatgaggccaactttttttccttgtggttagcaagactgcaagagatggaaaaaaagtagtttgaatgttttgtgtgtaaggagtataccatgagatgagatgaccaccaatcatttccttggggggagggggtgtctgcaccttagaaaaaaaaagaaaaatcaaaaaaacaaaaaaacaaaaacaaaaaaagaaggaaaatcttggagggtgggcgtgggaactcaggaccccagagtggcgagtggtgtggggagggagagcctctctcccccttttctgtgtgagaggaactcttagtgtctggtgcagctattaaatgtgcaatgtgtcaagtagcttgttttacacgctacaacatagctcatttgtaacccattgtataagctgtgtatttacaaatataacacaacaatttaacttttccttagaatacaaaaagtcatgcatggtctggggaactatatgcttttccatttttaagtcaggactgcaatactgattccagttaatgagcagctaagatccaatctgtctaatacagtgaccccctagccatccgggcctggcaatatacaattttttttcccctccaagtttgtaacactccccttccagaaaggcattgtgcaacacaggattatttttaaatgattctgaatttgaattaactttttggagaattctgtgatgcccttagaagaaattggacacgtattgagtgtcacaaagctggggctgggaattgctggtctaatgtttcattagacttaagaacctaaaatttttctcagttgggtggataaaaccactaacgcttagaaactgttttctcatgcagctatgtttctcttatttatgccttgaggactaatttctggttttctagctgttaatgcactgttgaccttcataatggtgccttacgcaagcgatcccttctgtgggggtctcatacaggggtgtgggcgatgcatgctttattaaggctcttgtttcacctggcagtgtactgtatcaacgtataatacagaaaaaaaatctctttaaggtcctccttcacaaagacatagagtgaaactccctttacatgtcagtatttgttcaacactttaggcaacttgactgtcagtgttaaaatggaaaacaggaaaatggaaaaatctgaccaattctgccaccttgagactttcatatagaccttgcacaacaattgtatagatcacacaccggctgtatttaatatgtaacattttcacacatattaaagatacagaagtattaaaaaacccccaatgttaatgtatttgcttaaaaggcacaagtttcacatatctgtctagctatctgttggtaatacagaaagtatactacttttttaaaaaagtgggcagaattcttgtgtatgtatatttgtgtgtacagtatgtgtatgtgtgtatatatatatattatatatatagataatatataaatattttttttaaggagaaactagaatgtttagctagaaaattccacagcctgtgaagaaatatttcaaaatggccataaaggaggtaaaaatgaaaaccataacctaacttttatagaggctttatctttaatttaacgatgtgcggaggactttcttgcttgaatctgttccgggctgtctgctctgtccatcaaatgggcaggtctggaatggggcaccttcggccgttcagaagtggcctgaacagaatgctggaacccaggctggactcggacacactaaggttttgattttgaatttcagccttattagaagatctaacctaagagtaagctaaccacagggattcttttgtagaacactttttatgcagatgaagctattttttccagcaagtagattcttccagtttttccaaggagtaatttccccgaattggcataccacggcgtggacagctgatatttcacccagctgctggcttgtgggtgtggctctttgctttatatatatatacacacatgtgagtctggctgggctggtattttgtttgatcttcctggaaatgagcagtgactaacgctcacataactggttttttttttatctgggctgatgaatacatttacctaagaaactcatttcgttttacttaagaggggaagtgcagttttcttttggcagttcagaatccaagcacttgatttgctgggtttggaaaactccttttttggccttctatgtgcttagccataacaattccattaagcaagaaggtaagcaaaagacaaaaaaaaaaaaaggaaaaaaaaaaacttgcactggcttgtctcacttacgaaacatgtcggagctgtttgcctgggtggggctgggtaccgtacctgtcaatgcctgtgattttcataattagcacgtacataaagaagtacattctgttcaggtgataactgagcctcaatcaagcagaaactttttgcttgaaattaaaaaaaaatttctattagtgaaatttctttttttttttttttggaagcaccctgttatctaaagaatctttgtaagatttttgtaaaattttgttttacaagattttatttgaaattgttttttgcaagattgttatatttctgtatgaatgtattttttattggaataacataaaagaattcttatcagca

SEQ ID NO: 420110 - DNA, 4002 bp, Homo sapiens
aagttttgcaggggttacgtttgcagtcagtccggggtgtttgcaaatattgtgtgggctccgcgcgctgcgggctgcgggagggtccggccgggcgtctctgcgagcctggagtttgcatgaaactttcacctgcgctccggggagactttcggctccggctcccaccgcgcgcctcgccgccctcgcgaccgcgggctccgtccaacccggcccgacatggacgtgctccccatgtgcagcatcttccaggagctccagatcgtgcacgagaccggctacttctcggcgctgccgtctctggaggagtactggcaacagacctgcctagagctggaacgttacctccagagcgagccctgctatgtttcagcctcagaaatcaaatttgacagccaggaagatctgtggaccaaaatcattctggctcgggagaaaaaggaggaatccgaactgaagatatcttccagtcctccagaggacactctcatcagcccgagcttttgttacaacttagagaccaacagcctgaactcagatgtcagcagcgaatcctctgacagctccgaggaactttctcccacggccaagtttacctccgaccccattggcgaagttttggtcagctcgggaaaattgagctcctctgtcacctccacgcctccatcttctccggaactgagcagggaaccttctcaactgtggggttgcgtgcccggggagctgccctcgccagggaaggtgcgcagcgggacttcggggaagccaggtgacaagggaaatggcgatgcctcccccgacggcaggaggagggtgcaccggtgccactttaacggctgcaggaaagtttacaccaaaagctcccacttgaaagcacaccagcggacgcacacaggagaaaagccttacagatgctcatgggaagggtgtgagtggcgttttgcaagaagtgatgagttaaccaggcacttccgaaagcacaccggggccaagccttttaaatgctcccactgtgacaggtgtttttccaggtctgaccacctggccctgcacatgaagaggcacctctgagggagcagagaggtggatcctgtaggctaaaaggcttccaggctgagagccggccgtggaaggagggatgcgtgttccagccaaagcatgccgttctgcaccctacccagttgcctccagggcctctccttggaaggtcttttgagggctaaaaaggtcctgtaagaagcggcatagcacccgtggtgcatggtatgtgggtgaccctggactcgccactggtacccgcccttccgagcggcgcctaagcctttgccgtgagcatgcacactgagaatgctaatggttgggttgattgtatgttgaggatctattactgaccgtatgatgaggccaactttttttccttgtggttagcaagactgcaagagatggaaaaaaagtagtttgaatgttttgtgtgtaaggagtataccatgagatgagatgaccaccaatcatttccttggggggagggggtgtctgcaccttagaaaaaaaaagaaaaatcaaaaaaacaaaaaaacaaaaacaaaaaaagaaggaaaatcttggagggtgggcgtgggaactcaggaccccagagtggcgagtggtgtggggagggagagcctctctcccccttttctgtgtgagaggaactcttagtgtctggtgcagctattaaatgtgcaatgtgtcaagtagcttgttttacacgctacaacatagctcatttgtaacccattgtataagctgtgtatttacaaatataacacaacaatttaacttttccttagaatacatgcaatactgattccagttaatgagcagctaagatccaatctgtctaatacagtgaccccctagccatccgggcctggcaatatacaattttttttcccctccaagtttgtaacactccccttccagaaaggcattgtgcaacacaggattatttttaaatgattctgaatttgaattaactttttggagaattctgtgatgcccttagaagaaattggacacgtattgagtgtcacaaagctggggctgggaattgctggtctaatgtttcattagacttaagaacctaaaatttttctcagttgggtggataaaaccactaacgcttagaaactgttttctcatgcagctatgtttctcttatttatgccttgaggactaatttctggttttctagctgttaatgcactgttgaccttcataatggtgccttacgcaagcgatcccttctgtgggggtctcatacaggggtgtgggcgatgcatgctttattaaggctcttgtttcacctggcagtgtactgtatcaacgtataatacagaaaaaaaatctctttaaggtcctccttcacaaagacatagagtgaaactccctttacatgtcagtatttgttcaacactttaggcaacttgactgtcagtgttaaaatggaaaacaggaaaatggaaaaatctgaccaattctgccaccttgagactttcatatagaccttgcacaacaattgtatagatcacacaccggctgtatttaatatgtaacattttcacacatattaaagatacagaagtattaaaaaacccccaatgttaatgtatttgcttaaaaggcacaagtttcacatatctgtctagctatctgttggtaatacagaaagtatactacttttttaaaaaagtgggcagaattcttgtgtatgtatatttgtgtgtacagtatgtgtatgtgtgtatatatatatattatatatatagataatatataaatattttttttaaggagaaactagaatgtttagctagaaaattccacagcctgtgaagaaatatttcaaaatggccataaaggaggtaaaaatgaaaaccataacctaacttttatagaggctttatctttaatttaacgatgtgcggaggactttcttgcttgaatctgttccgggctgtctgctctgtccatcaaatgggcaggtctggaatggggcaccttcggccgttcagaagtggcctgaacagaatgctggaacccaggctggactcggacacactaaggttttgattttgaatttcagccttattagaagatctaacctaagagtaagctaaccacagggattcttttgtagaacactttttatgcagatgaagctattttttccagcaagtagattcttccagtttttccaaggagtaatttccccgaattggcataccacggcgtggacagctgatatttcacccagctgctggcttgtgggtgtggctctttgctttatatatatatacacacatgtgagtctggctgggctggtattttgtttgatcttcctggaaatgagcagtgactaacgctcacataactggttttttttttatctgggctgatgaatacatttacctaagaaactcatttcgttttacttaagaggggaagtgcagttttcttttggcagttcagaatccaagcacttgatttgctgggtttggaaaactccttttttggccttctatgtgcttagccataacaattccattaagcaagaaggtaagcaaaagacaaaaaaaaaaaaaggaaaaaaaaaaacttgcactggcttgtctcacttacgaaacatgtcggagctgtttgcctgggtggggctgggtaccgtacctgtcaatgcctgtgattttcataattagcacgtacataaagaagtacattctgttcaggtgataactgagcctcaatcaagcagaaactttttgcttgaaattaaaaaaaaatttctattagtgaaatttctttttttttttttttggaagcaccctgttatctaaagaatctttgtaagatttttgtaaaattttgttttacaagattttatttgaaattgttttttgcaagattgttatatttctgtatgaatgtattttttattggaataacataaaagaattcttatcagca

SEQ ID NO: 420111 - DNA, 3720 bp, Homo sapiens
aagttttgcaggggttacgtttgcagtcagtccggggtgtttgcaaatattgtgtgggctccgcgcgctgcgggctgcgggagggtccggccgggcgtctctgcgagcctggagtttgcatgaaactttcacctgcgctccggggagactttcggctccggctcccaccgcgcgcctcgccgccctcgcgaccgcgggctccgtccaacccggcccgacatggacgtgctccccatgtgcagcatcttccaggagctccagatcgtgcacgagaccggctacttctcggcgctgccgtctctggaggagtactggcaacagacctgcctagagctggaacgttacctccagagcgagccctgctatgtttcagcctcagaaatcaaatttgacagccaggaagatctgtggaccaaaatcattctggctcgggagaaaaaggaggaatccgaactgaagatatcttccagtcctccagaggacactctcatcagcccgagcttttgttacaacttagagaccaacagcctgaactcagatgtcagcagcgaatcctctgacagctccgaggaactttctcccacggccaagtttacctccgaccccattggcgaagttttggtcagctcgggaaaattgagctcctctgtcacctccacgcctccatcttctccggaactgagcagggaaccttctcaactgtggggttgcgtgcccggggagctgccctcgccagggaaggtgcgcagcgggacttcggggaagccaggtgacaagggaaatggcgatgcctcccccgacggcaggaggagggtgcaccggtgccactttaacggctgcaggaaagtttacaccaaaagctcccacttgaaagcacaccagcggacgcacacaggagaaaagccttacagatgctcatgggaagggtgtgagtggcgttttgcaagaagtgatgagttaaccaggcacttccgaaagcacaccggggccaagccttttaaatgctcccactgtgacaggtgtttttccaggtctgaccacctggccctgcacatgaagaggcacctctgagggagcagagaggtggatcctgtaggctaaaaggcttccaggctgagagccggccgtggaaggagggatgcgtgttccagccaaagcatgccgttctgcaccctacccagttgcctccagggcctctccttggaaggtcttttgagggctaaaaaggtcctgtaagaagcggcatagcacccgtggtgcatggtatgtgggtgaccctggactcgccactggtacccgcccttccgagcggcgcctaagcctttgccgtgagcatgcacactgagaatgctaatggttgggttgattgtatgttgaggatctattactgaccgtatgatgaggccaactttttttccttgtggttagcaagactgcaagagatggaaaaaaagtagtttgaatgttttgtgtgtaaggagtataccatgagatgagatgaccaccaatcatttccttggggggagggggtgtctgcaccttagaaaaaaaaagaaaaatcaaaaaaacaaaaaaacaaaaacaaaaaaagaaggaaaatcttggagggtgggcgtgggaactcaggaccccagagtggcgagtggtgtggggagggagagcctctctcccccttttctgtgtgagaggaactcttagtgtctggtgcagctattaaatgtgcaatgtgtcaagtagcttgttttacacgctacaacatagctcatttgtaacccattgtataagctgtgtatttacaaatataacacaacaatttaacttttccttagaatacaaaaagtcatgcatggtctggggaactatatgcttttccatttttaagtcaggactgcaatactgattccagttaatgagcagctaagatccaatctgtctaatacagtgaccccctagccatccgggcctggcaatatacaattttttttcccctccaagtttgtaacactccccttccagaaaggcattgtgcaacacaggattatttttaaatgattctgaatttgaattaactttttggagaattctgtgatgcccttagaagaaattggacacgtattgagtgtcacaaagctggggctgggaattgctggtctaatgtttcattagacttaagaacctaaaatttttctcagttgggtggataaaaccactaacgcttagaaactgttttctcatgcagctatgtttctcttatttatgccttgaggactaatttctggttttctagctgttaatgcactgttgaccttcataatggtgccttacgcaagcgatcccttctgtgggggtctcatacaggggtgtgggcgatgcatgctttattaaggctcttgtttcacctggcagtgtactgtatcaacgtataatacagaaaaaaaatctctttaaggtcctccttcacaaagacatagagtgaaactccctttacatgtcagtatttgttcaacactttaggcaacttgactgtcagtgttaaaatggaaaacaggaaaatggaaaaatctgaccaattctgccaccttgagactttcatatagaccttgcacaacaattgtatagatcacacaccggctgtatttaatatgtaacattttcacacatattaaagatacagaagtattaaaaaacccccaatgttaatgtatttgcttaaaaggcacaagtttcacatatctgtctagctatctgttggtaatacagaaagtatactacttttttaaaaaagtgggcagaattcttgtgtatgtatatttgtgtgtacagtatgtgtatgtgtgtatatatatatattatatatatagataatatataaatattttttttaaggagaaactagaatgtttagctagaaaattccacagcctgtgaagaaatatttcaaaatggccataaaggaggtaaaaatgaagactttcttgcttgaatctgttccgggctgtctgctctgtccatcaaatgggcaggtctggaatggggcaccttcggccgttcagaagtggcctgaacagaatgctgggctggtattttgtttgatcttcctggaaatgagcagtgactaacgctcacataactggttttttttttatctgggctgatgaatacatttacctaagaaactcatttcgttttacttaagaggggaagtgcagttttcttttggcagttcagaatccaagcacttgatttgctgggtttggaaaactccttttttggccttctatgtgcttagccataacaattccattaagcaagaaggtaagcaaaagacaaaaaaaaaaaaaggaaaaaaaaaaacttgcactggcttgtctcacttacgaaacatgtcggagctgtttgcctgggtggggctgggtaccgtacctgtcaatgcctgtgattttcataattagcacgtacataaagaagtacattctgttcaggtgataactgagcctcaatcaagcagaaactttttgcttgaaattaaaaaaaaatttctattagtgaaatttctttttttttttttttggaagcaccctgttatctaaagaatctttgtaagatttttgtaaaattttgttttacaagattttatttgaaattgttttttgcaagattgttatatttctgtatgaatgtattttttattggaataacataaaagaattcttatcagca

SEQ ID NO: 420112 - DNA, 2652 bp, Homo sapiens
aagttttgcaggggttacgtttgcagtcagtccggggtgtttgcaaatattgtgtgggctccgcgcgctgcgggctgcgggagggtccggccgggcgtctctgcgagcctggagtttgcatgaaactttcacctgcgctccggggagactttcggctccggctcccaccgcgcgcctcgccgccctcgcgaccgcgggctccgtccaacccggcccgacatggacgtgctccccatgtgcagcatcttccaggagctccagatcgtgcacgagaccggctacttctcggcgctgccgtctctggaggagtactggcaacagacctgcctagagctggaacgttacctccagagcgagccctgctatgtttcagcctcagaaatcaaatttgacagccaggaagatctgtggaccaaaatcattctggctcgggagaaaaaggaggaatccgaactgaagatatcttccagtcctccagaggacactctcatcagcccgagcttttgttacaacttagagaccaacagcctgaactcagatgtcagcagcgaatcctctgacagctccgaggaactttctcccacggccaagtttacctccgaccccattggcgaagttttggtcagctcgggaaaattgagctcctctgtcacctccacgcctccatcttctccggaactgagcagggaaccttctcaactgtggggttgcgtgcccggggagctgccctcgccagggaaggtgcgcagcgggacttcggggaagccaggtgacaagggaaatggcgatgcctcccccgacggcaggaggagggtgcaccggtgccactttaacggctgcaggaaagtttacaccaaaagctcccacttgaaagcacaccagcggacgcacacaggagaaaagccttacagatgctcatgggaagggtgtgagtggcgttttgcaagaagtgatgagttaaccaggcacttccgaaagcacaccggggccaagccttttaaatgctcccactgtgacaggtgtttttccaggtctgaccacctggccctgcacatgaagaggcacctctgagggagcagagaggtggatcctgtaggctaaaaggcttccaggctgagagccggccgtggaaggagggatgcgtgttccagccaaagcatgccgttctgcaccctacccagttgcctccagggcctctccttggaaggtcttttgagggctaaaaaggtcctgtaagaagcggcatagcacccgtggtgcatggtatgtgggtgaccctggactcgccactggtacccgcccttccgagcggcgcctaagcctttgccgtgagcatgcacactgagaatgctaatggttgggttgattgtatgttgaggatctattactgaccgtatgatgaggccaactttttttccttgtggttagcaagactgcaagagatggaaaaaaagtagtttgaatgttttgtgtgtaaggagtataccatgagatgagatgaccaccaatcatttccttggggggagggggtgtctgcaccttagaaaaaaaaagaaaaatcaaaaaaacaaaaaaacaaaaacaaaaaaagaaggaaaatcttggagggtgggcgtgggaactcaggaccccagagtggcgagtggtgtggggagggagagcctctctcccccttttctgtgtgagaggaactcttagtgtctggtgcagctattaaatgtgcaatgtgtcaagtagcttgttttacacgctacaacatagctcatttgtaacccattgtataagctgtgtatttacaaatataacacaacaatttaacttttccttagaatacaaaaagtcatgcatggtctggggaactatatgcttttccatttttaagtcaggactgcaatactgattccagttaatgagcagctaagatccaatctgtctaatacagtgaccccctagccatccgggcctggcaatatacaattttttttcccctccaagtttgtaacactccccttccagaaaggcattgtgcaacacaggattatttttaaatgattctgaatttgaattaactttttggagaattctgtgatgcccttagaagaaattggacacgtattgagtgtcacaaagctggggctgggaattgctggtctaatgtttcattagacttaagaacctaaaatttttctcagttgggtggataaaaccactaacgcttagaaactgttttctcatgcagctatgtttctcttatttatgccttgaggactaatttctggttttctagctgttaatgcactgttgaccttcataatggtgccttacgcaagcgatcccttctgtgggggtctcatacaggggtgtgggcgatgcatgctttattaaggctcttgtttcacctggcagtgtactgtatcaacgtataatacagaaaaaaaatctctttaaggtcctccttcacaaagacatagagtgaaactccctttacatgtcagtatttgttcaacactttaggcaacttgactgtcagtgttaaaatggaaaacaggaaaatggaaaaatctgaccaattctgccaccttgagactttcatatagacctacaccaccactgcatgacaccccacggggtaccagctcgattcgtatatta

SEQ ID NO: 420113 - DNA, 2313 bp, Homo sapiens
aagttttgcaggggttacgtttgcagtcagtccggggtgtttgcaaatattgtgtgggctccgcgcgctgcgggctgcgggagggtccggccgggcgtctctgcgagcctggagtttgcatgaaactttcacctgcgctccggggagactttcggctccggctcccaccgcgcgcctcgccgccctcgcgaccgcgggctccgtccaacccggcccgacatggacgtgctccccatgtgcagcatcttccaggagctccagatcgtgcacgagaccggctacttctcggcgctgccgtctctggaggagtactggcaacagacctgcctagagctggaacgttacctccagagcgagccctgctatgtttcagcctcagaaatcaaatttgacagccaggaagatctgtggaccaaaatcattctggctcgggagaaaaaggaggaatccgaactgaagatatcttccagtcctccagaggacactctcatcagcccgagcttttgttacaacttagagaccaacagcctgaactcagatgtcagcagcgaatcctctgacagctccgaggaactttctcccacggccaagtttacctccgaccccattggcgaagttttggtcagctcgggaaaattgagctcctctgtcacctccacgcctccatcttctccggaactgagcagggaaccttctcaactgtggggttgcgtgcccggggagctgccctcgccagggaaggtgcgcagcgggacttcggggaagccaggtgacaagggaaatggcgatgcctcccccgacggcaggaggagggtgcaccggtgccactttaacggctgcaggaaagtttacaccaaaagctcccacttgaaagcacaccagcggacgcacacaggagaaaagccttacagatgctcatgggaagggtgtgagtggcgttttgcaagaagtgatgagttaaccaggcacttccgaaagcacaccggggccaagccttttaaatgctcccactgtgacaggtgtttttccaggtctgaccacctggccctgcacatgaagaggcacctctgagggagcagagaggtggatcctgtaggctaaaaggcttccaggctgagagccggccgtggaaggagggatgcgtgttccagccaaagcatgccgttctgcaccctacccagttgcctccagggcctctccttggaaggtcttttgagggctaaaaaggtcctgtaagaagcggcatagcacccgtggtgcatggtatgtgggtgaccctggactcgccactggtacccgcccttccgagcggcgcctaagcctttgccgtgagcatgcacactgagaatgctaatggttgggttgattgtatgttgaggatctattactgaccgtatgatgaggccaactttttttccttgtggttagcaagactgcaagagatggaaaaaaagtagtttgaatgttttgtgtgtaaggagtataccatgagatgagatgaccaccaatcatttccttggggggagggggtgtctgcaccttagaaaaaaaaagaaaaatcaaaaaaacaaaaaaacaaaaacaaaaaaagaaggaaaatcttggagggtgggcgtgggaactcaggaccccagagtggcgagtggtgtggggagggagagcctctctcccccttttctgtgtgagaggaactcttagtgtctggtgcagctattaaatgtgcaatgtgtcaagtagcttgttttacacgctacaacatagctcatttgtaacccattgtataagctgtgtatttacaaatataacacaacaatttaacttttccttagaatacaaaaagtcatgcatggtctggggaactatatgcttttccatttttaagtcaggactgcaatactgattccagttaatgagcagctaagatccaatctgtctaatacagtgaccccctagccatccgggcctggcaatatacaattttttttcccctccaagtttgtaacactccccttccagaaaggcattgtgcaacacaggattatttttaaatgattctgaatttgaattaactttttggagaattctgtgatgcccttagaagaaattggacacgtattgagtgtcacaaagctggggctgggaattgctggtctaatgtttcattagacttaagaacctaaaatttttctcagttgggtggataaaaccactaacgcttagaaactgttttctcatgcagctatgtttctcttatttatgccttgagctccagcggatcctgagctccagcggggatactctagagagaccaca

SEQ ID NO: 420114 - DNA, 4493 bp, Homo sapiens
cgggtgttgtaagatctggggagaggggaagtactggctccttctaatcagcaacactgtgtgggcatacaatggaggaatccagtaatggaaactataggcctgagtaatttagaacagaatttcacaattatatacagcatataggtagggaaggacatggagtatataaggtgtttgcaaatattgtgtgggctccgcgcgctgcgggctgcgggagggtccggccgggcgtctctgcgagcctggagtttgcatgaaactttcacctgcgctccggggagactttcggctccggctcccaccgcgcgcctcgccgccctcgcgaccgcgggctccgtccaacccggcccgacatggacgtgctccccatgtgcagcatcttccaggagctccagatcgtgcacgagaccggctacttctcggcgctgccgtctctggaggagtactggcaacaggtaaacgcagccggccgcggttccctgcgggcgccggggcgcgggccgggtcggctgtttggggttcagacccggtgctctctgcggtccgctgggcctgggccccgcgctgtcaccgggggagcgggcgcagcgcccccgccgatcgatcctccaggctgcgatcagcgtccgcccagggaagccccaactcccggcacagcccggccgagcccctggcacgagttcggagcctgtccccgctccagacgccacagctggagcttgtcatggggaccaacttgctctgcctgccaaggtacctgcctagagctggaacgttacctccagagcgagccctgctatgtttcagcctcagaaatcaaatttgacagccaggaagatctgtggaccaaaatcattctggctcgggagaaaaaggaggaatccgaactgaagatatcttccagtcctccagaggacactctcatcagcccgagcttttgttacaacttagagaccaacagcctgaactcagatgtcagcagcgaatcctctgacagctccgaggaactttctcccacggccaagtttacctccgaccccattggcgaagttttggtcagctcgggaaaattgagctcctctgtcacctccacgcctccatcttctccggaactgagcagggaaccttctcaactgtggggttgcgtgcccggggagctgccctcgccagggaaggtgcgcagcgggacttcggggaagccaggtgacaagggaaatggcgatgcctcccccgacggcaggaggagggtgcaccggtgccactttaacggctgcaggaaagtttacaccaaaagctcccacttgaaagcacaccagcggacgcacacaggagaaaagccttacagatgctcatgggaagggtgtgagtggcgttttgcaagaagtgatgagttaaccaggcacttccgaaagcacaccggggccaagccttttaaatgctcccactgtgacaggtgtttttccaggtctgaccacctggccctgcacatgaagaggcacctctgagggagcagagaggtggatcctgtaggctaaaaggcttccaggctgagagccggccgtggaaggagggatgcgtgttccagccaaagcatgccgttctgcaccctacccagttgcctccagggcctctccttggaaggtcttttgagggctaaaaaggtcctgtaagaagcggcatagcacccgtggtgcatggtatgtgggtgaccctggactcgccactggtacccgcccttccgagcggcgcctaagcctttgccgtgagcatgcacactgagaatgctaatggttgggttgattgtatgttgaggatctattactgaccgtatgatgaggccaactttttttccttgtggttagcaagactgcaagagatggaaaaaaagtagtttgaatgttttgtgtgtaaggagtataccatgagatgagatgaccaccaatcatttccttggggggagggggtgtctgcaccttagaaaaaaaaagaaaaatcaaaaaaacaaaaaaacaaaaacaaaaaaagaaggaaaatcttggagggtgggcgtgggaactcaggaccccagagtggcgagtggtgtggggagggagagcctctctcccccttttctgtgtgagaggaactcttagtgtctggtgcagctattaaatgtgcaatgtgtcaagtagcttgttttacacgctacaacatagctcatttgtaacccattgtataagctgtgtatttacaaatataacacaacaatttaacttttccttagaatacaaaaagtcatgcatggtctggggaactatatgcttttccatttttaagtcaggactgcaatactgattccagttaatgagcagctaagatccaatctgtctaatacagtgaccccctagccatccgggcctggcaatatacaattttttttcccctccaagtttgtaacactccccttccagaaaggcattgtgcaacacaggattatttttaaatgattctgaatttgaattaactttttggagaattctgtgatgcccttagaagaaattggacacgtattgagtgtcacaaagctggggctgggaattgctggtctaatgtttcattagacttaagaacctaaaatttttctcagttgggtggataaaaccactaacgcttagaaactgttttctcatgcagctatgtttctcttatttatgccttgaggactaatttctggttttctagctgttaatgcactgttgaccttcataatggtgccttacgcaagcgatcccttctgtgggggtctcatacaggggtgtgggcgatgcatgctttattaaggctcttgtttcacctggcagtgtactgtatcaacgtataatacagaaaaaaaatctctttaaggtcctccttcacaaagacatagagtgaaactccctttacatgtcagtatttgttcaacactttaggcaacttgactgtcagtgttaaaatggaaaacaggaaaatggaaaaatctgaccaattctgccaccttgagactttcatatagaccttgcacaacaattgtatagatcacacaccggctgtatttaatatgtaacattttcacacatattaaagatacagaagtattaaaaaacccccaatgttaatgtatttgcttaaaaggcacaagtttcacatatctgtctagctatctgttggtaatacagaaagtatactacttttttaaaaaagtgggcagaattcttgtgtatgtatatttgtgtgtacagtatgtgtatgtgtgtatatatatatattatatatatagataatatataaatattttttttaaggagaaactagaatgtttagctagaaaattccacagcctgtgaagaaatatttcaaaatggccataaaggaggtaaaaatgaaaaccataacctaacttttatagaggctttatctttaatttaacgatgtgcggaggactttcttgcttgaatctgttccgggctgtctgctctgtccatcaaatgggcaggtctggaatggggcaccttcggccgttcagaagtggcctgaacagaatgctggaacccaggctggactcggacacactaaggttttgattttgaatttcagccttattagaagatctaacctaagagtaagctaaccacagggattcttttgtagaacactttttatgcagatgaagctattttttccagcaagtagattcttccagtttttccaaggagtaatttccccgaattggcataccacggcgtggacagctgatatttcacccagctgctggcttgtgggtgtggctctttgctttatatatatatacacacatgtgagtctggctgggctggtattttgtttgatcttcctggaaatgagcagtgactaacgctcacataactggttttttttttatctgggctgatgaatacatttacctaagaaactcatttcgttttacttaagaggggaagtgcagttttcttttggcagttcagaatccaagcacttgatttgctgggtttggaaaactccttttttggccttctatgtgcttagccataacaattccattaagcaagaaggtaagcaaaagacaaaaaaaaaaaaaggaaaaaaaaaaacttgcactggcttgtctcacttacgaaacatgtcggagctgtttgcctgggtggggctgggtaccgtacctgtcaatgcctgtgattttcataattagcacgtacataaagaagtacattctgttcaggtgataactgagcctcaatcaagcagaaactttttgcttgaaattaaaaaaaaatttctattagtgaaatttctttttttttttttttggaagcaccctgttatctaaagaatctttgtaagatttttgtaaaattttgttttacaagattttatttgaaattgttttttgcaagattgttatatttctgtatgaatgtattttttattggaataacataaaagaattcttatcagca

SEQ ID NO: 420115 - DNA, 3617 bp, Homo sapiens
aagttttgcaggggttacgtttgcagtcagtccggggtgtttgcaaatattgtgtgggctccgcgcgctgcgggctgcgggagggtccggccgggcgtctctgcgagcctggagtttgcatgaaactttcacctgcgctccggggagactttcggctccggctcccaccgcgcgcctcgccgccctcgcgaccgcgggctccgtccaacccggcccgacatggacgtgctccccatgtgcagcatcttccaggagctccagatcgtgcacgagaccggctacttctcggcgctgccgtctctggaggagtactggcaacagacctgcctagagctggaacgttacctccagagcgagccctgctatgtttcagcctcagaaatcaaatttgacagccaggaagatctgtggaccaaaatcattctggctcgggagaaaaaggaggaatccgaactgaagatatcttccagtcctccagaggacactctcatcagcccgagcttttgttacaacttagagaccaacagcctgaactcagatgtcagcagcgaatcctctgacagctccgaggaactttctcccacggccaagtttacctccgaccccattggcgaagttttggtcagctcgggaaaattgagctcctctgtcacctccacgcctccatcttctccggaactgagcagggaaccttctcaactgtggggttgcgtgcccggggagctgccctcgccagggaaggtgcgcagcgggacttcggggaagccaggtgacaagggaaatggcgatgcctcccccgacggcaggaggagggtgcaccggtgccactttaacggctgcaggaaagtttacaccaaaagctcccacttgaaagcacaccagcggacgcacacagatgcacactgagaatgctaatggttgggttgattgtatgttgaggatctattactgaccgtatgatgaggccaactttttttccttgtggttagcaagactgcaagagatggaaaaaaagtagtttgaatgttttgtgtgtaaggagtataccatgagatgagatgaccaccaatcatttccttggggggagggggtgtctgcaccttagaaaaaaaaagaaaaatcaaaaaaacaaaaaaacaaaaacaaaaaaagaaggaaaatcttggagggtgggcgtgggaactcaggaccccagagtggcgagtggtgtggggagggagagcctctctcccccttttctgtgtgagaggaactcttagtgtctggtgcagctattaaatgtgcaatgtgtcaagtagcttgttttacacgctacaacatagctcatttgtaacccattgtataagctgtgtatttacaaatataacacaacaatttaacttttccttagaatacaaaaagtcatgcatggtctggggaactatatgcttttccatttttaagtcaggactgcaatactgattccagttaatgagcagctaagatccaatctgtctaatacagtgaccccctagccatccgggcctggcaatatacaattttttttcccctccaagtttgtaacactccccttccagaaaggcattgtgcaacacaggattatttttaaatgattctgaatttgaattaactttttggagaattctgtgatgcccttagaagaaattggacacgtattgagtgtcacaaagctggggctgggaattgctggtctaatgtttcattagacttaagaacctaaaatttttctcagttgggtggataaaaccactaacgcttagaaactgttttctcatgcagctatgtttctcttatttatgccttgaggactaatttctggttttctagctgttaatgcactgttgaccttcataatggtgccttacgcaagcgatcccttctgtgggggtctcatacaggggtgtgggcgatgcatgctttattaaggctcttgtttcacctggcagtgtactgtatcaacgtataatacagaaaaaaaatctctttaaggtcctccttcacaaagacatagagtgaaactccctttacatgtcagtatttgttcaacactttaggcaacttgactgtcagtgttaaaatggaaaacaggaaaatggaaaaatctgaccaattctgccaccttgagactttcatatagaccttgcacaacaattgtatagatcacacaccggctgtatttaatatgtaacattttcacacatattaaagatacagaagtattaaaaaacccccaatgttaatgtatttgcttaaaaggcacaagtttcacatatctgtctagctatctgttggtaatacagaaagtatactacttttttaaaaaagtgggcagaattcttgtgtatgtatatttgtgtgtacagtatgtgtatgtgtgtatatatatatattatatatatagataatatataaatattttttttaaggagaaactagaatgtttagctagaaaattccacagcctgtgaagaaatatttcaaaatggccataaaggaggtaaaaatgaaaaccataacctaacttttatagaggctttatctttaatttaacgatgtgcggaggactttcttgcttgaatctgttccgggctgtctgctctgtccatcaaatgggcaggtctggaatggggcaccttcggccgttcagaagtggcctgaacagaatgctggaacccaggctggactcggacacactaaggttttgattttgaatttcagccttattagaagatctaacctaagagtaagctaaccacagggattcttttgtagaacactttttatgcagatgaagctattttttccagcaagtagattcttccagtttttccaaggagtaatttccccgaattggcataccacggcgtggacagctgatatttcacccagctgctggcttgtgggtgtggctctttgctttatatatatatacacacatgtgagtctggctgggctggtattttgtttgatcttcctggaaatgagcagtgactaacgctcacataactggttttttttttatctgggctgatgaatacatttacctaagaaactcatttcgttttacttaagaggggaagtgcagttttcttttggcagttcagaatccaagcacttgatttgctgggtttggaaaactccttttttggccttctatgtgcttagccataacaattccattaagcaagaaggtaagcaaaagacaaaaaaaaaaaaaggaaaaaaaaaaacttgcactggcttgtctcacttacgaaacatgtcggagctgtttgcctgggtggggctgggtaccgtacctgtcaatgcctgtgattttcataattagcacgtacataaagaagtacattctgttcaggtgataactgagcctcaatcaagcagaaactttttgcttgaaattaaaaaaaaatttctattagtgaaatttctttttttttttttttggaagcaccctgttatctaaagaatctttgtaagatttttgtaaaattttgttttacaagattttatttgaaattgttttttgcaagattgttatatttctgtatgaatgtattttttattggaataacataaaagaattcttatcagca

SEQ ID NO: 420116 - DNA, 1678 bp, Homo sapiens
aagttttgcaggggttacgtttgcagtcagtccggggtgtttgcaaatattgtgtgggctccgcgcgctgcgggctgcgggagggtccggccgggcgtctctgcgagcctggagtttgcatgaaactttcacctgcgctccggggagactttcggctccggctcccaccgcgcgcctcgccgccctcgcgaccgcgggctccgtccaacccggcccgacatggacgtgctccccatgtgcagcatcttccaggagctccagatcgtgcacgagaccggctacttctcggcgctgccgtctctggaggagtactggcaacagacctgcctagagctggaacgttacctccagagcgagccctgctatgtttcagcctcagaaatcaaatttgacagccaggaagatctgtggaccaaaatcattctggctcgggagaaaaaggaggaatccgaactgaagatatcttccagtcctccagaggacactctcatcagcccgagcttttgttacaacttagagaccaacagcctgaactcagatgtcagcagcgaatcctctgacagctccgaggaactttctcccacggccaagtttacctccgaccccattggcgaagttttggtcagctcgggaaaattgagctcctctgtcacctccacgcctccatcttctccggaactgagcagggaaccttctcaactgtggggttgcgtgcccggggagctgccctcgccagggaaggtgcgcagcgggacttcggggaagccaggtgacaagggaaatggcgatgcctcccccgacggcaggaggagggtgcaccggtgccactttaacggctgcaggaaagtttacaccaaaagctcccacttgaaagcacaccagcggacgcacacaggagaaaagccttacagatgctcatgggaagggtgtgagtggcgttttgcaagaagtgatgagttaaccaggcacttccgaaagcacaccggggccaagccttttaaatgctcccactgtgacaggtgtttttccaggtctgaccacctggccctgcacatgaagaggcacctctgagggagcagagaggtggatcctgtaggctaaaaggcttccaggctgagagccggccgtggaaggagggatgcgtgttccagccaaagcatgccgttctgcaccctacccagttgcctccagggcctctccttggaaggtcttttgagggctaaaaaggtcctgtaagaagcggcatagcacccgtggtgcatgcctgtcctgggagctggagaggatgtcagcgagcctgacattgccctccctgaatgcatcaaatactcttctccaaggactgacaaaaacaaccccccggctgtgggcacagtagggaaccatgccggtttgatcttccattgctcaagccagggaatgcattgcagaggcacctgcacaacgacaaacttgagtgtttccctgccacttctgtgcctccacagcctgctccagttccgcagctagagctgggcctaccttccccagccagccctgccacacacctggctgaggcatgtctgggaggggtggaggaggcagagggactccaggccagagggctgttctcacaacctcagcccactctcagtcaaggagggcagaaaataaaagatgacatcactgccaaaaaagt

SEQ ID NO: 420117 - DNA, 709 bp, Homo sapiens
  misc_feature (50)..(50): n is a, c, g, or t
taagaatatagaattttatcttcctttattaaaaaaaataatcgtaccangggaggaagaattggcaccttcctagggaaggagacgagcgcttcgccttgattctccgagaagcctccgagaagtgctttaagtgtgtttgcatgcgccaggcggtgggcagcgggggcctgtccagccctctcccgccatccttccccaagtgacgtccactgccttgtcaccagcgacctgcctgtcatgcccaccccctgaggaagcatggggaccctaacaccctggtgccctgcaccagacaggccgtggtcaggcccaggccaccggccgggttctgccacagcttcccacgtgcttgctgacatgcgtgtgcctgtgtgtggtgtctgttgctgtgtcgtgaaactgtgaccatcactcagtccaaacaagtgagtggccctcgaggccacagttatgcaactttcagtgtgtgtcataacgacgtcactgctttttaaactcgataactctttattttagtaaaatgcccaggagtcctggaagctacgcggacttgcagaggttttattttttggccttagaatctgcagaaattaggaggcaccgagcccagcgcagcagcctcggacccggattgcgtttgccttagcggatatgtttatacagatgaatataaaatgtttttttctttgggctttttgcttctttt

SEQ ID NO: 420118 - DNA, 2305 bp, Homo sapiens
agtgtcaggaagaggaagagcgcggccggcggcgctgcgctgagagcaggggcccggccaaggcgagtgccgcgcgggccaccatggccacggacgagctggccaccaagctgagccggcggctgcagatggagggcgagggcggcggcgagaccccggagcagcccgggctgaacggggcagcggcggcggcggcgggggcacccgacgaggcggccgaggcgctgggcagcgcggactgcgagctgagcgccaagctgctgcggcgcgcagacctcaaccagggcatcggcgagccccagtcgcccagccgccgcgtcttcaacccctacaccgagttcaaggagttctccaggaagcagatcaaggacatggagaagatgttcaagcagtatgatgccgggcgggacggcttcatcgacctgatggagctaaaactcatgatggagaaacttggggcccctcagacccacctgggcctgaaaaacatgatcaaggaggtggatgaggactttgacagcaagctgagcttccgggagttcctcctgatcttccgcaaggcggcggccggggagcttcaggaggacagcgggctgtgcgtgctggcccgcctctctgagatcgacgtctccagtgagggtgtcaagggggccaagagcttctttgaggccaaggtccaggccatcaacgtgtccagccgcttcgaggaggagatcaaggcagagcaggaggaaaggaagaagcaggcggaggagatgaagcagcggaaagcggccttcaaggagctgcagtccacctttaagtagcgggggctgcagccgaccgccctgctccggccccagtgtggtgggcgagggtggcgcatgggaggccgagcctgaatccttgcctgtgtctgacgggaccactactaaaaacctaaaaatatctgtgaatggagcaagttcaggggtcttatggaggtggcccggcccctccccgctcccttccactctgcacgaggccgccacaccggcgctggctccctgcccggcccggccctccctggcaatccctgggctctcttgcacccctaactgccccctgcctgctccggcactgccccaggcccagctcctggccctaggtccctcccagccccatgtgcctgccgcctgccctccacacatccctgtccccccaacccgggaacccctgccctcctccagcaggccgcaccgcccctggggccccctgccagccccttcccaggctgggagacggcagaagagatagaatcagggctgcccccacagagtgggacccaaggggctaattggaggcacgaggggacccctccccagggccttttcctcctctgcgtcttccatctactgaaatgggagagggggtggggagcttctgttctggtgaagggacccgggcaggcccccagcaccccatgctgacttggagaaccccagatctctggggcccagccaggcagggtgtgggggcagctgtgccaatctacctcacaggcccaccccctgccgggcatgccgtgggatcatgggcagggaaggctctgggggtcggagacaccgctgcttagcacccccagccagaacaccctgagggtctcggggctctggagagagtggggcgggaggaagaattggcaccttcctagggaaggagacgagcgcttcgccttgattctccgagaagcctccgagaagtgctttaagtgtgtttgcatgcgccaggcggtgggcagcgggggcctgtccagccctctcccgccatccttccccaagtgacgtccactgccttgtcaccagcgacctgcctgtcatgcccaccccctgaggaagcatggggaccctaacaccctggtgccctgcaccagacaggccgtggtcaggcccaggccaccggccgggttctgccacagcttcccacgtgcttgctgacatgcgtgtgcctgtgtgtggtgtctgttgctgtgtcgtgaaactgtgaccatcactcagtccaaacaagtgagtggccctcgaggccacagttatgcaactttcagtgtgtgtcataacgacgtcactgctttttaaactcgataactctttattttagtaaaatgcccaggagtcctggaagctacgcggacttgcagaggttttattttttggccttagaatctgcagaaattaggaggcaccgagcccagcgcagcagcctcggacccggattgcgtttgccttagcggatatgtttatacagatgaatataaaatgtttttttctttgggctttttgcttctttt

SEQ ID NO: 420119 - DNA, 2751 bp, Homo sapiens
agtgtcaggaagaggaagagcgcggccggcggcgctgcgctgagagcaggggcccggccaaggcgagtgccgcgcgggccaccatggccacggacgagctggccaccaagctgagccggcggctgcagatggagggcgagggcggcggcgagaccccggagcagcccgggctgaacggggcagcggcggcggcggcgggggcacccgacgaggcggccgaggcgctgggcagcgcggactgcgagctgagcgccaagctgctgcggcgcgcagacctcaaccagggcatcggcgagccccagtcgcccagccgccgcgtcttcaacccctacaccgagttcaaggagttctccaggaagcagatcaaggacatggagaagatgttcaagcagtatgatgccgggcgggacggcttcatcgacctgatggagctaaaactcatgatggagaaacttggggcccctcagacccacctgggcctgaaaaacatgatcaaggaggtggatgaggactttgacagcaagctgagcttccgggagttcctcctgatcttccgcaaggcggcggccggggagcttcaggaggacagcgggctgtgcgtgctggcccgcctctctgagatcgacgtctccagtgagggtgtcaagggggccaagagcttctttgaggccaaggtccaggccatcaacgtgtccagccgcttcgaggaggagatcaaggcagagcaggaggaaaggaagaagcaggcggaggagatgaagcagcggaaagcggccttcaaggagctgcagtccacctttaagtagcgggggctgcagccgaccgccctgctccggccccagtgtggtgggcgagggtggcgcatgggaggccgagcctgaatccttgcctgtgtctgacgggaccactactaaaaacctaaaaatatctgtgaatggagcaagttcaggggtcttatggaggtggcccggcccctccccgctcccttccactctgcacgaggccgccacaccggcgctggctccctgcccggcccggccctccctggcaatccctgggctctcttgcacccctaactgccccctgcctgctccggcactgccccaggcccagctcctggccctaggtccctcccagccccatgtgcctgccgcctgccctccacacatccctgtccccccaacccgggaacccctgccctcctccagcaggccgcaccgcccctggggccccctgccagccccttcccaggctgggagacggcagaagagatagaatcagggctgcccccacagagtgggacccaaggggctaattggaggcacgaggggacccctccccagggccttttcctcctctgcgtcttccatctactgaaatgggagagggggtggggagcttctgttctggtgaagggacccgggcaggcccccagcaccccatgctgacttggagaaccccagatctctggggcccagccaggcagggtgtgggggcagctgtgccaatctacctcacaggcccaccccctgccgggcatgccgtgggatcatgggcagggaaggctctgggggtcggagacaccgctgcttagcacccccagccagaacaccctgagggtctcggggctctggagagagtggggcgggaggaagaattggcaccttcctagggaaggagacgagcgcttcgccttgattctccgagaagcctccgagaagtgctttaagtgtgtttgcatgcgccaggcggtgggcagcgggggcctgtccagccctctcccgccatccttccccaagtgacgtccactgccttgtcaccagcgacctgcctgtcatgcccaccccctgaggaagcatggggaccctaacaccctggtgccctgcaccagacaggccgtggtcaggcccaggccaccggccgggttctgccacagcttcccacgtgcttgctgacatgcgtgtgcctgtgtgtggtgtctgttgctgtgtcgtgaaactgtgaccatcactcagtccaaacaagtgagtggccctcgaggccacagttatgcaactttcagtgtgtgtcataacgacgtcactgctttttaaactcgataactctttattttagtaaaatgcccaggagtcctggaagctacgcggacttgcagaggttttattttttggccttagaatctgcagaaattaggaggcaccgagcccagcgcagcagcctcggacccggattgcgtttgccttagcggatatgtttatacagatgaatataaaatgtttttttctttgggctttttgcttcttttttcccccccttctcaccttcccttctccccgaccccaccccccaaaaaagctacttcttcattccgtggtacgattattttttttaactaaaggaagataaaaaaaaaaaaaaaaaaaaaaaaaattgtgtgtggcgcgcgcctcggcgccccgcggaaaagagttttaaaaaacccatctggggtggtgggcgagcgcggggcccccagtgaggattaggtggcacacgtgggccaagggcgtggtttcccagaggaaaaactcgcgggccagagaacagagggcgtgggtttccccacaagttaaaaaaaaccgccgcggggggaaaccgggaaggcttttgtggaacaaactccaaacagggaagtgcgcagaggccaacgcggcgctcttccacacgagaagctccagagggaactcggaataaaaatacgcccgcccgggt

SEQ ID NO: 420120 - DNA, 1918 bp, Homo sapiens
tcgtctatgtcgtgctggtgttaatcggccgaggctgagcttccgggagttcctcctgatcttccgcaaggcggcggccggggagcttcaggaggacagcgggctgtgcgtgctggcccgcctctctgagatcgacgtctccagtgagggtgtcaagggggccaagagcttctttgaggccaaggtccaggccatcaacgtgtccagccgcttcgaggaggagatcaaggcagagcaggaggaaaggaagaagcaggcggaggagatgaagcagcggaaagcggccttcaaggagctgcagtccacctttaagtagcgggggctgcagccgaccgccctgctccggccccagtgtggtgggcgagggtggcgcatgggaggccgagcctgaatccttgcctgtgtctgacgggaccactactaaaaacctaaaaatatctgtgaatggagcaagttcaggggtcttatggaggtggcccggcccctccccgctcccttccactctgcacgaggccgccacaccggcgctggctccctgcccggcccggccctccctggcaatccctgggctctcttgcacccctaactgccccctgcctgctccggcactgccccaggcccagctcctggccctaggtccctcccagccccatgtgcctgccgcctgccctccacacatccctgtccccccaacccgggaacccctgccctcctccagcaggccgcaccgcccctggggccccctgccagccccttcccaggctgggagacggcagaagagatagaatcagggctgcccccacagagtgggacccaaggggctaattggaggcacgaggggacccctccccagggccttttcctcctctgcgtcttccatctactgaaatgggagagggggtggggagcttctgttctggtgaagggacccgggcaggcccccagcaccccatgctgacttggagaaccccagatctctggggcccagccaggcagggtgtgggggcagctgtgccaatctacctcacaggcccaccccctgccgggcatgccgtgggatcatgggcagggaaggctctgggggtcggagacaccgctgcttagcacccccagccagaacaccctgagggtctcggggctctggagagagtggggcgggaggaagaattggcaccttcctagggaaggagacgagcgcttcgccttgattctccgagaagcctccgagaagtgctttaagtgtgtttgcatgcgccaggcggtgggcagcgggggcctgtccagccctctcccgccatccttccccaagtgacgtccactgccttgtcaccagcgacctgcctgtcatgcccaccccctgaggaagcatggggaccctaacaccctggtgccctgcaccagacaggccgtggtcaggcccaggccaccggccgggttctgccacagcttcccacgtgcttgctgacatgcgtgtgcctgtgtgtggtgtctgttgctgtgtcgtgaaactgtgaccatcactcagtccaaacaagtgagtggccctcgaggccacagttatgcaactttcagtgtgtgtcataacgacgtcactgctttttaaactcgataactctttattttagtaaaatgcccaggagtcctggaagctacgcggacttgcagaggttttattttttggccttagaatctgcagaaattaggaggcaccgagcccagcgcagcagcctcggacccggattgcgtttgccttagcggatatgtttatacagatgaatataaaatgtttttttctttgggctttttgcttcttttttcccccccttctcaccttcccttctccccgaccccaccccccaaaaaagctacttcttcattccgtggtacgattattttttttaactaaaggaagataaaa

SEQ ID NO: 420121 - DNA, 2519 bp, Homo sapiens
agtgtcaggaagaggaagagcgcggccggcggcgctgcgctgagagcaggggcccggccaaggcgagtgccgcgcgggccaccatggccacggacgagctggccaccaagctgagccggcggctgcagatggagggcgagggcggcggcgagaccccggagcagcccgggctgaacggggcagcggcggcggcggcgggggcacccgacgaggcggccgaggcgctgggcagcgcggactgcgagctgagcgccaagctgctgcggcgcgcagacctcaaccagggcatcggcgagccccagtcgcccagccgccgcgtcttcaacccctacaccgagttcaaggagttctccaggaagcagatcaaggacatggagaagatgttcaagcagtatgatgccgggcgggacggcttcatcgacctgatggagctaaaactcatgatggagaaacttggggcccctcagacccacctgggcctgaaaaacatgatcaaggaggtggatgaggactttgacagcaagctgagcttccgggagttcctcctgatcttccgcaaggcggcggccggggagcttcaggaggacagcgggctgtgcgtgctggcccgcctctctgagatcgacgtctccagtgagggtgtcaagggggccaagagcttctttgaggccaagtggaactgggtgtgccgctggggtcccggacaggaagcagaggatcaggatggcagcagcttgagcgactcccttcgagcgcccttgctctgcagcagccacagaatataggtccaggccatcaacgtgtccagccgcttcgaggaggagatcaaggcagagcaggaggaaaggaagaagcaggcggaggagatgaagcagcggaaagcggccttcaaggagctgcagtccacctttaagtagcgggggctgcagccgaccgccctgctccggccccagtgtggtgggcgagggtggcgcatgggaggccgagcctgaatccttgcctgtgtctgacgggaccactactaaaaacctaaaaatatctgtgaatggagcaagttcaggggtcttatggaggtggcccggcccctccccgctcccttccactctgcacgaggccgccacaccggcgctggctccctgcccggcccggccctccctggcaatccctgggctctcttgcacccctaactgccccctgcctgctccggcactgccccaggcccagctcctggccctaggtccctcccagccccatgtgcctgccgcctgccctccacacatccctgtccccccaacccgggaacccctgccctcctccagcaggccgcaccgcccctggggccccctgccagccccttcccaggctgggagacggcagaagagatagaatcagggctgcccccacagagtgggacccaaggggctaattggaggcacgaggggacccctccccagggccttttcctcctctgcgtcttccatctactgaaatgggagagggggtggggagcttctgttctggtgaagggacccgggcaggcccccagcaccccatgctgacttggagaaccccagatctctggggcccagccaggcagggtgtgggggcagctgtgccaatctacctcacaggcccaccccctgccgggcatgccgtgggatcatgggcagggaaggctctgggggtcggagacaccgctgcttagcacccccagccagaacaccctgagggtctcggggctctggagagagtggggcgggaggaagaattggcaccttcctagggaaggagacgagcgcttcgccttgattctccgagaagcctccgagaagtgctttaagtgtgtttgcatgcgccaggcggtgggcagcgggggcctgtccagccctctcccgccatccttccccaagtgacgtccactgccttgtcaccagcgacctgcctgtcatgcccaccccctgaggaagcatggggaccctaacaccctggtgccctgcaccagacaggccgtggtcaggcccaggccaccggccgggttctgccacagcttcccacgtgcttgctgacatgcgtgtgcctgtgtgtggtgtctgttgctgtgtcgtgaaactgtgaccatcactcagtccaaacaagtgagtggccctcgaggccacagttatgcaactttcagtgtgtgtcataacgacgtcactgctttttaaactcgataactctttattttagtaaaatgcccaggagtcctggaagctacgcggacttgcagaggttttattttttggccttagaatctgcagaaattaggaggcaccgagcccagcgcagcagcctcggacccggattgcgtttgccttagcggatatgtttatacagatgaatataaaatgtttttttctttgggctttttgcttcttttttcccccccttctcaccttcccttctccccgaccccaccccccaaaaaagctacttcttcattccgtggtacgattattttttttaactaaaggaagataaaa

SEQ ID NO: 420122 - DNA, 1437 bp, Homo sapiens
  misc_feature (112)..(112): n is a, c, g, or t
  misc_feature (123)..(124): n is a, c, g, or t
  misc_feature (133)..(133): n is a, c, g, or t
  misc_feature (136)..(136): n is a, c, g, or t
  misc_feature (180)..(180): n is a, c, g, or t
  misc_feature (182)..(182): n is a, c, g, or t
  misc_feature (192)..(193): n is a, c, g, or t
cttcttctttttttctggtcatattcattgatggccgtggtatctctggacatggtcctgccggtgcgtcttatcgcatatgatgcaggggccctgtccaattgctgatgtncctgctgctgnntgccaccantgnccactggactgagctggccaccaatgctgatgcctggctggctncnagattgatgnngctgatggtgctgtgctgtgccgggaacccctgccctcctccagcaggccgcaccgcccctggggccccctgccagccccttcccaggctgggagacggcagaagagatagaatcagggctgcccccacagagtgggacccaaggggctaattggaggcacgaggggacccctccccagggccttttcctcctctgcgtcttccatctactgaaatgggagagggggtggggagcttctgttctggtgaagggacccgggcaggcccccagcaccccatgctgacttggagaaccccagatctctggggcccagccaggcagggtgtgggggcagctgtgccaatctacctcacaggcccaccccctgccgggcatgccgtgggatcatgggcagggaaggctctgggggtcggagacaccgctgcttagcacccccagccagaacaccctgagggtctcggggctctggagagagtggggcgggaggaagaattggcaccttcctagggaaggagacgagcgcttcgccttgattctccgagaagcctccgagaagtgctttaagtgtgtttgcatgcgccaggcggtgggcagcgggggcctgtccagccctctcccgccatccttccccaagtgacgtccactgccttgtcaccagcgacctgcctgtcatgcccaccccctgaggaagcatggggaccctaacaccctggtgccctgcaccagacaggccgtggtcaggcccaggccaccggccgggttctgccacagcttcccacgtgcttgctgacatgcgtgtgcctgtgtgtggtgtctgttgctgtgtcgtgaaactgtgaccatcactcagtccaaacaagtgagtggccctcgaggccacagttatgcaactttcagtgtgtgtcataacgacgtcactgctttttaaactcgataactctttattttagtaaaatgcccaggagtcctggaagctacgcggacttgcagaggttttattttttggccttagaatctgcagaaattaggaggcaccgagcccagcgcagcagcctcggacccggattgcgtttgccttagcggatatgtttatacagatgaatataaaatgtttttttctttgggctttttgcttcttttttcccccccttctcaccttcccttctccccgaccccaccccccaaaaaagctacttcttcattccgtggtacgattattttttttaactaaaggaagataaaa

SEQ ID NO: 420123 - DNA, 812 bp, Homo sapiens
  misc_feature (50)..(50): n is a, c, g, or t
taagaatatagaattttatcttcctttattaaaaaaaataatcgtaccangggaggaagaattggcaccttcctagggaaggagacgagcgcttcgccttgattctccgagaagcctccgagaagtgctttaagtgtgtttgcatgcgccaggcggtgggcagcgggggcctgtccagccctctcccgccatccttccccaagtgacgtccactgccttgtcaccagcgacctgcctgtcatgcccaccccctgaggaagcatggggaccctaacaccctggtgccctgcaccagacaggccgtggtcaggcccaggccaccggccgggttctgccacagcttcccacgtgcttgctgacatgcgtgtgcctgtgtgtggtgtctgttgctgtgtcgtgaaactgtgaccatcactcagtccaaacaagtgagtggccctcgaggccacagttatgcaactttcagtgtgtgtcataacgacgtcactgctttttaaactcgataactctttattttagtaaaatgcccaggagtcctggaagctacgcggacttgcagaggttttattttttggccttagaatctgcagaaattaggaggcaccgagcccagcgcagcagcctcggacccggattgcgtttgccttagcggatatgtttatacagatgaatataaaatgtttttttctttgggctttttgcttcttttttcccccccttctcaccttcccttctccccgaccccaccccccaaaaaagctacttcttcattccgtggtacgattattttttttaactaaaggaagataaaa

SEQ ID NO: 420124 - DNA, 1022 bp, Homo sapiens
agtgtcaggaagaggaagagcgcggccggcggcgctgcgctgagagcaggggcccggccaaggcgagtgccgcgcgggccaccatggccacggacgagctggccaccaagctgagccggcggctgcagatggagggcgagggcggcggcgagaccccggagcagcccgggctgaacggggcagcggcggcggcggcgggggcacccgacgaggcggccgaggcgctgggcagcgcggactgcgagctgagcgccaagctgctgcggcgcgcagacctcaaccagggcatcggcgagccccagtcgcccagccgccgcgtcttcaacccctacaccgagttcaaggagttctccaggaagcagatcaaggacatggagaagatgttcaagcagtatgatgccgggcgggacggcttcatcgacctgatggagctaaaactcatgatggagaaacttggggcccctcagacccacctgggcctgaaaaacatgatcaaggaggtggatgaggactttgacagcaagctgagcttccgggagttcctcctgatcttccgcaaggcggcggccggggagcttcaggaggacagcgggctgtgcgtgctggcccgcctctctgagatcgacgtctccagtgagggtgtcaagggggccaagagcttctttgaggccaagtggaactgggtgtgccgctggggtcccggacaggaagcagaggatcaggatggcagcagcttgagcgactcccttcgagcgcccttgctctgcagcagccacagaatataggttctctatttcaatcctctcaacaactccctaagatcagagttattgggtgccaggttctaagtgaggaaactgaggctcaggaaggtgaatgaagtgcctgacccagggccagagctggtgaggtcaagctgtttgtgttgctgggcaggactcagcagaagcctgagccagaagggaccccaggaaaagcagtcataaggccgggcgcagtggctcacacctgtcatcccagca

SEQ ID NO: 420125 - DNA, 124 bp, Homo sapiens
cccccccttctcaccttcccttctccccgaccccaccccccaaaaaagctacttcttcattccgtggtacgattattttttttaactaaaggaagataaaaattctatattcttatgtgtgtat

SEQ ID NO: 420126 - DNA, 2408 bp, Homo sapiens
agtgtcaggaagaggaagagcgcggccggcggcgctgcgctgagagcaggggcccggccaaggcgagtgccgcgcgggccaccatggccacggacgagctggccaccaagctgagccggcggctgcagatggagggcgagggcggcggcgagaccccggagcagcccgggctgaacggggcagcggcggcggcggcgggggcacccgacgaggcggccgaggcgctgggcagcgcggactgcgagctgagcgccaagctgctgcggcgcgcagacctcaaccagggcatcggcgagccccagtcgcccagccgccgcgtcttcaacccctacaccgagttcaaggagttctccaggaagcagatcaaggacatggagaagatgttcaagcagtatgatgccgggcgggacggcttcatcgacctgatggagctaaaactcatgatggagaaacttggggcccctcagacccacctgggcctgaaaaacatgatcaaggaggtggatgaggactttgacagcaagctgagcttccgggagttcctcctgatcttccgcaaggcggcggccggggagcttcaggaggacagcgggctgtgcgtgctggcccgcctctctgagatcgacgtctccagtgagggtgtcaagggggccaagagcttctttgaggccaaggtccaggccatcaacgtgtccagccgcttcgaggaggagatcaaggcagagcaggaggaaaggaagaagcaggcggaggagatgaagcagcggaaagcggccttcaaggagctgcagtccacctttaagtagcgggggctgcagccgaccgccctgctccggccccagtgtggtgggcgagggtggcgcatgggaggccgagcctgaatccttgcctgtgtctgacgggaccactactaaaaacctaaaaatatctgtgaatggagcaagttcaggggtcttatggaggtggcccggcccctccccgctcccttccactctgcacgaggccgccacaccggcgctggctccctgcccggcccggccctccctggcaatccctgggctctcttgcacccctaactgccccctgcctgctccggcactgccccaggcccagctcctggccctaggtccctcccagccccatgtgcctgccgcctgccctccacacatccctgtccccccaacccgggaacccctgccctcctccagcaggccgcaccgcccctggggccccctgccagccccttcccaggctgggagacggcagaagagatagaatcagggctgcccccacagagtgggacccaaggggctaattggaggcacgaggggacccctccccagggccttttcctcctctgcgtcttccatctactgaaatgggagagggggtggggagcttctgttctggtgaagggacccgggcaggcccccagcaccccatgctgacttggagaaccccagatctctggggcccagccaggcagggtgtgggggcagctgtgccaatctacctcacaggcccaccccctgccgggcatgccgtgggatcatgggcagggaaggctctgggggtcggagacaccgctgcttagcacccccagccagaacaccctgagggtctcggggctctggagagagtggggcgggaggaagaattggcaccttcctagggaaggagacgagcgcttcgccttgattctccgagaagcctccgagaagtgctttaagtgtgtttgcatgcgccaggcggtgggcagcgggggcctgtccagccctctcccgccatccttccccaagtgacgtccactgccttgtcaccagcgacctgcctgtcatgcccaccccctgaggaagcatggggaccctaacaccctggtgccctgcaccagacaggccgtggtcaggcccaggccaccggccgggttctgccacagcttcccacgtgcttgctgacatgcgtgtgcctgtgtgtggtgtctgttgctgtgtcgtgaaactgtgaccatcactcagtccaaacaagtgagtggccctcgaggccacagttatgcaactttcagtgtgtgtcataacgacgtcactgctttttaaactcgataactctttattttagtaaaatgcccaggagtcctggaagctacgcggacttgcagaggttttattttttggccttagaatctgcagaaattaggaggcaccgagcccagcgcagcagcctcggacccggattgcgtttgccttagcggatatgtttatacagatgaatataaaatgtttttttctttgggctttttgcttcttttttcccccccttctcaccttcccttctccccgaccccaccccccaaaaaagctacttcttcattccgtggtacgattattttttttaactaaaggaagataaaa

SEQ ID NO: 420127 - DNA, 2490 bp, Homo sapiens
  misc_feature (112)..(112): n is a, c, g, or t
  misc_feature (123)..(124): n is a, c, g, or t
  misc_feature (133)..(133): n is a, c, g, or t
  misc_feature (136)..(136): n is a, c, g, or t
  misc_feature (180)..(180): n is a, c, g, or t
  misc_feature (182)..(182): n is a, c, g, or t
  misc_feature (192)..(193): n is a, c, g, or t
cttcttctttttttctggtcatattcattgatggccgtggtatctctggacatggtcctgccggtgcgtcttatcgcatatgatgcaggggccctgtccaattgctgatgtncctgctgctgnntgccaccantgnccactggactgagctggccaccaatgctgatgcctggctggctncnagattgatgnngctgatggtgctgtgctgtgctgatgacccctgtgatgcaagccctggtgcttgaactgtgggcatgctgtgcgtgcgtgctggcgggggcacccgacgaggcggccgaggcgctgggcagcgcggactgcgagctgagcgccaagctgctgcggcgcgcagacctcaaccagggcatcggcgagccccagtcgcccagccgccgcgtcttcaacccctacaccgagttcaaggagttctccaggaagcagatcaaggacatggagaagatgttcaagcagtatgatgccgggcgggacggcttcatcgacctgatggagctaaaactcatgatggagaaacttggggcccctcagacccacctgggcctgaaaaacatgatcaaggaggtggatgaggactttgacagcaagctgagcttccgggagttcctcctgatcttccgcaaggcggcggccggggagcttcaggaggacagcgggctgtgcgtgctggcccgcctctctgagatcgacgtctccagtgagggtgtcaagggggccaagagcttctttgaggccaaggtccaggccatcaacgtgtccagccgcttcgaggaggagatcaaggcagagcaggaggaaaggaagaagcaggcggaggagatgaagcagcggaaagcggccttcaaggagctgcagtccacctttaagtagcgggggctgcagccgaccgccctgctccggccccagtgtggtgggcgagggtggcgcatgggaggccgagcctgaatccttgcctgtgtctgacgggaccactactaaaaacctaaaaatatctgtgaatggagcaagttcaggggtcttatggaggtggcccggcccctccccgctcccttccactctgcacgaggccgccacaccggcgctggctccctgcccggcccggccctccctggcaatccctgggctctcttgcacccctaactgccccctgcctgctccggcactgccccaggcccagctcctggccctaggtccctcccagccccatgtgcctgccgcctgccctccacacatccctgtccccccaacccgggaacccctgccctcctccagcaggccgcaccgcccctggggccccctgccagccccttcccaggctgggagacggcagaagagatagaatcagggctgcccccacagagtgggacccaaggggctaattggaggcacgaggggacccctccccagggccttttcctcctctgcgtcttccatctactgaaatgggagagggggtggggagcttctgttctggtgaagggacccgggcaggcccccagcaccccatgctgacttggagaaccccagatctctggggcccagccaggcagggtgtgggggcagctgtgccaatctacctcacaggcccaccccctgccgggcatgccgtgggatcatgggcagggaaggctctgggggtcggagacaccgctgcttagcacccccagccagaacaccctgagggtctcggggctctggagagagtggggcgggaggaagaattggcaccttcctagggaaggagacgagcgcttcgccttgattctccgagaagcctccgagaagtgctttaagtgtgtttgcatgcgccaggcggtgggcagcgggggcctgtccagccctctcccgccatccttccccaagtgacgtccactgccttgtcaccagcgacctgcctgtcatgcccaccccctgaggaagcatggggaccctaacaccctggtgccctgcaccagacaggccgtggtcaggcccaggccaccggccgggttctgccacagcttcccacgtgcttgctgacatgcgtgtgcctgtgtgtggtgtctgttgctgtgtcgtgaaactgtgaccatcactcagtccaaacaagtgagtggccctcgaggccacagttatgcaactttcagtgtgtgtcataacgacgtcactgctttttaaactcgataactctttattttagtaaaatgcccaggagtcctggaagctacgcggacttgcagaggttttattttttggccttagaatctgcagaaattaggaggcaccgagcccagcgcagcagcctcggacccggattgcgtttgccttagcggatatgtttatacagatgaatataaaatgtttttttctttgggctttttgcttcttttttcccccccttctcaccttcccttctccccgaccccaccccccaaaaaagctacttcttcattccgtggtacgattattttttttaactaaaggaagataaaa

SEQ ID NO: 420128 - DNA, 2347 bp, Homo sapiens
agtgtcaggaagaggaagagcgcggccggcggcgctgcgctgagagcaggggcccggccaaggcgagtgccgcgcgggccaccatggccacggacgagctggccaccaagctgagccggcggctgcagatggagggcgagggcggcggcgagaccccggagcagcccgggctgaacggggcagcggcggcggcggcgggggcacccgacgaggcggccgaggcgctgggcagcgcggactgcgagctgagcgccaagctgctgcggcgcgcagacctcaaccagggcatcggcgagccccagtcgcccagccgccgcgtcttcaacccctacaccgagttcaaggagttctccaggaagcagatcaaggacatggagaagatgttcaagcagtatgatgccgggcgggacggcttcatcgacctgatggagctaaaactcatgatggagaaacttggggcccctcagacccacctgggcctgaaaaacatgatcaaggaggtggatgaggactttgacagcaagctgagcttccgggagttcctcctgatcttccgcaaggcggcggccggggagcttcaggaggacagcgggctgtgcgtgctggcccgcctctctgagatcgacgtctccagtgagggtgtcaagggggccaagagcttctttgaggccaaggtccaggccatcaacgtgtccagccgcttcgaggaggagatcaaggcagagcaggaggaaaggaagaagcaggcggaggagatgaagcagcggaaagcggccttcaaggagctgcagtccacctttaagtagcgggggctgcagccgaccgccctgctccggccccagtgtggtgggcgagggtggcgcatgggaggccgagcctgaatccttgcctgtgtctgacgggaccactactaaaaacctaaaaatatctgtgaatggagcaagttcaggggtcttatggaggtggcccggcccctccccgctcccttccactctgcacgaggccgccacaccggcgctggctccctgcccggcccggccctccctggcaatccctgggctctcttgcacccctaactgccccctgcctgctccggcactgccccaggcccagctcctggccctaggtccctcccagccccatgtgcctgccgcctgccctccacacatccctgtccccccaacccgggaacccctgccctcctccagcaggccgcaccgcccctggggccccctgccagccccttcccaggctgggagacggcagaagagatagaatcagggctgcccccacagagtgggacccaaggggctaattggaggcacgaggggacccctccccagggccttttcctcctctgcgtcttccatctactgaaatgggagagggggtggggagcttctgttctggtgaagggacccgggcaggcccccagcaccccatgctgacttggagaaccccagatctctggggcccagccaggcagggtgtgggggcagctgtgccaatctacctcacaggcccaccccctgccgggcatgccgtgggatcatgggcagggaaggctctgggggtcggagacaccgctgcttagcacccccagccagaacaccctgagggtctcggggctctggagagagtggggcgggaggaagaattggcaccttcctagggaaggagacgagcgcttcgccttgattctccgagaagcctccgagaagtgctttaagtgtgtttgcatgcgccaggcggtgggcagcgggggcctgtccagccctctcccgccatccttccccaagtgacgtccactgccttgtcaccagcgacctgcctgtcatgcccaccccctgaggaagcatggggaccctaacaccctggtgccctgcaccagacaggccgtggtcaggcccaggccaccggccgggttctgccacagcttcccacgtgcttgctgacatgcgtgtgcctgtgtgtggtgtctgttgctgtgtcgtgaaactgtgaccatcactcagtccaaacaagtgagtggccctcgaggccacagttatgcaactttcagtgtgtgtcataacgacgtcactgctttttaaactcgataactctttattttagtaaaatgcccaggagtcctggaagctacgcggacttgcagaggttttattttttggccttagaatctgcagaaattaggaggcaccgagcccagcgcagcagcctcggacccggattgcgtttgccttagcggatatgtttatacagatgaatataaaatgtttttttctttgggctttttgcttcttttttccgtggtacgattattttttttaactaaaggaagataaaa

SEQ ID NO: 420129 - DNA, 1949 bp, Homo sapiens
agtgtcaggaagaggaagagcgcggccggcggcgctgcgctgagagcaggggcccggccaaggcgagtgccgcgcgggccaccatggccacggacgagctggccaccaagctgagccggcggctgcagatggagggcgagggcggcggcgagaccccggagcagcccgggctgaacggggcagcggcggcggcggcgggggcacccgacgaggcggccgaggcgctgggcagcgcggactgcgagctgagcgccaagctgctgcggcgcgcagacctcaaccagggcatcggcgagccccagtcgcccagccgccgcgtcttcaacccctacaccgagttcaaggagttctccaggaagcagatcaaggacatggagaagatgttcaagcagtatgatgccgggcgggacggcttcatcgacctgatggagctaaaactcatgatggagaaacttggggcccctcagacccacctgggcctgaaaaacatgatcaaggaggtggatgaggactttgacagcaagctgagcttccgggagttcctcctgatcttccgcaaggcggcggccggggagcttcaggaggacagcgggctgtgcgtgctggcccgcctctctgagatcgacgtctccagtgagggtgtcaagggggccaagagcttctttgaggccaaggtccaggccatcaacgtgtccagccgcttcgaggaggagatcaaggcagagcaggaggaaaggaagaagcaggcggaggagatgaagcagcggaaagcggccttcaaggagctgcagtccacctttaagtagcgggggctgcagccgaccgccctgctccggccccagtgtggtgggcgagggtggcgcatgggaggccgagcctgaatccttgcctgtgtctgacgggaccactactaaaaacctaaaaatatctgtgaatggagcaagttcaggggtcttatggaggtggcccggcccctccccgctcccttccactctgcacgaggccgccacaccggcgctggctccctgcccggcccggccctccctggcaatccctgggctctcttgcacccctaactgccccctgcctgctccggcactgccccaggcccagctcctggccctaggtccctcccagccccatgtgcctgccgcctgccctccacacatccctgtccccccaacccgggaacccctgccctcctccagcaggccgcaccgcccctggggccccctgccagccccttcccaggctgggagacggcagaagagatagaatcagggctgcccccacagagtgggacccaaggggctaattggaggcacgaggggacccctccccagggccttttcctcctctgcgtcttccatctactgaaatgggagagggggtggggagcttctgttctggtgaagggacccgggcaggcccccagcaccccatgctgacttggagaaccccagatctctggggcccagccaggcagggtgtgggggcagctgtgccaatctacctcacaggcccaccccctgccgggcatgccgtgggatcatgggcagggaaggctctgggggtcggagacaccgctgcttagcacccccagccagaacaccctgagggtctcggggctctggagagagtggggcgggaggaagaattggcaccttcctagggaaggagacgagcgcttcgccttgattcttccccgaccccaccccccaaaaaagctacttcttcattccgtggtacgattattttttttaactaaaggaagataaaatcctaaagcgtcaccaccctcttatatctattggtgacccattctactggcctaagattacaaacctacaacctgtcaaaccctgggtttcccacttaatcgctttgtcccatcccgttttcgagttgccaatacgtaacagcccccccgtctccttctaaacgtcgcc

SEQ ID NO: 420130 - DNA, 1127 bp, Homo sapiens
  misc_feature (990)..(990): n is a, c, g, or t
  misc_feature (996)..(996): n is a, c, g, or t
  misc_feature (1000)..(1000): n is a, c, g, or t
  misc_feature (1006)..(1006): n is a, c, g, or t
agtgtcaggaagaggaagagcgcggccggcggcgctgcgctgagagcaggggcccggccaaggcgagtgccgcgcgggccaccatggccacggacgagctggccaccaagctgagccggcggctgcagatggagggcgagggcggcggcgagaccccggagcagcccgggctgaacggggcagcggcggcggcggcgggggcacccgacgaggcggccgaggcgctgggcagcgcggactgcgagctgagcgccaagctgctgcggcgcgcagacctcaaccagggcatcggcgagccccagtcgcccagccgccgcgtcttcaacccctacaccgagttcaaggagttctccaggaagcagatcaaggacatggagaagatgttcaagcagtatgatgccgggcgggacggcttcatcgacctgatggagctaaaactcatgatggagaaacttggggcccctcagacccacctgggcctgaaaaacatgatcaaggaggtggatgaggactttgacagcaagctgagcttccgggagttcctcctgatcttccgcaaggcggcggccggggagcttcaggaggacagcgggctgtgcgtgctggcccgcctctctgagatcgacgtctccagtgagggtgtcaagggggccaagagcttctttgaggccaaggtccaggccatcaacgtgtccagccgcttcgaggaggagatcaaggcagagcaggaggaaaggaagaagcaggcggaggagatgaagcagcggaaagcggccttcaaggagctgcagtccacctttaagtagcgggggctgcagccgaccgccctgctccggccccagtgtggtgggcgagggtggcgcatgggaggccgagcctgaatccttgcctgtgtctgacgggaccactactaaaaacctaaaaatatctgtgaatggaaaaaaaaaaacaaaacaaaaaaaaaacaaaaaaaaacaaaaaaaaaacaanagaaanaaanaaaaanaaaaagacaaacaaagagaaaacacaaataacacaaagagaacacataggaaccccaaacacaagcaatactagcacacagggcgcgcggggcgcgggcggagcactgtactcacatcagc

SEQ ID NO: 420131 - DNA, 1522 bp, Homo sapiens
gcatgttgttggtcagggtttcagaatacgcgtgatgtcactgagaatgtttgctcacagtcaataattgtctttgtggatgtgataattttggagatacacttctggtcagaactcaggtgagataatcttgcaatactccaaatgcagatactccagccacccgcaaggttccaggaaaggacaatgtcctgcgagaaaatcaggaggcctccacttcctgggccacttgagaagttcctgggcatgtcactacatgttggttgactcagccatttctcatgctgttttgtttcttgcggtggccacttaaccccaaagaatgaagggaggatccacagtgaaagtgcctgagtttctctatgagaccagatgctgtcgaaaccaaacatcttttcctttgctctatgggaacattttagggtttgttttgcacagctggtttccagactagaagattaacaagtttgggtccacccctaagaatcagtggctgtcttttaaggtgaggagtgtgggcttaactgaggtcctttgagggagctataaaggagaaacaacctgggacatcccagttttcctattcctccactgttaatatctcatctaaaataattcatgagtttaaatggtaaatatatgctttaagctctacctttaaacttgtatgttattcaggcatctcttattaagatactgggtctctggatacccaaggaaatgttggctttttattcttatgtggttccaaatttacttctcttcagtttaattgtccatggtagtgctggcttcattgttaggttggagttattattttccttttagaacaacatgaattttattcaccttactattagaaaaaggaataactacagccagaaataacttcatttcctacaaggtataaaaagtggtcaagtgaatgtgaaggggcttttctacacaggaatatattatcgggaacaaagtatttcctgctgccttaactctttgggatgcataggataaaatgataaagaccattttaatatcagaaagggttgtcttattaatttttaaataaaacttcacatttcttaatggggagctcattcagaaactaaataatggtttctcaaagtgtggtcaggatacgatctgcatcagaatccttggaatgcttgttaaaaataccaattgctatgacaaaaccaagtctgctggaaactgcatttcagcaggtttcccatgttattctgatgtattttaacatttgagagccactaccaatcatctgtacagttcctactgttatgatcacaataagactaacatgaatttaataatctgaataatttttaaaatttaaataaacagaaattgaagttaaatttaaaaataaaaataacctcagaagttgaaaaaaaaattcgtctctctctactattgttcgtatatgtatagcagttacaaaaacctctcggggggggcccgggtcccaatttccccctttagggagcgtttttcacatgaacttgcc

SEQ ID NO: 420132 - DNA, 3510 bp, Homo sapiens
agcctccggtgtacctcgctgggaacgcacttcctgggacgctgagagggagacgctccaagaggctcctcagtgtgggcgagtaaaatgccctgcgtgtgagaagcaggctcagattattgctactctgtattcagatcttcatgtgtctcttctaagctgaataaagctgttttggaactgtcaggtacctcaaagctctgactgacagtactccacaagcttgcctgccatgggctgtcgggatgtccacgcagccacagtcctttccttcctgtgtggaatcgcctcagtagcaggcctctttgcagggactctgcttcccaactggagaaaattacgattgatcacattcaacagaaacgagaagaacctgactgtttacacaggcctgtgggtgaaatgtgcccggtatgacgggagcagtgactgcctgatgtacgacactacttggtactcatcagttgaccagctggacctgcgtgtcctccagtttgccctacccctcagcatgctgatcgccatgggtgccctgctgctctgcctgattggaatgtgcaacactgccttcaggtcctcggtgcccaacatcaaactggccaagtgtctggtcaatagtgcaggttgccacctggtggctgggctgctatttttcctggcaggtactgtgagcctctccccatctatctgggtcatcttttataacatccatctgaacaagaagtttgagccagtcttttcatttgactatgcagtgtatgtcactattgctagtgctgggggcctgtttatgacttcccttatactatttatttggtattgtacatgcaaatctttgccttctcctttctggcaaccattgtactcccatccacccagtatgcatacttactcacagccctattcagcacgctctcgcctctctgccattgaaattgacattccagtagtttcacacaccacttaatggggaaatagttaattgttaaagaaaacttcttgtagcctcacattccccttgtgcaaagagctcttttggacctacatacattttcctttgtttttgaccaatcaatgaagccaaatttatatgtcctagtagaatgaagtgctgctagtttttatgagaagtatattatattaaatgtgaattttttaaattttgcttcttatactggaaggaattttagccttcatattgatatctaattaattatttaagtggaagaggcctgcatcacaattgaggtaatgtagagcaacatgttaaagaatgatggttagcagaagctgttgtatacaatcttcatgaaaatttcagtgtgtatttttctttttctataatacctttaactgcaaagaaaaggcagtttcaaatataagaaatttatttcaggtaagggtaatattttaatagtagtcaataatctagcttaaggctgtaactcttctatcggggctaattgtatgaataggtgtcagtatgttgaagattactttcttttgtgactttcttctacctcatgccactgtttaaaagtaaaatgtattttaatgatgttagaataagactaccattctaaatatcacctacttatgaataacatgtaataatttttaacattaatgattccataaattgtattattgggattagaatgtgctttatgacaggttagtgtttcctctgaggcagaaaactcttttttggagatatcttccatcaagcagtactcgtgcccatatacaatctcttagtggctaggagaaataaataaaagggccataatggtttgttctctttcagacataatttagtaggggacaagaagtctgttcttcagtgagtacactagagatttactctggtgactgccttttgagttatgggtgaagtaaggtatggctttaccataaccttgattcattcacccttgattcatttctcgcccccgtcactgattatttccttgagcatatatctctgcctaacactttagtaggtgctatagaggatacatgaaaagtatgagatctggttccatccagtaagacattttaatagagaagatcaaaatgttacctggcagttggggaataatctgacttcgttggcagttggccttaacttcttaatcattgatccaggaatatttcaaccagagacacaactttctggcagacagacaaattgtacaacaccaacaatatcctggaccttgaaattctgtttacttcagtccattgtatcctttaaggcacctgtgctagcctagattttgtaataacactgatttatgagaatggacaaaagtggtagggaaattgttccctctccacttctgaaagtatgatgatgtattaaggatggaggagttattaaaaatgtctcttctgatgaggtaacaattagatgaaaccatgttaaagctgagatgaacacttagaaattcagggatattgggtctttagccttatgaatttgagctgcttatttaattggtgtaatttactacatattagtactatattcgtaaggattttttattaaccattacagattttacaaacagctagttatatggtaaacagattattatgcctttttgcaattctgaatatgattctagtatttgtgtagatgtatttggtactttttcccctaattccaacactagtttatatatatagcgaataaatctagttgtataaatttttaaatgccgtcagtagaaagcacacaaggttatgatttttttaattactggcttctgatttctttcacttctgatccttttcctttttctcagatgtagctgagtcttgatcattttaagacaacgatgggtagaattttgagattaatgttaattttccctttttgttaatttcagtcccctctcactatgcttttgtccagaaggatcaagaattctaccatcccttgggtctttgtgtataaacaatgttaaataaaggtagactcagtctttaagatattagacagtttttttagtccatgggattgtaaatataaacattaactttcctataagaatattttggctttgtaatctatagcctcaaattggtatttattatggattcactagacaaacagctgtttccttattgtcttttttctttagtgtttctgatttgctatcagtagctgtttttaaagccatccaaggaaaataattatttacagtttttgaagtcacttttgagccctcatcaagctctcattgtgatgggagggatacctttttgttgttaaaagcctattattgttaaaggccttttatggaaaccaacttggaaaacaaccttaaatgtggatgtatcagatttggtttatccagccatgggagagaaaacaaacctaagtttactttacttgtacatatacactacaatggatagtatatttgctgtaaactacaatgtaaaacctcaataaaagtgcgctgtacttcttaatgtttattaaaagatgtatttttacaa

SEQ ID NO: 420133 - DNA, 438 bp, Homo sapiens
agcctccggtgtacctcgctgggaacgcacttcctgggacgctgagagggagacgctccaagaggctcctcagtgtgggcgagtaaaatgccctgcgtgtgagaagcaggctcagattattgctactctgtattcagatcttcatgtgtctcttctaagctgaataaagctgttttggaactgtcaggtacctcaaagcaatgtgctgtaaagaagagttgtcaattgtgcacagaagataagaaatatatgatgaatagataattgaaaagagatcctccagaaagagcagaaggaagtttcttcaatggcttccttcaggattttaatcatccttacagcctctttgagaatgattgaacttccaaattccctgaagttaaaattttaaattctattaaacattttttcgagtatttcattacttttacattatga

SEQ ID NO: 420134 - DNA, 389 bp, Homo sapiens
ctttttgtcaattacatgttgatagtaccttaagtcacttgagccctaaatattaaaatagcaacagtattaaaatctcagaaatctttttattattcatgaatgtttcatgtttaacattttaaaaattacgtaagtttttattgacttttcctagatagaatttgaaaagataaatttattttctcttctcatagtatatgatgaatagataattgaaaagagatcctccagaaagagcagaaggaagtttcttcaatggcttccttcaggattttaatcatccttacagcctctttgagaatgattgaacttccaaattccctgaagttaaaattttaaattctattaaacattttttcgagtatttcattacttttacattatga

SEQ ID NO: 420135 - DNA, 711 bp, Homo sapiens
agcctccggtgtacctcgctgggaacgcacttcctgggacgctgagagggagacgctccaagaggctcctcagtgtgggcgagtaaaatgccctgcgtgtgagaagcaggctcagattattgctactctgtattcagatcttcatgtgtctcttctaagctgaataaagctgttttggaactgtcaggtacctcaaagcgtaagtacgtcctttaattatatcttatttccctccctcctgctaccacatctgccaacaatgactctttttttttctcttgttcaacaaaatagaggtataggacagacctctcttgtgagtacaatgactgatgacttacagtttctaagaaaacccaaattataggtagaaggaactctcaatgttaccatcaagaattaagttagggctgggcatggtggctcagccctgtaaccctagcgctttgagaggctgaggtggaaggatcccttgagcccaggagtttgagaccatcctgggcaacatagcgagatcctgactgtatgagaaaattttaaaaaattagccagttgtggtggtacatgcctatagtcccagctactctggaagctgaggtgggaggattgcttgagcctcggaggtcgaggctgcagtgagccatgattgtgtcattgcactctagcctgggcaacagagtaagacttgtttcaaaaaaaaaagaaagaaaa

SEQ ID NO: 420136 - DNA, 695 bp, Homo sapiens
tgctgttctcatgatagtgagtaagttattacaagatctgatggttttataaagggttattccttctttgctcagcacttcttcctgctgccatgtgaagaagaacatatttgcttccccttctgccataactcggaaaggtcagccccccgctgcaagttcttagattcctggaggatctgcagagtcaacattaggagtatccatccattcaccaaggccatcaggaatgtgctgccccaggaacaatcagaaaccaagagatgggaatgaagagggtgagtgatctggagtcctgaggtgggtgccccacatgctccagcgttttttttccttttaatggtgccatcctggtgcactggaattttcatctcaaaagttgtcatttggtgttggtgggaagacattttaaaggttctagatggttttggtgaaactcagttaaattggactcagattaatttggtttatctgaaatatgaaaggtagattcaaagttttaaatttgaggaaaagcatggtttctcccccatcactttctgcatgacctatgacatataagctttttgttgtgaataagccattgggttttgttctaatcagacccactcaatggtcatagttcctctttcttaagttttttaaggtcttagttaataaaatgctttatttgttctttttcataaaaaaattac

SEQ ID NO: 420137 - DNA, 3719 bp, Homo sapiens
agcctccggtgtacctcgctgggaacgcacttcctgggacgctgagagggagacgctccaagaggctcctcagtgtgggcgagtaaaatgccctgcgtgtgagaagcaggctcagattattgctactctgtattcagatcttcatgtgtctcttctaagctgaataaagctgttttggaactgtcaggtacctcaaagctctgactgacagtactccacaagcttgcctgccatgggctgtcgggatgtccacgcagccacagtcctttccttcctgtgtggaatcgcctcagtagcaggcctctttgcagggactctgcttcccaactggagaaaattacgattgatcacattcaacagaaacgagaagaacctgactgtttacacaggcctgtgggtgaaatgtgcccggtatgacgggagcagtgactgcctgatgtacgacactacttggtactcatcagttgaccagctggacctgcgtgtcctccagtttgccctacccctcagcatgctgatcgccatgggtgccctgctgctctgcctgattggaatgtgcaacactgccttcaggtcctcggtgcccaacatcaaactggccaagtgtctggtcaatagtgcaggttgccacctggtggctgggctgctatttttcctggcaggtactgtgagcctctccccatctatctgggtcatcttttataacatccatctgaacaagaagtttgagccagtcttttcatttgactatgcagtgtatgtcactattgctagtgctgggggcctgtttatgacttcccttatactatttatttggtattgtacatgcaaatctttgccttctcctttctggcaaccattgtactcccatccacccagtatgcatacttactcacagccctattcagcacgctctcgcctctctgccattgaaattgacattccagtagtttcacacaccacttaatggggaaatagttaattgttaaagaaaacttcttgtagcctcacattccccttgtgcaaagagctcttttggacctacatacattttcctttgtttttgaccaatcaatgaagccaaatttatatgtcctagtagaatgaagtgctgctagtttttatgagaagtatattatattaaatgtgaattttttaaattttgcttcttatactggaaggaattttagccttcatattgatatctaattaattatttaagtggaagaggcctgcatcacaattgaggtaatgtagagcaacatgttaaagaatgatggttagcagaagctgttgtatacaatcttcatgaaaatttcagtgtgtatttttctttttctataatacctttaactgcaaagaaaaggcagtttcaaatataagaaatttatttcaggtaagggtaatattttaatagtagtcaataatctagcttaaggctgtaactcttctatcggggctaattgtatgaataggtgtcagtatgttgaagattactttcttttgtgactttcttctacctcatgccactgtttaaaagtaaaatgtattttaatgatgttagaataagactaccattctaaatatcacctacttatgaataacatgtaataatttttaacattaatgattccataaattgtattattgggattagaatgtgctttatgacaggttagtgtttcctctgaggcagaaaactcttttttggagatatcttccatcaagcagtactcgtgcccatatacaatctcttagtggctaggagaaataaataaaagggccataatggtttgttctctttcagacataatttagtaggggacaagaagtctgttcttcagtgagtacactagagatttactctggtgactgccttttgagttatgggtgaagtaaggtatggctttaccataaccttgattcattcacccttgattcatttctcgcccccgtcactgattatttccttgagcatatatctctgcctaacactttagtaggtgctatagaggatacatgaaaagtatgagatctggttccatccagtaagacattttaatagagaagatcaaaatgttacctggcagttggggaataatctgacttcgttggcagttggccttaacttcttaatcattgatccaggaatatttcaaccagagacacaactttctggcagacagacaaattgtacaacaccaacaatatcctggaccttgaaattctgtttacttcagtccattgtatcctttaaggcacctgtgctagcctagattttgtaataacactgatttatgagaatggacaaaagtggtagggaaattgttccctctccacttctgaaagtatgatgatgtattaaggatggaggagttattaaaaatgtctcttctgatgaggtaacaattagatgaaaccatgttaaagctgagatgaacacttagaaattcagggatattgggtctttagccttatgaatttgagctgcttatttaattggtgtaatttactacatattagtactatattcgtaaggattttttattaaccattacagattttacaaacagctagttatatggtaaacagattattatgcctttttgcaattctgaatatgattctagtatttgtgtagatgtatttggtactttttcccctaattccaacactagtttatatatatagcgaataaatctagttgtataaatttttaaatgccgtcagtagaaagcacacaaggttatgatttttttaattactggcttctgatttctttcacttctgatccttttcctttttctcagatgtagctgagtcttgatcattttaagacaacgatgggtagaattttgagattaatgttaattttccctttttgttaatttcagtcccctctcactatgcttttgtccagaaggatcaagaattctaccatcccttgggtctttgtgtataaacaatgttaaataaaggtagactcagtctttaagatattagacagtttttttagtccatgggattgtaaatataaacattaactttcctataagaatattttggctttgtaatctatagcctcaaattggtatttattatggattcactagacaaacagctgtttccttattgtcttttttctttagtgtttctgatttgctatcagtagctgtttttaaagccatccaaggaaaataattatttacagtttttgaagtcacttttgagccctcatcaagctctcattgtgatgggagggatacctttttgttgttaaaagcctattattgttaaaggccttttatggaaaccaacttggaaaacaaccttaaatgtggatgtatcagatttggtttatccagccatgggagagaaaacaaacctaagtttactttacttgtacatatacactacaatggatagtatatttgctgtaaactacaatgtaaaacctcaataaaagtgcgctgtacttcttaatgtttattaaaagatgtatttttacaaaaaaaaaaaaaataaaaaacaaaaaaaaaacaaaacaacaccaaaacctcaaccaaacatacaaaactacacacaaacaaccaactccaccaaacatacatctagagatgcggggcccgcacctatactactacgcgtgcccctacgccactccgcctctctgccacactgcactctaccgtgcctctatacacacggaggccgacaat

SEQ ID NO: 420138 - DNA, 1429 bp, Homo sapiens
cagtccgtaccagatggaaggtctagcctcggtttccggagaatgtgtggctatatctctgtaatccagtttagaaagctggcctgcagggctgagatccttccacggcctcctcgggtaggacggctctgagtaggcttgaaattctgtttacttcagtccattgtatcctttaaggcacctgtgctagcctagattttgtaataacactgatttatgagaatggacaaaagtggtagggaaattgttccctctccacttctgaaagtatgatgatgtattaaggatggaggagttattaaaaatgtctcttctgatgaggtaacaattagatgaaaccatgttaaagctgagatgaacacttagaaattcagggatattgggtctttagccttatgaatttgagctgcttatttaattggtgtaatttactacatattagtactatattcgtaaggattttttattaaccattacagattttacaaacagctagttatatggtaaacagattattatgcctttttgcaattctgaatatgattctagtatttgtgtagatgtatttggtactttttcccctaattccaacactagtttatatatatagcgaataaatctagttgtataaatttttaaatgccgtcagtagaaagcacacaaggttatgatttttttaattactggcttctgatttctttcacttctgatccttttcctttttctcagatgtagctgagtcttgatcattttaagacaacgatgggtagaattttgagattaatgttaattttccctttttgttaatttcagtcccctctcactatgcttttgtccagaaggatcaagaattctaccatcccttgggtctttgtgtataaacaatgttaaataaaggtagactcagtctttaagatattagacagtttttttagtccatgggattgtaaatataaacattaactttcctataagaatattttggctttgtaatctatagcctcaaattggtatttattatggattcactagacaaacagctgtttccttattgtcttttttctttagtgtttctgatttgctatcagtagctgtttttaaagccatccaaggaaaataattatttacagtttttgaagtcacttttgagccctcatcaagctctcattgtgatgggagggatacctttttgttgttaaaagcctattattgttaaaggccttttatggaaaccaacttggaaaacaaccttaaatgtggatgtatcagatttggtttatccagccatgggagagaaaacaaacctaagtttactttacttgtacatatacactacaatggatagtatatttgctgtaaactacaatgtaaaacctcaataaaagtgcgctgtacttcttaatgtttattaaaagatgtatttttacaa

SEQ ID NO: 420139 - DNA, 697 bp, Homo sapiens
agcctccggtgtacctcgctgggaacgcacttcctgggacgctgagagggagacgctccaagaggctcctcagtgtgggcgagtaaaatgccctgcgtgtgagaagcaggctcagattattgctactctgtattcagatcttcatgtgtctcttctaagctgaataaagctgttttggaactgtcaggtacctcaaagcaatgtgctgtaaagaagagttgtcaattgtgcacagaagataagaaatgtgtttggtgtagtgaagaaaaagcatgcaaaaaatactgttttccctatttcggttgtcgattcagttctatatattggttaaactgtaaagttgacatgtttggaatcatgatgcttctactcattgcagtattaattacaggattcgtttggtactgctgcgcctatcacttttacctgcaggatttgaacagaaatcgtgtctatttttatggaagacgagaaacagttcctattcacgaccgcagtgctactgtatatgatgaatagataattgaaaagagatcctccagaaagagcagaaggaagtttcttcaatggcttccttcaggattttaatcatccttacagcctctttgagaatgattgaacttccaaattccctgaagttaaaattttaaattctattaaacattttttcgagtatttcattacttttacattatga

SEQ ID NO: 420140 - DNA, 605 bp, Homo sapiens
agcctccggtgtacctcgctgggaacgcacttcctgggacgctgagagggagacgctccaagaggctcctcagtgtgggcgagtaaaatgccctgcgtgtgagaagcaggctcagattattgctactctgtattcagatcttcatgtgtctcttctaagctgaataaagctgttttggaactgtcaggtacctcaaagccggaaaggtcagccccccgctgcaagttcttagattcctggaggatctgcagagtcaacattaggagtatccatccattcaccaaggccatcaggaatgtgctgccccaggaacaatcagaaaccaagagatgggaatgaagagggtgagtgatctggagtcctgagaatgtgctgtaaagaagagttgtcaattgtgcacagaagataagaaatatatgatgaatagataattgaaaagagatcctccagaaagagcagaaggaagtttcttcaatggcttccttcaggattttaatcatccttacagcctctttgagaatgattgaacttccaaattccctgaagttaaaattttaaattctattaaacattttttcgagtatttcattacttttacattatga

SEQ ID NO: 420141 - DNA, 542 bp, Homo sapiens
agcctccggtgtacctcgctgggaacgcacttcctgggacgctgagagggagacgctccaagaggctcctcagtgtgggcgagtaaaatgccctgcgtgtgagaagcaggctcagattattgctactctgtattcagatcttcatgtgtctcttctaagctgaataaagctgttttggaactgtcaggtacctcaaagccggaaaggtcagccccccgctgcaagttcttagattcctggaggatctgcagagtcaacattaggagtatccatccattcaccaaggccatcaggaatgtgctgaatgtgctgtaaagaagagttgtcaattgtgcacagaagataagaaatatatgatgaatagataattgaaaagagatcctccagaaagagcagaaggaagtttcttcaatggcttccttcaggattttaatcatccttacagcctctttgagaatgattgaacttccaaattccctgaagttaaaattttaaattctattaaacattttttcgagtatttcattacttttacattatga

SEQ ID NO: 420142 - DNA, 438 bp, Homo sapiens
agcctccggtgtacctcgctgggaacgcacttcctgggacgctgagagggagacgctccaagaggctcctcagtgtgggcgagtaaaatgccctgcgtgtgagaagcaggctcagattattgctactctgtattcagatcttcatgtgtctcttctaagctgaataaagctgttttggaactgtcaggtacctcaaagcagatggggtctcgctatgttgcccaatctggtctcaaactcctgggctcaagctatcctcccaccgcagcctccccaagtgctggaattacaggcatgagccacagcacctggcctggaatttattaataatggagttatacatcctgatcttgtttctcactccatttacatttcaggaatcagtgttacagggcagtttgattggagaaatctcaattacattgaaattccaattat

SEQ ID NO: 420143 - DNA, 3456 bp, Homo sapiens
agcctccggtgtacctcgctgggaacgcacttcctgggacgctgagagggagacgctccaagaggctcctcagtgtgggcgagtaaaatgccctgcgtgtgagaagcaggctcagattattgctactctgtattcagatcttcatgtgtctcttctaagctgaataaagctgttttggaactgtcaggtacctcaaagctctgactgacagtactccacaagcttgcctgccatgggctgtcgggatgtccacgcagccacagtcctttccttcctgtgtggaatcgcctcagtagcaggcctctttgcagggactctgcttcccaactggagaaaattacgattgatcacattcaacagaaacgagaagaacctgactgtttacacaggcctgtgggtgaaatgtgcccggtatgacgggagcagtgactgcctgatgtacgacactacttggtactcatcagttgaccagctggacctgcgtgtcctccagtttgccctacccctcagcatgctgatcgccatgggtgccctgctgctctgcctgattggaatgtgcaacactgccttcaggtcctcggtgcccaacatcaaactggccaagtgtctggtcaatagtgcaggttgccacctggtggctgggctgctatttttcctggcaggtactgtgagcctctccccatctatctgggtcatcttttataacatccatctgaacaagaagtttgagccagtcttttcatttgactatgcagtgtatgtcactattgctagtgctgggggcctgtttatgacttcccttatactatttatttggtattgtacatgcaaatctttgccttctcctttctggcaaccattgtactcccatccacccagtatgcatacttactcacagccctattcagcacgctctcgcctctctgccattgaaattgacattccagtagtttcacacaccacttaatggggaaatagttaattgttaaagaaaacttcttgtagcctcacattccccttgtgcaaagagctcttttggacctacatacattttcctttgtttttgaccaatcaatgaagccaaatttatatgtcctagtagaatgaagtgctgctagtttttatgagaagtatattatattaaatgtgaattttttaaattttgcttcttatactggaaggaattttagccttcatattgatatctaattaattatttaagtggaagaggcctgcatcacaattgaggtaatgtagagcaacatgttaaagaatgatggttagcagaagctgttgtatacaatcttcatgaaaatttcagtgtgtatttttctttttctataatacctttaactgcaaagaaaaggcagtttcaaatataagaaatttatttcaggtaagggtaatattttaatagtagtcaataatctagcttaaggctgtaactcttctatcggggctaattgtatgaataggtgtcagtatgttgaagattactttcttttgtgactttcttctacctcatgccactgtttaaaagtaaaatgtattttaatgatgttagaataagactaccattctaaatatcacctacttatgaataacatgtaataatttttaacattaatgattccataaattgtattattgggattagaatgtgctttatgacaggttagtgtttcctctgaggcagaaaactcttttttggagatatcttccatcaagcagtactcgtgcccatatacaatctcttagtggctaggagaaataaataaaagggccataatggtttgttctctttcagacataatttagtaggggacaagaagtctgttcttcagtgagtacactagagatttactctggtgactgccttttgagttatgggtgaagtaaggtatggctttaccataaccttgattcattcacccttgattcatttctcgcccccgtcactgattatttccttgagcatatatctctgcctaacactttagtaggtgctatagaggatacatgaaaagtatgagatctggttccatccagtaagacattttaatagagaagatcaaaatgttacctggcagttggggaataatctgacttcgttggcagttggccttaacttcttaatcattgatccaggaatatttcaaccagagacacaactttctggcagacagacaaattgtacaacaccaacaatatcctggaccttgaaattctgtttacttcagtccattgtatcctttaaggcacctgtgctagcctagattttgtaataacactgatttatgagaatggacaaaagtggtagggaaattgttccctctccacttctgaaagtatgatgatgtattaaggatggaggagttattatgaacacttagaaattcagggatattgggtctttagccttatgaatttgagctgcttatttaattggtgtaatttactacatattagtactatattcgtaaggattttttattaaccattacagattttacaaacagctagttatatggtaaacagattattatgcctttttgcaattctgaatatgattctagtatttgtgtagatgtatttggtactttttcccctaattccaacactagtttatatatatagcgaataaatctagttgtataaatttttaaatgccgtcagtagaaagcacacaaggttatgatttttttaattactggcttctgatttctttcacttctgatccttttcctttttctcagatgtagctgagtcttgatcattttaagacaacgatgggtagaattttgagattaatgttaattttccctttttgttaatttcagtcccctctcactatgcttttgtccagaaggatcaagaattctaccatcccttgggtctttgtgtataaacaatgttaaataaaggtagactcagtctttaagatattagacagtttttttagtccatgggattgtaaatataaacattaactttcctataagaatattttggctttgtaatctatagcctcaaattggtatttattatggattcactagacaaacagctgtttccttattgtcttttttctttagtgtttctgatttgctatcagtagctgtttttaaagccatccaaggaaaataattatttacagtttttgaagtcacttttgagccctcatcaagctctcattgtgatgggagggatacctttttgttgttaaaagcctattattgttaaaggccttttatggaaaccaacttggaaaacaaccttaaatgtggatgtatcagatttggtttatccagccatgggagagaaaacaaacctaagtttactttacttgtacatatacactacaatggatagtatatttgctgtaaactacaatgtaaaacctcaataaaagtgcgctgtacttcttaatgtttattaaaagatgtatttttacaa

SEQ ID NO: 420144 - DNA, 1756 bp, Homo sapiens
tcggaacacacagatgggcacacctctgtccagagtgttattgagaagttgcaggaagaaaatcgactgttaaaacagaaggtgactcacgttgaagacctcaatgccaagtggcagcgctacaacgccagcagggacgaatacgtgagggggctccatgcgcagctcagggggctgcagatcccccacgagcccgagctgatgaggaaggagatctcccggctcaacagacagttggaagagaaaataaatgactgtgccgaagtgaagcaggagctggcggcctccaggacggcccgggatgctgcgttggagcgggtgcagatgctggaacagcagattctcgcttacaaggatgacttcatgtcagaaagggccgatcgggaacgggctcaaagtaggattcaagaactggaggaaaaggtcgcctctttgctgcaccaggtgtcctggagacaggattctcgagagccagacgccggccggattcacgctgggagcaaaactgccaagtatttggccgccgacgcattagagcttatggtgcctggtggctggaggcctgggactgggtcccagcagccagaaccccctgcagagggcgggcatcctggcgcggtccagagaggccagggggaccttcagtgccctcactgcctgcagtgcttcagtgacgagcaaggggaagagctcctcaggcatgtggccgagtgctgccagtgaccgagactcacccgtgcccttgcggcctcctggcccggtgcagctgccctcagggacagggtgggtgctctcagatgccatgggttgagctctactgagagccaaggcccctagaatagttgcggggcactctgatcgttcactttggtccctttggctatggaacaggctgggtcacagggaactgccagtgaggctggaggctggaggtggagatggggtcaggaacatctggcagagggaggtcccagtctgtgtctccatcaggcttaagccagagctatctggtgctggtgtgccagcccctcccccagcctgcctagaaaggggtggctgcctgagggagtcacttgtatggtccccagggtgggagccccatcctgttctatggaataaagcgtcgcctctctgcctcgaaccagtcaaatggagtattgcggctgcacgtcacactagggtggccacccccgccattgcgagccacatgtctgcactgagaaactgcatttcagtagcatttgtcatccagccggaagttaaagcacacttactttattcacctatttttataataaacgttcttgctgctgtgactgctctgagaatttgtgttggaagctggggtgcagggactgaacagtatttacagcagctggcatgggaaaacactcctgctgttgccttctgccagggcaccaagacaagggggtcagtgggagcctggctgtattagggttctctagagggacagaactaatggaacagatagatatataaaggggagtgtgtcaagtattaactcacacgatcacaagttcccacaataggccgtctgcaggctgaggaacaaggagagccagtcccgagttccgaaactgaagaacttgggagtcctatgttcaagggcaggaagcatccagcacggagcaagatgtaggctgggaggccaggccagtctctcttttcacatttttctgcctgctttattctggccacgctggcagctgattagatggtgcccaccccgattgag

SEQ ID NO: 420145 - DNA, 1410 bp, Homo sapiens
tcggaacacacagatgggcacacctctgtccagagtgttattgagaagttgcaggaagaaaatcgactgttaaaacagaaggtgactcacgttgaagacctcaatgccaagtggcagcgctacaacgccagcagggacgaatacgtgagggggctccatgcgcagctcagggggctgcagatcccccacgagcccgagctgatgaggaaggagatctcccggctcaacagacagttggaagagaaaataaatgactgtgccgaagtgaagcaggagctggcggcctccaggacggcccgggatgctgcgttggagcgggtgcagatgctggaacagcagattctcgcttacaaggatgacttcatgtcagaaagggccgatcgggaacgggctcaaagtaggattcaagaactggaggaaaaggtcgcctctttgctgcaccaggtgtcctggagacaggattctcgagagccagacgccggccggattcacgctgggagcaaaactgccaagtatttggccgccgacgcattagagcttatggtgcctggtggctggaggcctgggactgggtcccagcagccagaaccccctgcagagggcgggcatcctggcgcggtccagagaggccagggggaccttcagtgccctcactgcctgcagtgcttcagtgacgagcaaggggaagagctcctcaggcatgtggccgagtgctgccagtgaccgagactcacccgtgcccttgcggcctcctggcccggtgcagctgccctcagggacagggtgggtgctctcagatgccatgggttgagctctactgagagccaaggcccctagaatagttgcggggcactctgatcgttcactttggtccctttggctatggaacaggctgggtcacagggaactgccagtgaggctggaggctggaggtggagatggggtcaggaacatctggcagagggaggtcccagtctgtgtctccatcaggcttaagccagagctatctggtgctggtgtgccagcccctcccccagcctgcctagaaaggggtggctgcctgagggagtcacttgtatggtccccagggtgggagccccatcctgttctatggaataaagcgtcgcctctctgcctcgaaccagtcaaatggagtattgcggctgcacgtcacactagggtggccacccccgccattgcgagccacatgtctgcactgagaaactgcatttcagtagcatttgtcatccagccggaagttaaagcacacttactttattcacctatttttataataaacgttcttgctgctgtgaaaacaaaaaaaaacccgggtcctttgggggggaaaggtgtggagcctgtctcgggcccgccctttgtacaggacgggcccaaggggaagacgtg

SEQ ID NO: 420146 - DNA, 405 bp, Homo sapiens
agatctcccggctcaacagacagttggaagagaaaataaatgactgtgccgaagtgaagcaggagctggcggcctccaggacggcccgggatgctgcgttggagcgggtgcagatgctggaacagcaggtgtctgtccctcgggctccggacggcactgaccagatgtctgctggccggtggtggccgaaatcatgggacaggctgggctgaaggcttggtggcactgagtgggcagtggtcacggtgggggtgggagaagcctggtggggcgcttcctccttccttgagcagaaatgtgtgtctcgcctctcttcagattctcgcttacaaggatgacttcatgtcagaaagggccgatcgggaacgggctcaaagtaggattcaagaactggaggaaaaggtc

SEQ ID NO: 420147 - DNA, 623 bp, Homo sapiens
cccagcggagttcctgggtgtttcatgggagcacccgccctgtcccctggaggaacacactgagggttggtgggcaggtgacccaaagatatggatccccctgacttggtcgacattgcttccccctttctgcaacccctgaaaaggggccctagcctaacttccacctagatgtgtacctgtagcatgaagtgccaggtactgtttctggggaatattcttttgggtgtgaggtggcagacaggcctgcccccatggggaaccctcggcctgagaaccaagcactgggcagcttcagtctgtgggcccagaggcttctcaactttcacccagtcccttccaaaggccacgtgggccagaagactctgcctcagaccctcctgggcccgcagctgaaccctgatcctcatgccacattcgagggtcaggaggcatccagaaacaaggactggaagggcctcagaggtcatctagatagtccagcttttccatcccattttatagatgaggaaatttgaggcccaaagacatgcaatgaactagttcccacgcccgtgtccctgccgcaactatgagggaagacacgtggggcctgtgctacccagttgcctgagcccagcgcc

SEQ ID NO: 420148 - DNA, 906 bp, Homo sapiens
aagtgtggccacttcctcttgcctgtcctgactcaccctggctgctgcccattgtggctgccatggaaatacaactcgaggagaacccagaccaggacagggaggccatgttctgggtggcagtggagcctggcaaggtgccctcctggcctgggactgctgtggcagaggaagcatgaggtggggcctggcctgcccagctcagagctgaggtgcccccttggttttttacctccctgctccctggctggcccactgcacccacgcactcaacgcagtggcttcgctcctcctccaggatggctggaggtgggaccattgccaggatggcctcaagtgcccagccctcctggaagactcagtttccctctttgtcccatgcagaggtgcagagattcattattgtaagtggggtgacaacatggtgaggggttggagtgtgggctctggggtagaatcctgacctggttactcctggctgcgagacttggggcaaggtatttaactcctctgtacttcaatcccctcctctgcaaaataacagtccctacttcataggattgttgtgaggatggcatggcacctgggccagctctctgctatagggtttgtgcccaacctggagcctggctgaatgcaaagcgttcggggactttcccgcaacgtcttaagctgttgagtgctgtgcacacgtaaagcacaatcattgtggacagtcagtgtggtcagagtgagaggataatctatcttgggattctcaaatgactagtatcagcagatcctggctacaattcacagatgtttcccctgtggaagctgggttttcatccttgcctttcctgttcatccttcctctttagttattttgcacatgcacacaggttcaccatacacaaaggtagcatg

SEQ ID NO: 420149 - DNA, 3139 bp, Homo sapiens
  misc_feature (1)..(1): n is a, c, g, or t
  misc_feature (4)..(4): n is a, c, g, or t
ngcncggccgcggcccggcccctgcggcccgcgcggagcggacgcgcgtggcgctgcccggtgggaccatccgtgaagccggtgccaggatgcaccgggggtgtggatgaccggccgcccagccccagcacggcccggtcccgcatgccaccgccccgcgaggaccgctctccaagggctgcctggggccccgcgcccgtactctcctaacccggagctctcggcagcccattgctgcctggctacccggggaggaggaggcgcaggagtgagctgcccgagaccgcagggcaagtaagcggctgacggcggaaagaccctggggaaggggctttgcggccggctagaaacattttccccaagcggctccgcaaaatgaccagcctgttccgccggagcagcagcggcagcggcgggggtggcaccgccggggcacgcgggggcgggggaggcacggccgccccccaggagctcaacaacagccggcctgcccgccaggtgcgccgcctggagttcaaccaggccatggacgacttcaagaccatgttccccaacatggattacgacatcatcgaatgcgtgctgcgcgccaacagcggcgctgtggacgccaccatcgaccagctgctgcagatgaacctggagggcggtggcagcagcggcggcgtctatgaggacagctccgactcggaggacagcatccccccggagatcttggaaaggactttggaacctgatagctcggatgaagagcccccacctgtgtactccccgccagcctaccacatgcacgtgttcgaccggccctaccctctggctcccccgactccgcctccccgtatcgacgcgctgggctctggagcccctacaagccagagacgctatcggaactggaacccaccactgctgggcaaccttccggatgactttctccgcatcctgccccagcagctggacagcatacagggtaacgctgggggccccaagcctgggagtggagagggatgtccacctgccatggctgggccagggcccggagaccaggagagccgctggaagcagtacctggaggacgagatcgattgaaatacgaatcccagaaatctaaatccagcagcgtggctgtcggaaacgactttggcttttcctctcctgtcccaggaactggcgacgccaaccccgctgtgtctgaagatgccttattcagggacaagctgaaacacatgggaaagtccacccggaggaaactgtttgaacttgcccgagccttctcagagaagaccaaaatgaggaagtcaaagaggaaacacttgttgaagcatcagtcgctgggggctgccgcgtcaacagccaacctcctggatgatgtggagggccacgcgtgtgatgaagacttccggggcaggcgtcaggaggcacccaaggtggaggaaggcctgcgagaaggacagtaagagatgccagcagctcttccttgccagagatgatctgacccggtgggggcagctggaaagcaacactggcccccagctgaagggcccagctgcagccagacagatggtgcttgagaaccgaggcccggtgatcctccagccacagtccagcccaaccactgccactttccatgggacttagaacttcggagttgctgccttgcaattggaggaaggacctggggcccctataggcagcagccaattacagccccttttgtagccaggcgttcctatggtcaaagagtggaaatgcaggaaccaacctccctttaaaaaaaaaaaaatccagaaagcagataaaagttggaatatggaaaagggcaagatgacccccaccagaggctctttggcctgaaggtggagtctctgcctccgtccgttctctatctctcctgtcacagactctgcctgaccccctttcctcagctcccttctggtcccccttcctcagctccctccgggcacttgtgcccttcccttccatgtcctcctgtatctcagccttcccccggggctgctggcccagcacacgagccctgcacccagcctgggtgggaggtccctggccagtcccccaggaactctgaggagctatgggctactgcaaagcatctgccgactgccctgccccgtctggcctcatcaggctgctgctgttagggatgggctcactcccagcagctcccggtcacccagcagggatggggagggtggccaccctggagctggaggactctggggaggcagggtctttaatttggcagcagacaaaagccagttctggagtcacaccacagtaggggctcacaggggctctgactccccagctggactggaagccctgctgtccgagggtgggcagcggtgggtcctggagtgacccctttgagcaggtgcagggctaaagagcaaggcggaaaggccgccagcctgggtgagcgcctagggcataagggcttgctgggtgcccctgagaagggcgggtgatctgaggaggagaactctgattctaggaacgcttacacggcactgaccactgccacggggagggaggctgcccagcccgtggccccgccctggacatgggagcgcgcagaccttccggagagccgggaagcctgggcaggcacgaggcttcggcgcggctctgggaggttgggagtggcatccgatccttggccgggccctggtggcctccgtggccccaagatcacaagggcgtagcgaaggcgagccggcgatcgcacctcgtcccgcccaccctgcccggactcgcaacgccgagcttggggagggccgggacgcgcagccgccgccgagcgtgaccaagtttggaaacgcgcgcggggccgggacgctggctcggggggccctgccgaggagcggtcgccccctccgctgctccccgcgccaggcctggggccctggagggaggggggggggtctccgaggagtgcctcggtaccccagctcgagttctcgacgggtctctgagccttccccgcgccaggacccggcgcactgtgggggaagccccagccccatgtctgttgagtgttgctttgttattttttttcctcctatgtgtgggttttttcttggagctgtttcataggaattcctgtaataaacagttggtgttc

SEQ ID NO: 420150 - DNA, 3453 bp, Homo sapiens
aagtgtggccacttcctcttgcctgtcctgactcaccctggctgctgcccattgtggctgccatggaaatacaactcgaggagaacccagaccaggacagggaggccatgttctgggtggcagtggagcctggcaaggtgccctcctggcctgggactgctgtggcagaggaagcatgaggtggggcctggcctgcccagctcagagctgaggtgcccccttggttttttacctccctgctccctggctggcccactgcacccacgcactcaacgcagtggcttcgctcctcctccaggatggctggaggtgggaccattgccaggatggcctcaagtgcccagccctcctggaagactcagtttccctctttgtcccatgcagaggtgcagagattcattattgtgggaccatccgtgaagccggtgccaggatgcaccgggggtgtggatgaccggccgcccagccccagcacggcccggtcccgcatgccaccgccccgcgaggaccgctctccaagggctgcctggggccccgcgcccgtactctcctaacccggagctctcggcagcccattgctgcctggctacccggggaggaggaggcgcaggagtgagctgcccgagaccgcagggcaagtaagcggctgacggcggaaagaccctggggaaggggctttgcggccggctagaaacattttccccaagcggctccgcaaaatgaccagcctgttccgccggagcagcagcggcagcggcgggggtggcaccgccggggcacgcgggggcgggggaggcacggccgccccccaggagctcaacaacagccggcctgcccgccaggtgcgccgcctggagttcaaccaggccatggacgacttcaagaccatgttccccaacatggattacgacatcatcgaatgcgtgctgcgcgccaacagcggcgctgtggacgccaccatcgaccagctgctgcagatgaacctggagggcggtggcagcagcggcggcgtctatgaggacagctccgactcggaggacagcatccccccggagatcttggaaaggactttggaacctgatagctcggatgaagagcccccacctgtgtactccccgccagcctaccacatgcacgtgttcgaccggccctaccctctggctcccccgactccgcctccccgtatcgacgcgctgggctctggagcccctacaagccagagacgctatcggaactggaacccaccactgctgggcaaccttccggatgactttctccgcatcctgccccagcagctggacagcatacagggtaacgctgggggccccaagcctgggagtggagagggatgtccacctgccatggctgggccagggcccggagaccaggagagccgctggaagcagtacctggaggacgagaggatcgcgcttttcctgcagaacgaggagttcatgaaggagctgcaacggaaccgcgacttcctcctcgctctggagagagatcgattgaaatacgaatcccagaaatctaaatccagcagcgtggctgtcggaaacgactttggcttttcctctcctgtcccaggaactggcgacgccaaccccgctgtgtctgaagatgccttattcagggacaagctgaaacacatgggaaagtccacccggaggaaactgtttgaacttgcccgagccttctcagagaagaccaaaatgaggaagtcaaagaggaaacacttgttgaagcatcagtcgctgggggctgccgcgtcaacagccaacctcctggatgatgtggagggccacgcgtgtgatgaagacttccggggcaggcgtcaggaggcacccaaggtggaggaaggcctgcgagaaggacagtaagagatgccagcagctcttccttgccagagatgatctgacccggtgggggcagctggaaagcaacactggcccccagctgaagggcccagctgcagccagacagatggtgcttgagaaccgaggcccggtgatcctccagccacagtccagcccaaccactgccactttccatgggacttagaacttcggagttgctgccttgcaattggaggaaggacctggggcccctataggcagcagccaattacagccccttttgtagccaggcgttcctatggtcaaagagtggaaatgcaggaaccaacctccctttaaaaaaaaaaaaatccagaaagcagataaaagttggaatatggaaaagggcaagatgacccccaccagaggctctttggcctgaaggtggagtctctgcctccgtccgttctctatctctcctgtcacagactctgcctgaccccctttcctcagctcccttctggtcccccttcctcagctccctccgggcacttgtgcccttcccttccatgtcctcctgtatctcagccttcccccggggctgctggcccagcacacgagccctgcacccagcctgggtgggaggtccctggccagtcccccaggaactctgaggagctatgggctactgcaaagcatctgccgactgccctgccccgtctggcctcatcaggctgctgctgttagggatgggctcactcccagcagctcccggtcacccagcagggatggggagggtggccaccctggagctggaggactctggggaggcagggtctttaatttggcagcagacaaaagccagttctggagtcacaccacagtaggggctcacaggggctctgactccccagctggactggaagccctgctgtccgagggtgggcagcggtgggtcctggagtgacccctttgagcaggtgcagggctaaagagcaaggcggaaaggccgccagcctgggtgagcgcctagggcataagggcttgctgggtgcccctgagaagggcgggtgatctgaggaggagaactctgattctaggaacgcttacacggcactgaccactgccacggggagggaggctgcccagcccgtggccccgccctggacatgggagcgcgcagaccttccggagagccgggaagcctgggcaggcacgaggcttcggcgcggctctgggaggttgggagtggcatccgatccttggccgggccctggtggcctccgtggccccaagatcacaagggcgtagcgaaggcgagccggcgatcgcacctcgtcccgcccaccctgcccggactcgcaacgccgagcttggggagggccgggacgcgcagccgccgccgagcgtgaccaagtttggaaacgcgcgcggggccgggacgctggctcggggggccctgccgaggagcggtcgccctcagaggacccgggcaagctggcactggaagacgacaaagaaacaaaaagaaaagacagaccacagaaaacaaccgcgaggaaacacaagacaaacaagaaacagcacaaccaagaacaaagagcagcaagcggcagcc

SEQ ID NO: 420151 - DNA, 2795 bp, Homo sapiens
aagtgtggccacttcctcttgcctgtcctgactcaccctggctgctgcccattgtggctgccatggaaatacaactcgaggagaacccagaccaggacagggaggccatgttctgggtggcagtggagcctggcaaggtgccctcctggcctgggactgctgtggcagaggaagcatgaggtggggcctggcctgcccagctcagagctgaggtgcccccttggttttttacctccctgctccctggctggcccactgcacccacgcactcaacgcagtggcttcgctcctcctccaggatggctggaggtgggaccattgccaggatggcctcaagtgcccagccctcctggaagactcagtttccctctttgtcccatgcagaggtgcagagattcattattgtgggaccatccgtgaagccggtgccaggatgcaccgggggtgtggatgaccggccgcccagccccagcacggcccggtcccgcatgccaccgccccgcgaggaccgctctccaagggctgcctggggccccgcgcccgtactctcctaacccggagctctcggcagcccattgctgcctggctacccggggaggaggaggcgcaggagtgagctgcccgagaccgcagggcaagtaagcggctgacggcggaaagaccctggggaaggggctttgcggccggctagaaacattttccccaagcggctccgcaaaatgaccagcctgttccgccggagcagcagcggcagcggcgggggtggcaccgccggggcacgcgggggcgggggaggcacggccgccccccaggagctcaacaacagccggcctgcccgccaggtgcgccgcctggagttcaaccaggccatggacgacttcaagaccatgttccccaacatggattacgacatcatcgaatgcgtgctgcgcgccaacagcggcgctgtggacgccaccatcgaccagctgctgcagatgaacctggagggcggtggcagcagcggcggcgtctatgaggacagctccgactcggaggacagcatccccccggagatcttggaaaggactttggaacctgatagctcggatgaagagcccccacctgtgtactccccgccagcctaccacatgcacgtgttcgaccggccctaccctctggctcccccgactccgcctccccgtatcgacgcgctgggctctggagcccctacaagccagagacgctatcggaactggaacccaccactgctgggcaaccttccggatgactttctccgcatcctgccccagcagctggacagcatacagggtaacgctgggggccccaagcctgggagtggagagggatgtccacctgccatggctgggccagggcccggagaccaggagagccgctggaagcagtacctggaggacgagaggatcgcgcttttcctgcagaacgaggagttcatgaaggagctgcaacggaaccgcgacttcctcctcgctctggagagagatcgattgaaatacgaatcccagaaatctaaatccagcagcgtggctgtcggaaacgactttggcttttcctctcctgtcccaggaactggcgacgccaaccccgctgtgtctgaagatgccttattcagggacaagctgaaacacatgggaaagtccacccggaggaaactgtttgaacttgcccgagccttctcagagaagaccaaaatgaggaagtcaaagaggaaacacttgttgaagcatcagtcgctgggggctgccgcgtcaacagccaacctcctggatgatgtggagggccacgcgtgtgatgaagacttccggggcaggcgtcaggaggcacccaaggtggaggaaggcctgcgagaaggacagtaagagatgccagcagctcttccttgccagagatgatctgacccggtgggggcagctggaaagcaacactggcccccagctgaagggcccagctgcagccagacagatggtgcttgagaaccgaggcccggtgatcctccagccacagtccagcccaaccactgccactttccatgggacttagaacttcggagttgctgccttgcaattggaggaaggacctggggcccctataggcagcagccaattacagccccttttgtagccaggcgttcctatggtcaaagagtggaaatgcaggaaccaacctccctttaaaaaaaaaaaaatccagaaagcagataaaagttggaatatggaaaagggcaagatgacccccaccagaggctctttggcctgaaggtggagtctctgcctccgtccgttctctatctctcctgtcacagactctgcctgaccccctttcctcagctcccttctggtcccccttcctcagctccctccgggcacttgtgcccttcccttccatgtcctcctgtatctcagccttcccccggggctgctggcccagcacacgagccctgcacccagcctgggtgggaggtccctggccagtcccccaggaactctgaggagctatgggctactgcaaagcatctgccgactgccctgccccgtctggcctcatcaggctgctgctgttagggaggggggggggtctccgaggagtgcctcggtaccccagctcgagttctcgacgggtctctgagccttccccgcgccaggacccggcgcactgtgggggaagccccagccccatgtctgttgagtgttgctttgttattttttttcctcctatgtgtgggttttttcttggagctgtttcataggaattcctgtaataaacagttggtgttc

SEQ ID NO: 420152 - DNA, 3177 bp, Homo sapiens
  misc_feature (1)..(1): n is a, c, g, or t
  misc_feature (4)..(4): n is a, c, g, or t
ngcncggccgcggcccggcccctgcggcccgcgcggagcggacgcgcgtggcgctgcccggtgggaccatccgtgaagccggtgccaggatgcaccgggggtgtggatgaccggccgcccagccccagcacggcccggtcccgcatgccaccgccccgcgaggaccgctctccaagggctgcctggggccccgcgcccgtactctcctaacccggagctctcggcagcccattgctgcctggctacccggggaggaggaggcgcaggagtgagctgcccgagaccgcagggcaagtaagcggctgacggcggaaagaccctggggaaggggctttgcggccggctagaaacattttccccaagcggctccgcaaaatgaccagcctgttccgccggagcagcagcggcagcggcgggggtggcaccgccggggcacgcgggggcgggggaggcacggccgccccccaggagctcaacaacagccggcctgcccgccaggtgcgccgcctggagttcaaccaggccatggacgacttcaagaccatgttccccaacatggattacgacatcatcgaatgcgtgctgcgcgccaacagcggcgctgtggacgccaccatcgaccagctgctgcagatgaacctggagggcggtggcagcagcggcggcgtctatgaggacagctccgactcggaggacagcatccccccggagatcttggaaaggactttggaacctgatagctcggatgaagagcccccacctgtgtactccccgccagcctaccacatgcacgtgttcgaccggccctaccctctggctcccccgactccgcctccccgtatcgacgcgctgggctctggagcccctacaagccagagacgctatcggaactggaacccaccactgctgggcaaccttccggatgactttctccgcatcctgccccagcagctggacagcatacagggtaacgctgggggccccaagcctgggagtggagagggatgtccacctgccatggctgggccagggcccggagaccaggagagccgctggaagcagtacctggaggacgagaggatcgcgcttttcctgcagaacgaggagttcatgaaggagctgcaacggaaccgcgacttcctcctcgctctggagagagatcgattgaaatacgaatcccagaaatctaaatccagcagcgtggctgtcggaaacgactttggcttttcctctcctgtcccaggaactggcgacgccaaccccgctgtgtctgaagatgccttattcagggacaagctgaaacacatgggaaagtccacccggaggaaactgtttgaacttgcccgagccttctcagagaagaccgctgggggctgccgcgtcaacagccaacctcctggatgatgtggagggccacgcgtgtgatgaagacttccggggcaggcgtcaggaggcacccaaggtggaggaaggcctgcgagaaggacagtaagagatgccagcagctcttccttgccagagatgatctgacccggtgggggcagctggaaagcaacactggcccccagctgaagggcccagctgcagccagacagatggtgcttgagaaccgaggcccggtgatcctccagccacagtccagcccaaccactgccactttccatgggacttagaacttcggagttgctgccttgcaattggaggaaggacctggggcccctataggcagcagccaattacagccccttttgtagccaggcgttcctatggtcaaagagtggaaatgcaggaaccaacctccctttaaaaaaaaaaaaatccagaaagcagataaaagttggaatatggaaaagggcaagatgacccccaccagaggctctttggcctgaaggtggagtctctgcctccgtccgttctctatctctcctgtcacagactctgcctgaccccctttcctcagctcccttctggtcccccttcctcagctccctccgggcacttgtgcccttcccttccatgtcctcctgtatctcagccttcccccggggctgctggcccagcacacgagccctgcacccagcctgggtgggaggtccctggccagtcccccaggaactctgaggagctatgggctactgcaaagcatctgccgactgccctgccccgtctggcctcatcaggctgctgctgttagggatgggctcactcccagcagctcccggtcacccagcagggatggggagggtggccaccctggagctggaggactctggggaggcagggtctttaatttggcagcagacaaaagccagttctggagtcacaccacagtaggggctcacaggggctctgactccccagctggactggaagccctgctgtccgagggtgggcagcggtgggtcctggagtgacccctttgagcaggtgcagggctaaagagcaaggcggaaaggccgccagcctgggtgagcgcctagggcataagggcttgctgggtgcccctgagaagggcgggtgatctgaggaggagaactctgattctaggaacgcttacacggcactgaccactgccacggggagggaggctgcccagcccgtggccccgccctggacatgggagcgcgcagaccttccggagagccgggaagcctgggcaggcacgaggcttcggcgcggctctgggaggttgggagtggcatccgatccttggccgggccctggtggcctccgtggccccaagatcacaagggcgtagcgaaggcgagccggcgatcgcacctcgtcccgcccaccctgcccggactcgcaacgccgagcttggggagggccgggacgcgcagccgccgccgagcgtgaccaagtttggaaacgcgcgcggggccgggacgctggctcggggggccctgccgaggagcggtcgccccctccgctgctccccgcgccaggcctggggccctggagggaggggggggggtctccgaggagtgcctcggtaccccagctcgagttctcgacgggtctctgagccttccccgcgccaggacccggcgcactgtgggggaagccccagccccatgtctgttgagtgttgctttgttattttttttcctcctatgtgtgggttttttcttggagctgtttcataggaattcctgtaataaacagttggtgttc

SEQ ID NO: 420153 - DNA, 2514 bp, Homo sapiens
cccagcggagttcctgggtgtttcatgggagcacccgccctgtcccctggaggaacacactgagggttggtgggcaggtgacccaaagatatggatccccctgacttggtcgacattgcttccccctttctgcaacccctgaaaaggggccctagcctaacttccacctagatgtgtacctgtagcatgaagtgccaggtactgtttctggggaatattcttttgggtgtgaggtggcagacaggcctgcccccatggggaaccctcggcctgagaaccaagcactgggcagcttcagtctgtgggcccagaggcttctcaactttcacccagtcccttccaaaggccacgtgggccagaagactctgcctcagaccctcctgggcccgcagctgaaccctgatcctcatgccacattcgagggtcaggaggcatccagaaacaaggactggaagggcctcagaggtcatctagatagtccagcttttccatcccattttatagatgaggaaatttgaggcccaaagacgaggggagaacttgtccaaggtctcagagctcagtggtggaccctggccagcacctgagtgtcctgctgcctctctccctggacccatgcatcgtctacctggggggatctgcatgggtcccaaatgaagggggcagagagagtcgggtcagctctcttgcccagtctaggggccgtgcctgagcgaggccctgcagggtagaggatgaggcagcttccctctccttttcagatgaagacttccggggcaggcgtcaggaggcacccaaggtggaggaaggcctgcgagaaggacagtaagagatgccagcagctcttccttgccagagatgatctgacccggtgggggcagctggaaagcaacactggcccccagctgaagggcccagctgcagccagacagatggtgcttgagaaccgaggcccggtgatcctccagccacagtccagcccaaccactgccactttccatgggacttagaacttcggagttgctgccttgcaattggaggaaggacctggggcccctataggcagcagccaattacagccccttttgtagccaggcgttcctatggtcaaagagtggaaatgcaggaaccaacctccctttaaaaaaaaaaaaatccagaaagcagataaaagttggaatatggaaaagggcaagatgacccccaccagaggctctttggcctgaaggtggagtctctgcctccgtccgttctctatctctcctgtcacagactctgcctgaccccctttcctcagctcccttctggtcccccttcctcagctccctccgggcacttgtgcccttcccttccatgtcctcctgtatctcagccttcccccggggctgctggcccagcacacgagccctgcacccagcctgggtgggaggtccctggccagtcccccaggaactctgaggagctatgggctactgcaaagcatctgccgactgccctgccccgtctggcctcatcaggctgctgctgttagggatgggctcactcccagcagctcccggtcacccagcagggatggggagggtggccaccctggagctggaggactctggggaggcagggtctttaatttggcagcagacaaaagccagttctggagtcacaccacagtaggggctcacaggggctctgactccccagctggactggaagccctgctgtccgagggtgggcagcggtgggtcctggagtgacccctttgagcaggtgcagggctaaagagcaaggcggaaaggccgccagcctgggtgagcgcctagggcataagggcttgctgggtgcccctgagaagggcgggtgatctgaggaggagaactctgattctaggaacgcttacacggcactgaccactgccacggggagggaggctgcccagcccgtggccccgccctggacatgggagcgcgcagaccttccggagagccgggaagcctgggcaggcacgaggcttcggcgcggctctgggaggttgggagtggcatccgatccttggccgggccctggtggcctccgtggccccaagatcacaagggcgtagcgaaggcgagccggcgatcgcacctcgtcccgcccaccctgcccggactcgcaacgccgagcttggggagggccgggacgcgcagccgccgccgagcgtgaccaagtttggaaacgcgcgcggggccgggacgctggctcggggggccctgccgaggagcggtcgccccctccgctgctccccgcgccaggcctggggccctggagggaggggggggggtctccgaggagtgcctcggtaccccagctcgagttctcgacgggtctctgagccttccccgcgccaggacccggcgcactgtgggggaagccccagccccatgtctgttgagtgttgctttgttattttttttcctcctatgtgtgggttttttcttggagctgtttcataggaattcctgtaataaacagttggtgttc

SEQ ID NO: 420154 - DNA, 2005 bp, Homo sapiens
agaggatccccttgtctttgcgcattgtttgctgcgcgctgggcaccttgcggcatgcggcgaggtcgtcgtcactgtcctggtctggttctgtctttgtgaagcttgtagcgcgaccatcgtgggtccgtcccgtatttgtaatcttggtcgtcctgtttcctcgggtcagctctcttgcccagtctaggggccgtgcctgagcgaggccctgcagggtagaggatgaggcagcttccctctccttttcagatgaagacttccggggcaggcgtcaggaggcacccaaggtggaggaaggcctgcgagaaggacagtaagagatgccagcagctcttccttgccagagatgatctgacccggtgggggcagctggaaagcaacactggcccccagctgaagggcccagctgcagccagacagatggtgcttgagaaccgaggcccggtgatcctccagccacagtccagcccaaccactgccactttccatgggacttagaacttcggagttgctgccttgcaattggaggaaggacctggggcccctataggcagcagccaattacagccccttttgtagccaggcgttcctatggtcaaagagtggaaatgcaggaaccaacctccctttaaaaaaaaaaaaatccagaaagcagataaaagttggaatatggaaaagggcaagatgacccccaccagaggctctttggcctgaaggtggagtctctgcctccgtccgttctctatctctcctgtcacagactctgcctgaccccctttcctcagctcccttctggtcccccttcctcagctccctccgggcacttgtgcccttcccttccatgtcctcctgtatctcagccttcccccggggctgctggcccagcacacgagccctgcacccagcctgggtgggaggtccctggccagtcccccaggaactctgaggagctatgggctactgcaaagcatctgccgactgccctgccccgtctggcctcatcaggctgctgctgttagggatgggctcactcccagcagctcccggtcacccagcagggatggggagggtggccaccctggagctggaggactctggggaggcagggtctttaatttggcagcagacaaaagccagttctggagtcacaccacagtaggggctcacaggggctctgactccccagctggactggaagccctgctgtccgagggtgggcagcggtgggtcctggagtgacccctttgagcaggtgcagggctaaagagcaaggcggaaaggccgccagcctgggtgagcgcctagggcataagggcttgctgggtgcccctgagaagggcgggtgatctgaggaggagaactctgattctaggaacgcttacacggcactgaccactgccacggggagggaggctgcccagcccgtggccccgccctggacatgggagcgcgcagaccttccggagagccgggaagcctgggcaggcacgaggcttcggcgcggctctgggaggttgggagtggcatccgatccttggccgggccctggtggcctccgtggccccaagatcacaagggcgtagcgaaggcgagccggcgatcgcacctcgtcccgcccaccctgcccggactcgcaacgccgagcttggggagggccgggacgcgcagccgccgccgagcgtgaccaagtttggaaacgcgcgcggggccgggacgctggctcggggggccctgccgaggagcggtcgccccctccgctgctccccgcgccaggcctggggccctggagggaggggggggggtctccgaggagtgcctcggtaccccagctcgagttctcgacgggtctctgagccttccccgcgccaggacccggcgcactgtgggggaagccccagccccatgtctgttgagtgttgctttgttattttttttcctcctatgtgtgggttttttcttggagctgtttcataggaattcctgtaataaacagttggtgttc

SEQ ID NO: 420155 - DNA, 2128 bp, Homo sapiens
gcccctgcaggctgacccaggatgtagcctcttgctcctggggtggcgtcctcaggggtctgcgattcctgtcatctctccctcctcagctcccacccttgcctgccccctgctccctctccggggggccttggtcctcccctggcctttcccacacctgggaggaggccatctggtgtgctggctgctgagagaatgactcacaggtctctctgcccccagccacccggaggaaactgtttgaacttgcccgagccttctcagagaagaccaaaatgaggaagtcaaagaggaaacacttgttgaagcatcagtcgctgggggctgccgcgtcaacagccaacctcctggatgatgtggagggccacgcgtgtgatgaagacttccggggcaggcgtcaggaggcacccaaggtggaggaaggcctgcgagaaggacagtaagagatgccagcagctcttccttgccagagatgatctgacccggtgggggcagctggaaagcaacactggcccccagctgaagggcccagctgcagccagacagatggtgcttgagaaccgaggcccggtgatcctccagccacagtccagcccaaccactgccactttccatgggacttagaacttcggagttgctgccttgcaattggaggaaggacctggggcccctataggcagcagccaattacagccccttttgtagccaggcgttcctatggtcaaagagtggaaatgcaggaaccaacctccctttaaaaaaaaaaaaatccagaaagcagataaaagttggaatatggaaaagggcaagatgacccccaccagaggctctttggcctgaaggtggagtctctgcctccgtccgttctctatctctcctgtcacagactctgcctgaccccctttcctcagctcccttctggtcccccttcctcagctccctccgggcacttgtgcccttcccttccatgtcctcctgtatctcagccttcccccggggctgctggcccagcacacgagccctgcacccagcctgggtgggaggtccctggccagtcccccaggaactctgaggagctatgggctactgcaaagcatctgccgactgccctgccccgtctggcctcatcaggctgctgctgttagggatgggctcactcccagcagctcccggtcacccagcagggatggggagggtggccaccctggagctggaggactctggggaggcagggtctttaatttggcagcagacaaaagccagttctggagtcacaccacagtaggggctcacaggggctctgactccccagctggactggaagccctgctgtccgagggtgggcagcggtgggtcctggagtgacccctttgagcaggtgcagggctaaagagcaaggcggaaaggccgccagcctgggtgagcgcctagggcataagggcttgctgggtgcccctgagaagggcgggtgatctgaggaggagaactctgattctaggaacgcttacacggcactgaccactgccacggggagggaggctgcccagcccgtggccccgccctggacatgggagcgcgcagaccttccggagagccgggaagcctgggcaggcacgaggcttcggcgcggctctgggaggttgggagtggcatccgatccttggccgggccctggtggcctccgtggccccaagatcacaagggcgtagcgaaggcgagccggcgatcgcacctcgtcccgcccaccctgcccggactcgcaacgccgagcttggggagggccgggacgcgcagccgccgccgagcgtgaccaagtttggaaacgcgcgcggggccgggacgctggctcggggggccctgccgaggagcggtcgccccctccgctgctccccgcgccaggcctggggccctggagggaggggggggggtctccgaggagtgcctcggtaccccagctcgagttctcgacgggtctctgagccttccccgcgccaggacccggcgcactgtgggggaagccccagccccatgtctgttgagtgttgctttgttattttttttcctcctatgtgtgggttttttcttggagctgtttcataggaattcctgtaataaacagttggtgttc

SEQ ID NO: 420156 - DNA, 370 bp, Homo sapiens
cctccagagctttgaggggtggggcagagagtcagtgggactgggaggactagggcagtgtcccctcatccctgggacggttttcctgaatggcctggcaggcgctgggggctgccgcgtcaacagccaacctcctggatgatgtggagggccacgcgtgtggtgaggctggaggggagtcgtaagctccaacttctctatgatcggtgatctcccagcggagttcctgggtgtttcatgggagcacccgccctgtcccctggaggaacacactgagggttggtgggcaggtgacccaaagatatggatccccctgacttggtcgacattgcttccccctttctgcaacccctgaaaaggggccctagcc

SEQ ID NO: 420157 - DNA, 354 bp, Homo sapiens
gatgaagacttccggggcaggcgtcaggaggcacccaaggtggaggaaggcctgcgagaaggacagtaagaggtaaggcctggagccatagcaacccagggactgcccaaggccagggccccccacactatgcaccccacatgtcctcccaggtgtccagaggcgctgggctcaggcaactgggtagcacaggccccacgtgtcttccctcatagttgcggcagggacacgggcgtgggaactagttcattgcatgtcttttttggttatttattcatttgacaaaagatgagcacacctgcctatgacagatgctgagaacaggaaaacaaaatcagctttgaccttgaagag

SEQ ID NO: 420158 - DNA, 1946 bp, Homo sapiens
  misc_feature (1)..(1): n is a, c, g, or t
  misc_feature (4)..(4): n is a, c, g, or t
ngcncggccgcggcccggcccctgcggcccgcgcggagcggacgcgcgtggcgctgcccggtgggaccatccgtgaagccggtgccaggatgcaccgggggtgtggatgaccggccgcccagccccagcacggcccggtcccgcatgccaccgccccgcgaggaccgctctccaagggctgcctggggccccgcgcccgtactctcctaacccggagctctcggcagcccattgctgcctggctacccggggaggaggaggcgcaggagtgagctgcccgagaccgcagggcaagtaagcggctgacggcggaaagaccctggggaaggggctttgcggccggctagaaacattttccccaagcggctccgcaaaatgaccagcctgttccgccggagcagcagcggcagcggcgggggtggcaccgccggggcacgcgggggcgggggaggcacggccgccccccaggagctcaacaacagccggcctgcccgccaggtgcgccgcctggagttcaaccaggccatggacgacttcaagaccatgttccccaacatggattacgacatcatcgaatgcgtgctgcgcgccaacagcggcgctgtggacgccaccatcgaccagctgctgcagatgaacctggagggcggtggcagcagcggcggcgtctatgaggacagctccgactcggaggacagcatccccccggagatcttggaaaggactttggaacctgatagctcggatgaagagcccccacctgtgtactccccgccagcctaccacatgcacgtgttcgaccggccctaccctctggctcccccgactccgcctccccgtatcgacgcgctgggctctggagcccctacaagccagagacgctatcggaactggaacccaccactgctgggcaaccttccggatgactttctccgcatcctgccccagcagctggacagcatacagggtaacgctgggggccccaagcctgggagtggagagggatgtccacctgccatggctgggccagggcccggagaccaggagagccgctggaagcagtacctggaggacgagaggatcgcgcttttcctgcagaacgaggagttcatgaaggagctgcaacggaaccgcgacttcctcctcgctctggagagagatcgattgaaatacgaatcccagaaatctaaatccagcagcgtggctgtcggaaacgactttggcttttcctctcctgtcccaggaactggcgacgccaaccccgctgtgtctgaagatgccttattcagggacaagctgaaacacatgggaaagtccacccggaggaaactgtttgaacttgcccgagccttctcagagaagaccaaaatgaggaagtcaaagaggaaacacttgttgaagcatcagtcgctgggggctgccgcgtcaacagccaacctcctggatgatgtggagggccacgcgtgtgatgaagacttccggggcaggcgtcaggaggcacccaaggtggaggaaggcctgcgagaaggacagtaagagatgccagcagctcttcctcgccgccttctgccatgtaagatatgactgtgctcctccttcaccttctgccatgattgtgaggcctccacagccatgtggaactggaagctgtttttccctctttggggtctcagagagattggtggcaaggactcctgggaagagaaaagctgaaggacactctggcaagaggaaaccccgagccaaacgtatggccacctctgaccactcgaccagcccagcatggtgtacatttctgggtagcttatcacgccttccaagcattgcctttatcttccttctccccatcaagcctgtattgttttccttttgaatcataagcacttttgttaaatacctcaaatctttcgagaacagcaaggagcaaaataaacttaacttctctg

SEQ ID NO: 420159 - DNA, 3565 bp, Homo sapiens
aagtgtggccacttcctcttgcctgtcctgactcaccctggctgctgcccattgtggctgccatggaaatacaactcgaggagaacccagaccaggacagggaggccatgttctgggtggcagtggagcctggcaaggtgccctcctggcctgggactgctgtggcagaggaagcatgaggtggggcctggcctgcccagctcagagctgaggtgcccccttggttttttacctccctgctccctggctggcccactgcacccacgcactcaacgcagtggcttcgctcctcctccaggatggctggaggtgggaccattgccaggatggcctcaagtgcccagccctcctggaagactcagtttccctctttgtcccatgcagaggtgcagagattcattattgtgggaccatccgtgaagccggtgccaggatgcaccgggggtgtggatgaccggccgcccagccccagcacggcccggtcccgcatgccaccgccccgcgaggaccgctctccaagggctgcctggggccccgcgcccgtactctcctaacccggagctctcggcagcccattgctgcctggctacccggggaggaggaggcgcaggagtgagctgcccgagaccgcagggcaagtaagcggctgacggcggaaagaccctggggaaggggctttgcggccggctagaaacattttccccaagcggctccgcaaaatgaccagcctgttccgccggagcagcagcggcagcggcgggggtggcaccgccggggcacgcgggggcgggggaggcacggccgccccccaggagctcaacaacagccggcctgcccgccaggtgcgccgcctggagttcaaccaggccatggacgacttcaagaccatgttccccaacatggattacgacatcatcgaatgcgtgctgcgcgccaacagcggcgctgtggacgccaccatcgaccagctgctgcagatgaacctggagggcggtggcagcagcggcggcgtctatgaggacagctccgactcggaggacagcatccccccggagatcttggaaaggactttggaacctgatagctcggatgaagagcccccacctgtgtactccccgccagcctaccacatgcacgtgttcgaccggccctaccctctggctcccccgactccgcctccccgtatcgacgcgctgggctctggagcccctacaagccagagacgctatcggaactggaacccaccactgctgggcaaccttccggatgactttctccgcatcctgccccagcagctggacagcatacagggtaacgctgggggccccaagcctgggagtggagagggatgtccacctgccatggctgggccagggcccggagaccaggagagccgctggaagcagtacctggaggacgagaggatcgcgcttttcctgcagaacgaggagttcatgaaggagctgcaacggaaccgcgacttcctcctcgctctggagagagatcgattgaaatacgaatcccagaaatctaaatccagcagcgtggctgtcggaaacgactttggcttttcctctcctgtcccaggaactggcgacgccaaccccgctgtgtctgaagatgccttattcagggacaagctgaaacacatgggaaagtccacccggaggaaactgtttgaacttgcccgagccttctcagagaagaccaaaatgaggaagtcaaagaggaaacacttgttgaagcatcagtcgctgggggctgccgcgtcaacagccaacctcctggatgatgtggagggccacgcgtgtgatgaagacttccggggcaggcgtcaggaggcacccaaggtggaggaaggcctgcgagaaggacagtaagagatgccagcagctcttccttgccagagatgatctgacccggtgggggcagctggaaagcaacactggcccccagctgaagggcccagctgcagccagacagatggtgcttgagaaccgaggcccggtgatcctccagccacagtccagcccaaccactgccactttccatgggacttagaacttcggagttgctgccttgcaattggaggaaggacctggggcccctataggcagcagccaattacagccccttttgtagccaggcgttcctatggtcaaagagtggaaatgcaggaaccaacctccctttaaaaaaaaaaaaatccagaaagcagataaaagttggaatatggaaaagggcaagatgacccccaccagaggctctttggcctgaaggtggagtctctgcctccgtccgttctctatctctcctgtcacagactctgcctgaccccctttcctcagctcccttctggtcccccttcctcagctccctccgggcacttgtgcccttcccttccatgtcctcctgtatctcagccttcccccggggctgctggcccagcacacgagccctgcacccagcctgggtgggaggtccctggccagtcccccaggaactctgaggagctatgggctactgcaaagcatctgccgactgccctgccccgtctggcctcatcaggctgctgctgttagggatgggctcactcccagcagctcccggtcacccagcagggatggggagggtggccaccctggagctggaggactctggggaggcagggtctttaatttggcagcagacaaaagccagttctggagtcacaccacagtaggggctcacaggggctctgactccccagctggactggaagccctgctgtccgagggtgggcagcggtgggtcctggagtgacccctttgagcaggtgcagggctaaagagcaaggcggaaaggccgccagcctgggtgagcgcctagggcataagggcttgctgggtgcccctgagaagggcgggtgatctgaggaggagaactctgattctaggaacgcttacacggcactgaccactgccacggggagggaggctgcccagcccgtggccccgccctggacatgggagcgcgcagaccttccggagagccgggaagcctgggcaggcacgaggcttcggcgcggctctgggaggttgggagtggcatccgatccttggccgggccctggtggcctccgtggccccaagatcacaagggcgtagcgaaggcgagccggcgatcgcacctcgtcccgcccaccctgcccggactcgcaacgccgagcttggggagggccgggacgcgcagccgccgccgagcgtgaccaagtttggaaacgcgcgcggggccgggacgctggctcggggggccctgccgaggagcggtcgccccctccgctgctccccgcgccaggcctggggccctggagggaggggggggggtctccgaggagtgcctcggtaccccagctcgagttctcgacgggtctctgagccttccccgcgccaggacccggcgcactgtgggggaagccccagccccatgtctgttgagtgttgctttgttattttttttcctcctatgtgtgggttttttcttggagctgtttcataggaattcctgtaataaacagttggtgttc

SEQ ID NO: 420160 - DNA, 4282 bp, Homo sapiens
  misc_feature (3567)..(3567): n is a, c, g, or t
aagtgtggccacttcctcttgcctgtcctgactcaccctggctgctgcccattgtggctgccatggaaatacaactcgaggagaacccagaccaggacagggaggccatgttctgggtggcagtggagcctggcaaggtgccctcctggcctgggactgctgtggcagaggaagcatgaggtggggcctggcctgcccagctcagagctgaggtgcccccttggttttttacctccctgctccctggctggcccactgcacccacgcactcaacgcagtggcttcgctcctcctccaggatggctggaggtgggaccattgccaggatggcctcaagtgcccagccctcctggaagactcagtttccctctttgtcccatgcagaggtgcagagattcattattgtgggaccatccgtgaagccggtgccaggatgcaccgggggtgtggatgaccggccgcccagccccagcacggcccggtcccgcatgccaccgccccgcgaggaccgctctccaagggctgcctggggccccgcgcccgtactctcctaacccggagctctcggcagcccattgctgcctggctacccggggaggaggaggcgcaggagtgagctgcccgagaccgcagggcaagtaagcggctgacggcggaaagaccctggggaaggggctttgcggccggctagaaacattttccccaagcggctccgcaaaatgaccagcctgttccgccggagcagcagcggcagcggcgggggtggcaccgccggggcacgcgggggcgggggaggcacggccgccccccaggagctcaacaacagccggcctgcccgccaggtgcgccgcctggagttcaaccaggccatggacgacttcaagaccatgttccccaacatggattacgacatcatcgaatgcgtgctgcgcgccaacagcggcgctgtggacgccaccatcgaccagctgctgcagatgaacctggagggcggtggcagcagcggcggcgtctatgaggacagctccgactcggaggacagcatccccccggagatcttggaaaggactttggaacctgatagctcggatgaagagcccccacctgtgtactccccgccagcctaccacatgcacgtgttcgaccggccctaccctctggctcccccgactccgcctccccgtatcgacgcgctgggctctggagcccctacaagccagagacgctatcggaactggaacccaccactgctgggcaaccttccggatgactttctccgcatcctgccccagcagctggacagcatacagggtaacgctgggggccccaagcctgggagtggagagggatgtccacctgccatggctgggccagggcccggagaccaggagagccgctggaagcagtacctggaggacgagaggatcgcgcttttcctgcagaacgaggagttcatgaaggagctgcaacggaaccgcgacttcctcctcgctctggagagagatcgattgaaatacgaatcccagaaatctaaatccagcagcgtggctgtcggaaacgactttggcttttcctctcctgtcccaggaactggcgacgccaaccccgctgtgtctgaagatgccttattcagggacaagctgaaacacatgggaaagtccacccggaggaaactgtttgaacttgcccgagccttctcagagaagaccaaaatgaggaagtcaaagaggaaacacttgttgaagcatcagtcgctgggggctgccgcgtcaacagccaacctcctggatgatgtggagggccacgcgtgtgatgaagacttccggggcaggcgtcaggaggcacccaaggtggaggaaggcctgcgagaaggacagtaagagatgccagcagctcttccttgccagagatgatctgacccggtgggggcagctggaaagcaacactggcccccagctgaagggcccagctgcagccagacagatggtgcttgagaaccgaggcccggtgatcctccagccacagtccagcccaaccactgccactttccatgggacttagaacttcggagttgctgccttgcaattggaggaaggacctggggcccctataggcagcagccaattacagccccttttgtagccaggcgttcctatggtcaaagagtggaaatgcaggaaccaacctccctttaaaaaaaaaaaaatccagaaagcagataaaagttggaatatggaaaagggcaagatgacccccaccagaggctctttggcctgaaggtggagtctctgcctccgtccgttctctatctctcctgtcacagactctgcctgaccccctttcctcagctcccttctggtcccccttcctcagctccctccgggcacttgtgcccttcccttccatgtcctcctgtatctcagccttcccccggggctgctggcccagcacacgagccctgcacccagcctgggtgggaggtccctggccagtcccccaggaactctgaggagctatgggctactgcaaagcatctgccgactgccctgccccgtctggcctcatcaggctgctgctgttagggatgggctcactcccagcagctcccggtcacccagcagggatggggagggtggccaccctggagctggaggactctggggaggcagggtctttaatttggcagcagacaaaagccagttctggagtcacaccacagtaggggctcacaggggctctgactccccagctggactggaagccctgctgtccgagggtgggcagcggtgggtcctggagtgacccctttgagcaggtgcagggctaaagagcaaggcggaaaggccgccagcctgggtgagcgcctagggcataagggcttgctgggtgcccctgagaagggcgggtgatctgaggaggagaactctgattctaggaacgcttacacggcactgaccactgccacggggagggaggctgcccagcccgtggccccgccctggacatgggagcgcgcagaccttccggagagccgggaagcctgggcaggcacgaggcttcggcgcggctctgggaggttgggagtggcatccgatccttggccgggccctggtggcctccgtggccccaagatcacaagggcgtagcgaaggcgagccggcgatcgcacctcgtcccgcccaccctgcccggactcgcaacgccgagcttggggagggccgggacgcgcagccgccgccgagcgtgaccaagtttggaaacgcgcgcggggccgggacgctggctcggggggccctgccgaggagcggtcgccccctccgctgctccccgcgccaggcctggggccctggagggaggggggggggtctccgaggagtgcctcggtaccccagctcgagttctcgacgggtctctgagccttccccgcgccaggacccggcgcactgtgggggaagccccagccccatgtctgttgagtgttgctttgttattttttttcctcctatgtgtgggttttttcttggagctgtttcataggaattcctgtaataaacagttggtgttcanaaaaaaaaaaaaaaaaaaaaaaaaaaaaaaaaaaaaaaaaaaaaaaaaaaagagagagggggtggcgcgcgccccaagagaagtctctcccgcgggagaggtgccccacgttcgcgcgcgcgccccccgcaggttttgtgtgtgtagaaaagagggggcgccccataatagaggaggagcgcggcgtatatatataacagaggcgagagggcggcggggcgcggcggtgattaacacaaagccgtggcgcggacgcgggggagaaaaagcggcgcgacaacgcggaggggcacaactctgtggggggagagagagagcgcccccatataaatcactgcgggggggggggggggagagcaacccatatgtggcggggcgcacacacacacctctctccatacagcgagagagaatatataacagacgcgccctctgagaggggggggaacacaactatctacacaccaatctttttagacgccggggatgtaatataagtggggggtggttgatacaccaacaatggcgggcgccgtgaaatatatagctgcgcggcgcaggcaggattaaagtagagaaagagttatttgtggcgcacagaactgcaggggaagattatatatatcatttatttagagaagagacatatttttttttacacccggagggcgggtttgtcttttgctattataaaacaacgacagaatgagaaatc

SEQ ID NO: 420161 - DNA, 2530 bp, Homo sapiens
aagtgtggccacttcctcttgcctgtcctgactcaccctggctgctgcccattgtggctgccatggaaatacaactcgaggagaacccagaccaggacagggaggccatgttctgggtggcagtggagcctggcaaggtgccctcctggcctgggactgctgtggcagaggaagcatgaggtggggcctggcctgcccagctcagagctgaggtgcccccttggttttttacctccctgctccctggctggcccactgcacccacgcactcaacgcagtggcttcgctcctcctccaggatggctggaggtgggaccattgccaggatggcctcaagtgcccagccctcctggaagactcagtttccctctttgtcccatgcagaggtgcagagattcattattgtgggaccatccgtgaagccggtgccaggatgcaccgggggtgtggatgaccggccgcccagccccagcacggcccggtcccgcatgccaccgccccgcgaggaccgctctccaagggctgcctggggccccgcgcccgtactctcctaacccggagctctcggcagcccattgctgcctggctacccggggaggaggaggcgcaggagtgagctgcccgagaccgcagggcaagtaagcggctgacggcggaaagaccctggggaaggggctttgcggccggctagaaacattttccccaagcggctccgcaaaatgaccagcctgttccgccggagcagcagcggcagcggcgggggtggcaccgccggggcacgcgggggcgggggaggcacggccgccccccaggagctcaacaacagccggcctgcccgccaggtgcgccgcctggagttcaaccaggccatggacgacttcaagaccatgttccccaacatggattacgacatcatcgaatgcgtgctgcgcgccaacagcggcgctgtggacgccaccatcgaccagctgctgcagatgaacctggagggcggtggcagcagcggcggcgtctatgaggacagctccgactcggaggacagcatccccccggagatcttggaaaggactttggaacctgatagctcggatgaagagcccccacctgtgtactccccgccagcctaccacatgcacgtgttcgaccggccctaccctctggctcccccgactccgcctccccgtatcgacgcgctgggctctggagcccctacaagccagagacgctatcggaactggaacccaccactgctgggcaaccttccggatgactttctccgcatcctgccccagcagctggacagcatacagggtaacgctgggggccccaagcctgggagtggagagggatgtccacctgccatggctgggccagggcccggagaccaggagagccgctggaagcagtacctggaggacgagaggatcgcgcttttcctgcagaacgaggagttcatgaaggagctgcaacggaaccgcgacttcctcctcgctctggagagagatcgattgaaatacgaatcccagaaatctaaatccagcagcgtggctgtcggaaacgactttggcttttcctctcctgtcccaggaactggcgacgccaaccccgctgtgtctgaagatgccttattcagggacaagctgaaacacatgggaaagtccacccggaggaaactgtttgaacttgcccgagccttctcagagaagaccaaaatgaggaagtcaaagaggaaacacttgttgaagcatcagtcgctgggggctgccgcgtcaacagccaacctcctggatgatgtggagggccacgcgtgtgatgaagacttccggggcaggcgtcaggaggcacccaaggtggaggaaggcctgcgagaaggacagtaagagatgccagcagctcttccttgccagagatgatctgacccggtgggggcagctggaaagcaacactggcccccagctgaagggcccagctgcagccagacagatggtgcttgagaaccgaggcccggtgatcctccagccacagtccagcccaaccactgccactttccatgggacttagaacttcggagttgctgccttgcaattggaggaaggacctggggcccctataggcagcagccaattacagccccttttgtagccaggcgttcctatggtcaaagagtggaaatgcaggaaccaacctccctttaaaaaaaaaaaaatccagaaagcagataaaagttggaatatggaaaagggcaagatgacccccaccagaggctctttggcctgaaggtggagtctctgcctccgtccgttctctatctctcctgtcacagactctgcctgaccccctttcctcagctcccaccctggagctggaggactctggggaggcagggtctttaatttggcagcagacaaaagccagttctggagtcaccccatgtctgttgagtgttgctttgttattttttttcctcctatgtgtgggttttttcttggagctgtttcataggaattcctgtaataaacagttggtgttc

SEQ ID NO: 420162 - DNA, 3293 bp, Homo sapiens
  misc_feature (1)..(1): n is a, c, g, or t
  misc_feature (4)..(4): n is a, c, g, or t
ngcncggccgcggcccggcccctgcggcccgcgcggagcggacgcgcgtggcgctgcccggtgggaccatccgtgaagccggtgccaggatgcaccgggggtgtggatgaccggccgcccagccccagcacggcccggtcccgcatgccaccgccccgcgaggaccgctctccaagggctgcctggggccccgcgcccgtactctcctaacccggagctctcggcagcccattgctgcctggctacccggggaggaggaggcgcaggagtgagctgcccgagaccgcagggcaagtaagcggctgacggcggaaagaccctggggaaggggctttgcggccggctagaaacattttccccaagcggctccgcaaaatgaccagcctgttccgccggagcagcagcggcagcggcgggggtggcaccgccggggcacgcgggggcgggggaggcacggccgccccccaggagctcaacaacagccggcctgcccgccaggtgcgccgcctggagttcaaccaggccatggacgacttcaagaccatgttccccaacatggattacgacatcatcgaatgcgtgctgcgcgccaacagcggcgctgtggacgccaccatcgaccagctgctgcagatgaacctggagggcggtggcagcagcggcggcgtctatgaggacagctccgactcggaggacagcatccccccggagatcttggaaaggactttggaacctgatagctcggatgaagagcccccacctgtgtactccccgccagcctaccacatgcacgtgttcgaccggccctaccctctggctcccccgactccgcctccccgtatcgacgcgctgggctctggagcccctacaagccagagacgctatcggaactggaacccaccactgctgggcaaccttccggatgactttctccgcatcctgccccagcagctggacagcatacagggtaacgctgggggccccaagcctgggagtggagagggatgtccacctgccatggctgggccagggcccggagaccaggagagccgctggaagcagtacctggaggacgagaggatcgcgcttttcctgcagaacgaggagttcatgaaggagctgcaacggaaccgcgacttcctcctcgctctggagagagatcgattgaaatacgaatcccagaaatctaaatccagcagcgtggctgtcggaaacgactttggcttttcctctcctgtcccaggaactggcgacgccaaccccgctgtgtctgaagatgccttattcagggacaagctgaaacacatgggaaagtccacccggaggaaactgtttgaacttgcccgagccttctcagagaagaccaaaatgaggaagtcaaagaggaaacacttgttgaagcatcagtcgctgggggctgccgcgtcaacagccaacctcctggatgatgtggagggccacgcgtgtgatgaagacttccggggcaggcgtcaggaggcacccaaggtggaggaaggcctgcgagaaggacagtaagaggaaccagtgaccaggaaagaccattgggctcctttgaaaaagattcctcccatcccttttttcccctaccagatgccagcagctcttccttgccagagatgatctgacccggtgggggcagctggaaagcaacactggcccccagctgaagggcccagctgcagccagacagatggtgcttgagaaccgaggcccggtgatcctccagccacagtccagcccaaccactgccactttccatgggacttagaacttcggagttgctgccttgcaattggaggaaggacctggggcccctataggcagcagccaattacagccccttttgtagccaggcgttcctatggtcaaagagtggaaatgcaggaaccaacctccctttaaaaaaaaaaaaatccagaaagcagataaaagttggaatatggaaaagggcaagatgacccccaccagaggctctttggcctgaaggtggagtctctgcctccgtccgttctctatctctcctgtcacagactctgcctgaccccctttcctcagctcccttctggtcccccttcctcagctccctccgggcacttgtgcccttcccttccatgtcctcctgtatctcagccttcccccggggctgctggcccagcacacgagccctgcacccagcctgggtgggaggtccctggccagtcccccaggaactctgaggagctatgggctactgcaaagcatctgccgactgccctgccccgtctggcctcatcaggctgctgctgttagggatgggctcactcccagcagctcccggtcacccagcagggatggggagggtggccaccctggagctggaggactctggggaggcagggtctttaatttggcagcagacaaaagccagttctggagtcacaccacagtaggggctcacaggggctctgactccccagctggactggaagccctgctgtccgagggtgggcagcggtgggtcctggagtgacccctttgagcaggtgcagggctaaagagcaaggcggaaaggccgccagcctgggtgagcgcctagggcataagggcttgctgggtgcccctgagaagggcgggtgatctgaggaggagaactctgattctaggaacgcttacacggcactgaccactgccacggggagggaggctgcccagcccgtggccccgccctggacatgggagcgcgcagaccttccggagagccgggaagcctgggcaggcacgaggcttcggcgcggctctgggaggttgggagtggcatccgatccttggccgggccctggtggcctccgtggccccaagatcacaagggcgtagcgaaggcgagccggcgatcgcacctcgtcccgcccaccctgcccggactcgcaacgccgagcttggggagggccgggacgcgcagccgccgccgagcgtgaccaagtttggaaacgcgcgcggggccgggacgctggctcggggggccctgccgaggagcggtcgccccctccgctgctccccgcgccaggcctggggccctggagggaggggggggggtctccgaggagtgcctcggtaccccagctcgagttctcgacgggtctctgagccttccccgcgccaggacccggcgcactgtgggggaagccccagccccatgtctgttgagtgttgctttgttattttttttcctcctatgtgtgggttttttcttggagctgtttcataggaattcctgtaataaacagttggtgttc

SEQ ID NO: 420163 - DNA, 1313 bp, Homo sapiens
  misc_feature (1)..(1): n is a, c, g, or t
  misc_feature (4)..(4): n is a, c, g, or t
ngcncggccgcggcccggcccctgcggcccgcgcggagcggacgcgcgtggcgctgcccggtgggaccatccgtgaagccggtgccaggatgcaccgggggtgtggatgaccggccgcccagccccagcacggcccggtcccgcatgccaccgccccgcgaggaccgctctccaagggctgcctggggccccgcgcccgtactctcctaacccggagctctcggcagcccattgctgcctggctacccggggaggaggaggcgcaggagtgagctgcccgagaccgcagggcaagtaagcggctgacggcggaaagaccctggggaaggggctttgcggccggctagaaacattttccccaagcggctccgcaaaatgaccagcctgttccgccggagcagcagcggcagcggcgggggtggcaccgccggggcacgcgggggcgggggaggcacggccgccccccaggagctcaacaacagccggcctgcccgccaggtgcgccgcctggagttcaaccaggccatggacgacttcaagaccatgttccccaacatggattacgacatcatcgaatgcgtgctgcgcgccaacagcggcgctgtggacgccaccatcgaccagctgctgcagatgaacctggagggcggtggcagcagcggcggcgtctatgaggacagctccgactcggaggacagcatccccccggagatcttggaaaggactttggaacctgatagctcggatgaagagcccccacctgtgtactccccgccagcctaccacatgcacgtgttcgaccggccctaccctctggctcccccgactccgcctccccgtatcgacgcgctgggctctggagcccctacaagccagagacgctatcggaactggaacccaccactgctgggcaaccttccggatgactttctccgcatcctgccccagcagctggacagcatacagggtaacgctgggggccccaagcctgggagtggagagggatgtccacctgccatggctgggccagggcccggagaccaggagagccgctggaagcagtacctggaggacgagaggatcgcgcttttcctgcagaacgaggagttcatgaaggagctgcaacggaaccgcgacttcctcctcgctctggagagagatcgattgaaatacgaatcccagaaatctaaatccagcagcgtggctgtcggaaacgactttggcttttcctctcctgtcccaggtaactttgccttctggggaagaaaacctagaggcatagtggggagctcacacccaactttgctttgcat

SEQ ID NO: 420164 - DNA, 1628 bp, Homo sapiens
  misc_feature (1231)..(1231): n is a, c, g, or t
  misc_feature (1246)..(1246): n is a, c, g, or t
  misc_feature (1617)..(1617): n is a, c, g, or t
  misc_feature (1628)..(1628): n is a, c, g, or t
atcctgtgcgctgctgagctgagctggggcgcggccgcctgtctgcacagacagcaccatgtcgctcatggtcgtcagcatggcgtgtgttgggttcttcttgctgcagggggcctggccacatgagggagtccacagaaaaccttccctcctggcccacccaggtcccctggtgaaatcagaagagacagtcatcctgcaatgttggtcagatgtcaggtttgagcacttccttctgcacagagaggggaagtttaaggacactttgcacctcattggagagcaccatgatggggtctccaaggccaacttctccatcggtcccatgatgcaagaccttgcagggacctacagatgctacggttctgttactcactccccctatcagttgtcagctcccagtgaccctctggacatcgtcatcacaggtctatatgagaaaccttctctctcagcccagccgggccccacggttctggcaggagagagcgtgaccttgtcctgcagctcccggagctcctatgacatgtaccatctatccagggagggggaggcccatgaacgtaggttctctgcagggcccaaggtcaacggaacattccaggccgactttcctctgggccctgccacccacggaggaacctacagatgcttcggctctttccgtgactctccatacgagtggtcaaactcgagtgacccactgcttgtttctgtcacaggaaacccttcaaatagttggccttcacccactgaaccaagctccaaaaccggtaaccccagacacctgcacgttctgattgggacctcagtggtcataactccctttcaccatcctcctcttctttctccttcatcgctggtgctccaacaaaaaaaatgcatgctgtaatggaccaagagcctgcagggaacagaacagtgaacagggaggattctgatgaacaagaccatcaggaggtgtcatacgcataattggatcactgtgttttcacacagagaaaaatcactcccccttctcagaggcccaagacacccccaacagataccagcatgtacatagaacttccaaatgctgagtccagatccaaagctgtcttctgtccacgagcaccacagtcaggccttgaggggatcttctagggagacaacagccctgtctcaaaaccgggttgccagctcccatgtaccagcagctggaatctgaaggcatcagtcttcatcttagggnatcgctcttcctcanaccacgaatctgaacatgcctctctcttgcttacaaatgtctaaggtccccactgcctgctggagagaaaacacactcctttgcttagcccacaattctccatttcacttgacccctgcccacctctccaacctaactggcttacttcctagtctacttgaggctgcaatcacactgaggaactcacaattccaaacatacaagaggctccctcttaacacagcacttagacacgtgctgttccaccttccctcatgctgttccacctcccctcagactatctttcagccttctgtcagcagtaaaacttataaattgtttttagtaatttcaatgtagttttccctccttcaaataaacatgtctgcccncatggtttcgn

SEQ ID NO: 420165 - DNA, 1596 bp, Homo sapiens
atcctgtgcgctgctgagctgagctggggcgcggccgcctgtctgcacagacagcaccatgtcgctcatggtcgtcagcatggcgtgtgttgggttcttcttgctgcagggggcctggccacatgagggagtccacagaaaaccttccctcctggcccacccaggtcccctggtgaaatcagaagagacagtcatcctgcaatgttggtcagatgtcaggtttgagcacttccttctgcacagagaggggaagtataaggacactttgcacctcattggagagcaccatgatggggtctccaaggccaacttctccatcggtcccatgatgcaagaccttgcagggacctacagatgctacggttctgttactcactccccctatcagttgtcagctcccagtgaccctctggacatcgtcatcacaggtctatatgagaaaccttctctctcagcccagccgggccccacggttttggcaggagagagcgtgaccttgtcctgcagctcccggagctcctatgacatgtaccatctatccagggagggggaggcccatgaacgtaggttctctgcagggcccaaggtcaacggaacattccaggccgactttcctctgggccctgccacccacggaggaacctacagatgcttcggctctttccgtgactctccctatgagtggtcaaactcgagtgacccactgcttgtttctgtcacaggaaacccttcaaatagttggccttcacccactgaaccaagctccaaaaccggtaaccccagacacctgcatgttctgattgggacctcagtggtcaaaatccctttcaccatcctcctcttctttctccttcatcgctggtgctccaacaaaaaaaatgctgctgtaatggaccaagagcctgcagggaacagaacagtgaacagcgaggattctgatgaacaagaccatcaggaggtgtcatacgcataattggatcactgtgttttcacacagagagaaatcactcgcccttctgagaggcccaagacacccccaacagataccagcatgtacatagaacttccaaatgctgagcccagatccaaagttgtcttctgtccacgagcaccacagtcaggccttgaggggatcttctagggagacaacagccctgtctcaaaaccgggttgccagctcccatgtaccagcagctggaatctgaaggcatcagtcttcatcttagggcatcgctcttcctcacaccacgaatctgaacatgcctctctcttgcttacaaatgtctaaggtccccactgcctgctggagagaaaacacactcctttgcttagcccacaattctccatttcacttgacccctgcccacctctccaacctaactagcttacttcctagtctacctgaggctgcaatcacactgaggaactcacaattccaaacatacaagaggctccctcttaacacagcacttagacacgtgctgttccacctcccttcagactatctttcagccttctgccagcagtaaaacttataaattttttaaataatttcaatgtagttttcccgccttcaaataaacatgtctgccctca

SEQ ID NO: 420166 - DNA, 1810 bp, Homo sapiens
gagctggggcgcggctgcctgtctgcaccggcagcaccatgtcgctcatggtcgtcagcatggcgtgtgttgggttgttcttggtccagagggccggtccacacatgggtggtcaggacaagcccttcctgtctgcctggcccagcgctgtggtgcctcgcggaggacacgtgactcttcggtgtcactatcgtcataggtttaacaatttcatgctatacaaagaagacagaatccacgttcccatcttccatggcagaatattccaggagggcttcaacatgagccctgtgaccacagcacatgcagggaactacacatgtcggggttcacacccacactcccccactgggtggtcggcacccagcaaccccatggtgatcatggtcacaggaaaccacagaaaaccttccctcctggcccacccaggtcccctggtgaaatcaggagagagagtcatcctgcaatgttggtcagatatcatgtttgagcacttctttctgcacaaagagtggatctctaaggacccctcacgcctcgttggacagatccatgatggggtctccaaggccaatttctccatcggttccatgatgcgtgcccttgcagggacctacagatgctacggttctgttactcacaccccctatcagttgtcagctcccagtgatcccctggacatcgtggtcacaggtctatatgagaaaccttctctctcagcccagccgggccccaaggttcaggcaggagagagcgtgaccttgtcctgtagctcccggagctcctatgacatgtaccatctatccagggaggggggagcccatgaacgtaggctccctgcagtgcgcaaggtcaacagaacattccaggcagatttccctctgggccctgccacccacggagggacctacagatgcttcggctctttccgtcactctccctacgagtggtcagacccgagtgacccactgcttgtttctgtcacaggtaaccccagacacctgcatgttctgattgggacctcagtggtcaaaatccctttcaccatcctcctcttctttctccttcatcgctggtgctccaacaaaaaaaatgctgctgtaatggaccaagagcctgcagggaacagaacagtgaacagcgaggattctgatgaacaagaccatcaggaggtgtcatacgcataattggatcactgtgttttcacacagagagaaatcactcgcccttctgagaggcccaagacacccccaacagataccagcatgtacatagaacttccaaatgctgagcccagatccaaagttgtcttctgtccacgagcaccacagtcaggccttgaggggatcttctagggagacaacagccctgtctcaaaaccgggttgccagctcccatgtaccagcagctggaatctgaaggcatcagtcttcatcttagggcatcgctcttcctcacaccacgaatctgaacatgcctctctcttgcttacaaatgtctaaggtccccactgcctgctggagagaaaacacactcctttgcttagcccacaattctccatttcacttgacccctgcccacctctccaacctaactagcttacttcctagtctacctgaggctgcaatcacactgaggaactcacaattccaaacatacaagaggctccctcttaacacagcacttagacacgtgctgttccacctcccttcagactatctttcagccttctgccagcagtaaaacttataaattttttaaataatttcaatgtagttttcccgccttcaaataaacatgtctgccctca

SEQ ID NO: 420167 - DNA, 1296 bp, Homo sapiens
atcctgtgcgctgctgagctgagctggggcgcggccgcctgtctgcacagacagcaccatgtcgctcatggtcgtcagcatggcgtgtgttgggttcttcttgctgcagggggcctggccacatgagggtctatatgagaaaccttctctctcagcccagccgggccccacggttttggcaggagagagcgtgaccttgtcctgcagctcccggagctcctatgacatgtaccatctatccagggagggggaggcccatgaacgtaggttctctgcagggcccaaggtcaacggaacattccaggccgactttcctctgggccctgccacccacggaggaacctacagatgcttcggctctttccgtgactctccctatgagtggtcaaactcgagtgacccactgcttgtttctgtcacaggaaacccttcaaatagttggccttcacccactgaaccaagctccaaaaccggtaaccccagacacctgcatgttctgattgggacctcagtggtcaaaatccctttcaccatcctcctcttctttctccttcatcgctggtgctccaacaaaaaaaatgctgctgtaatggaccaagagcctgcagggaacagaacagtgaacagcgaggattctgatgaacaagaccatcaggaggtgtcatacgcataattggatcactgtgttttcacacagagagaaatcactcgcccttctgagaggcccaagacacccccaacagataccagcatgtacatagaacttccaaatgctgagcccagatccaaagttgtcttctgtccacgagcaccacagtcaggccttgaggggatcttctagggagacaacagccctgtctcaaaaccgggttgccagctcccatgtaccagcagctggaatctgaaggcatcagtcttcatcttagggcatcgctcttcctcacaccacgaatctgaacatgcctctctcttgcttacaaatgtctaaggtccccactgcctgctggagagaaaacacactcctttgcttagcccacaattctccatttcacttgacccctgcccacctctccaacctaactagcttacttcctagtctacctgaggctgcaatcacactgaggaactcacaattccaaacatacaagaggctccctcttaacacagcacttagacacgtgctgttccacctcccttcagactatctttcagccttctgccagcagtaaaacttataaattttttaaataatttcaatgtagttttcccgccttcaaataaacatgtctgccctca

SEQ ID NO: 420168 - DNA, 957 bp, Homo sapiens
caccggcagcaccatgtcgctcatggtcgtcagcatggcgtgtgttgggttcttcttgctgcagggggcctggccacatgagggaaacccttcaaatagttggccttcacccactgaaccaagctccaaaaccggtaaccccagacacctgcatgttctgattgggacctcagtggtcaaaatccctttcaccatcctcctcttctttctccttcatcgctggtgctccaacaaaaaaaatgctgctgtaatggaccaagagcctgcagggaacagaacagtgaacagcgaggattctgatgaacaagaccatcaggaggtgtcatacgcataattggatcactgtgttttcacacagagagaaatcactcgcccttctgagaggcccaagacacccccaacagataccagcatgtacatagaacttccaaatgctgagcccagatccaaagttgtcttctgtccacgagcaccacagtcaggccttgaggggatcttctagggagacaacagccctgtctcaaaaccgggttgccagctcccatgtaccagcagctggaatctgaaggcatcagtcttcatcttagggcatcgctcttcctcacaccacgaatctgaacatgcctctctcttgcttacaaatgtctaaggtccccactgcctgctggagagaaaacacactcctttgcttagcccacaattctccatttcacttgacccctgcccacctctccaacctaactagcttacttcctagtctacctgaggctgcaatcacactgaggaactcacaattccaaacatacaagaggctccctcttaacacagcacttagacacgtgctgttccacctcccttcagactatctttcagccttctgccagcagtaaaacttataaattttttaaataatttcaatgtagttttcccgccttcaaataaacatgtctgccctca

SEQ ID NO: 420169 - DNA, 1743 bp, Homo sapiens
caccggcagcaccatgtcgctcatggtcgtcagcatggcgtgtgttgggttgttcttggtccagagggccggtccacacatgggtggtcaggacaagcccttcctgtctgcctggcccagcgctgtggtgcctcgcggaggacacgtgactcttcggtgtcactatcgtcataggtttaacaatttcatgctatacaaagaagacagaatccacgttcccatcttccatggcagaatattccaggagggcttcaacatgagccctgtgaccacagcacatgcagggaactacacatgtcggggttcacacccacactcccccactgggtggtcggcacccagcaaccccatggtgatcatggtcacaggaaaccacagaaaaccttccctcctggcccacccaggtcccctggtgaaatcaggagagagagtcatcctgcaatgttggtcagatatcatgtttgagcacttctttctgcacaaagagtggatctctaaggacccctcacgcctcgttggacagatccatgatggggtctccaaggccaatttctccatcggttccatgatgcgtgcccttgcagggacctacagatgctacggttctgttactcacaccccctatcagttgtcagctcccagtgatcccctggacatcgtggtcacaggtctatatgagaaaccttctctctcagcccagccgggccccaaggttcaggcaggagagagcgtgaccttgtcctgtagctcccggagctcctatgacatgtaccatctatccagggaggggggagcccatgaacgtaggctccctgcagtgcgcaaggtcaacagaacattccaggcagatttccctctgggccctgccacccacggagggacctacagatgcttcggctctttccgtcactctccctacgagtggtcagacccgagtgacccactgcttgtttctgtcacaggaaacccttcaagtagttggccttcacccacagaaccaagctccaaatctggtaacctcagacacctgcacattctgattgggacctcagtggtcaaaatccctttcaccatcctcctcttctttctccttcatcgctggtgctccaacaaaaaaaaatgctgctgtaatggaccaagagcctgcagggaacagaagtgaacagcgaggattctgatgaacaagaccatcaggaggtgtcatacgcataattggaacactgtgttttcacacagagaaaaatcactcgcccttctcagaggcccaagacacccccaacagataccagcatgtacatagaacttccaaatgctgagcccagatccaaagttgtcttctgtccacgagcaccacagtcaggccttgaggggatcttctagggagacaacagccctgtctcaaaactgggttgccagttcccatgtaccagcagctggaatctgaaggcatcagtcttcatcttagggcatcgctcttcctcacaccacaaatctgaatgtgcctctcacttgcttacaaatgtctaaggtccccactgcctgctggagaaaaaacacactcctttgcttagcccacagttctccatttcacttgacccctgcccacctctccaacctaactggcttacttcctagtctacttgaggctgcaatcacactgaggaactcacaattccacacatacaagaggctccgtcttaacgcagcacttagacacgtgctgttccaccttccctcatgctg

SEQ ID NO: 420170 - DNA, 1500 bp, Homo sapiens
caccggcagcaccatgtcgctcatggtcgtcagcatggcgtgtgttgggttcttcttgctgcagggggcctggccacatgagggagtccacagaaaaccttccctcctggcccacccaggtcccctggtgaaatcagaagagacagtcatcctgcaatgttggtcagatgtcaggtttgagcacttccttctgcacagagaggggaagtataaggacactttgcacctcattggagagcaccatgatggggtctccaaggccaacttctccatcggtcccatgatgcaagaccttgcagggacctacagatgctacggttctgttactcactccccctatcagttgtcagctcccagtgaccctctggacatcgtcatcacaggtctatatgagaaaccttctctctcagcccagccgggccccacggttttggcaggagagagcgtgaccttgtcctgcagctcccggagctcctatgacatgtaccatctatccagggagggggaggcccatgaacgtaggttctctgcagggcccaaggtcaacggaacattccaggccgactttcctctgggccctgccacccacggaggaacctacagatgcttcggctctttccgtgactctccctatgagtggtcaaactcgagtgacccactgcttgtttctgtcacaggtaaccccagacacctgcatgttctgattgggacctcagtggtcaaaatccctttcaccatcctcctcttctttctccttcatcgctggtgctccaacaaaaaaaatgctgctgtaatggaccaagagcctgcagggaacagaacagtgaacagcgaggattctgatgaacaagaccatcaggaggtgtcatacgcataattggatcactgtgttttcacacagagagaaatcactcgcccttctgagaggcccaagacacccccaacagataccagcatgtacatagaacttccaaatgctgagcccagatccaaagttgtcttctgtccacgagcaccacagtcaggccttgaggggatcttctagggagacaacagccctgtctcaaaaccgggttgccagctcccatgtaccagcagctggaatctgaaggcatcagtcttcatcttagggcatcgctcttcctcacaccacgaatctgaacatgcctctctcttgcttacaaatgtctaaggtccccactgcctgctggagagaaaacacactcctttgcttagcccacaattctccatttcacttgacccctgcccacctctccaacctaactagcttacttcctagtctacctgaggctgcaatcacactgaggaactcacaattccaaacatacaagaggctccctcttaacacagcacttagacacgtgctgttccacctcccttcagactatctttcagccttctgccagcagtaaaacttataaattttttaaataatttcaatgtagttttcccgccttcaaataaacatgtctgccctca

SEQ ID NO: 420171 - DNA, 1302 bp, Homo sapiens
atcctgtgcgctgctgagctgagctggggcgcggccgcctgtctgcacagacagcaccatgtcgctcatggtcgtcagcatggcgtgtgttgggttcttcttgctgcagggggcctggccacatgagggagtccacagaaaaccttccctcctggcccacccaggtcccctggtgaaatcagaagagacagtcatcctgcaatgttggtcagatgtcaggtttgagcacttccttctgcacagagaggggaagtataaggacactttgcacctcattggagagcaccatgatggggtctccaaggccaacttctccatcggtcccatgatgcaagaccttgcagggacctacagatgcttcggctctttccgtgactctccctatgagtggtcaaactcgagtgacccactgcttgtttctgtcacaggaaacccttcaaatagttggccttcacccactgaaccaagctccaaaaccggtaaccccagacacctgcatgttctgattgggacctcagtggtcaaaatccctttcaccatcctcctcttctttctccttcatcgctggtgctccaacaaaaaaaatgctgctgtaatggaccaagagcctgcagggaacagaacagtgaacagcgaggattctgatgaacaagaccatcaggaggtgtcatacgcataattggatcactgtgttttcacacagagagaaatcactcgcccttctgagaggcccaagacacccccaacagataccagcatgtacatagaacttccaaatgctgagcccagatccaaagttgtcttctgtccacgagcaccacagtcaggccttgaggggatcttctagggagacaacagccctgtctcaaaaccgggttgccagctcccatgtaccagcagctggaatctgaaggcatcagtcttcatcttagggcatcgctcttcctcacaccacgaatctgaacatgcctctctcttgcttacaaatgtctaaggtccccactgcctgctggagagaaaacacactcctttgcttagcccacaattctccatttcacttgacccctgcccacctctccaacctaactagcttacttcctagtctacctgaggctgcaatcacactgaggaactcacaattccaaacatacaagaggctccctcttaacacagcacttagacacgtgctgttccacctcccttcagactatctttcagccttctgccagcagtaaaacttataaattttttaaataatttcaatgtagttttcccgccttcaaataaacatgtctgccctca

SEQ ID NO: 420172 - DNA, 1063 bp, Homo sapiens
ttttgtagaaattattataatgtttccaaagtttaaattatcttacggttatttcaaggtgtcaataatatcacactgtcccagagtcagcaggtattctcacagtgactcatgaggccatttttagttttcccatttgtatgattggacactgcctggaatagtgtcctggaataagtgtcaggaatatcttccttttgttctggagttctcactgccatgaagggcagtattcatattgggaaatggagataacggaagatccagagaacacaaattggctttgagtcatgtgattaggcttcctgagaggttcagtgtcaccctgactatctccttagaagtgtggatgttgaaccagaacagtgctccagaaggagtgctcagtttcatagagcaatctgtgttttttagaaaaagaatccttttgctaatgtagtgaatattgggggcaagttgaaattttgcatttcctaacgtcttttatttatgcctagatgatggaccatttggattgtgcaacaaatgaagaaaaccctgtgatatctggtgaacagattgtccagcaataatattatgtggaactgctataatgtgtcattgattttctacaaatagacttcgactttttaaattgacttttgaattgacaatctgaaagagtcttcaatgatatgcttgcaaaaatatatttttatgagctggtactgacagttacatcataaataactaaaacgctttgcttttaatgttaaagttgtgccttcacattaaataaaacatatggtctgtgtagtttccgagatgtactatatacagtatatttttctaaaaaaaaatgccttgacccacccctatacctttttttaacgaaatctgtttctttcagctctgatggtagatacaagtagttactatttctgaatgggttttactgtaaagaattatgcaaattggccgggcgcggtggctcacgcctgtgatcccaacactttgggaggccgaggcgggcggatcacgaggtcaggagatcgagaccatcctggctggcacggtgaaaccc

SEQ ID NO: 420173 - DNA, 742 bp, Homo sapiens
ggaagtcgcgctgctgtggcggccgctgtagcagcggcggtccagtcgtagcccggccgcccgcgcctgtccggtccggtccggccacggaggcagcgcagcggcgggactccgagcctaccccgccgagtgagctgcgccgcaccgtgccgtcccacccggcacccaccagtccgatggggccgcagcggcggctgtcccctgccggggccgccctactctggggcttcctgctccagctgacagccgctcaggaagcaatcttgcatgcgtctggaaatggcacaaccaaggactactgcatgctttataacccttattggacagctcttccaagtaccctagaaaatgcaacttccattagtttgatgaatctgacttccacaccactatgcaacctttctgatattcctcctgttggcataaagagcaaagcagttgtggttccatggggaagctgccattttcttgaaaaagccagaattgcacagaaaggaggtgctgaagcaatgttagttgtcaataacagtgtcctatttcctccctcaggtaacagatctgaatttcctgatgtgaaaatactgattgcatttataagctacaaagactttagagatatgaaccaggtaaattagcaattacatattagataaagtttataaatactgtatctctttatttttaatcactaatgtttaattttgagtgttatatttgctccatttgctaacaagaagctata

SEQ ID NO: 420174 - DNA, 713 bp, Homo sapiens
atttatctgccctcagaatatgatgccagtaagcccagtctgcaggtttgtcctcatgtagatcatttacattttcaccagagagaaaagagtcacagatttctctaactcttccactgtcagaggaacattgacatcacatcagagacccttttaagttaaaatgtttaattctgtctcccaggaaaggtcatgggagatatcctaatatgcctattgatttagattggaagaaaataagcaagagaaagtggggagtttttcagctcctcctgggctgggtcattacagtgtggcctcatcattctgtttaatgctttaggaattctaaggatgttagtaatgtccatcttttttttcacttagtcaagatttatttcaaggcttgaaaacattcaggccaactaaaatggtactactgtcactttttataatacataaataggccaggcacggtggctcacgcctgtaatcccaacactttgggaggccaaggcgggcagatcacctgaggtcaggagtttgagacaagcctggccaacatggtgaaaccctgtctctacgaaaaatacaaaaattacctgggtgcagtggtgcgtgcctgtaatcccagctacttgggaggctgaggcaggagaattgcttgaacctgggaggtggaggttgcagtgagctgagattgtgccattgcattccaacctaggtgacaagag

SEQ ID NO: 420175 - DNA, 325 bp, Homo sapiens
gcatataaatagctttattaaaatccttagttgttggcaagccataacattgcaagtttgaaagttattgtttgtctcctagacagccgctcaggaagcaatcttgcatgcgtctggaaatggcacaaccaaggactactgcatgctttataacccttattggacagctcttccaagtaccctagaaaatgcactgggtgcagtggtgcgtgcctgtaatcccagctacttgggaggctgaggcaggagaattgcttgaacctgggaggtggaggttgcagtgagctgagattgtgccattgcattccaacctaggtgacaagag

SEQ ID NO: 420176 - DNA, 2237 bp, Homo sapiens
ggcctggtactggtcggaattttgggatggcgctgtagcagcggcggtccagtcgtagcccggccgcccgcgcctgtccggtccggtccggccacggaggcagcgcagcggcgggactccgagcctaccccgccgagtgagctgcgccgcaccgtgccgtcccacccggcacccaccagtccgatggggccgcagcggcggctgtcccctgccggggccgccctactctggggcttcctgctccagctgacagccgctcaggaagcaatcttgcatgcgtctggaaatggcacaaccaaggactactgcatgctttataacccttattggacagctcttccaagtaccctagaaaatgcaacttccattagtttgatgaatctgacttccacaccactatgcaacctttctgatattcctcctgttggcataaagagcaaagcagttgtggttccatggggaagctgccattttcttgaaaaagccagaattgcacagaaaggaggtgctgaagcaatgttagttgtcaataacagtgtcctatttcctccctcaggtaacagatctgaatttcctgatgtgaaaatactgattgcatttataagctacaaagactttagagatatgaaccagactctaggagataacattactgtgaaaatgtattctccatcgtggcctaactttgattatactatggtggttatttttgtaattgcggtgttcactgtggcattaggtggatactggagtggactagttgaattggaaaacttgaaagcagtgacaactgaagatagagaaatgaggaaaaagaaggaagaatatttaacttttagtcctcttacagttgtaatatttgtggtcatctgctgtgttatgatggtcttactttatttcttctacaaatggttggtttatgttatgatagcaattttctgcatagcatcagcaatgagtctgtacaactgtcttgctgcactaattcataagataccatatggacaatgcacgattgcatgtcgtggcaaaaacatggaagtgagacttatttttctctctggactgtgcatagcagtagctgttgtttgggctgtgtttcgaaatgaagacaggtgggcttggattttacaggatatcttggggattgctttctgtctgaatttaattaaaacactgaagttgcccaacttcaagtcatgtgtgatacttctaggccttctcctcctctatgatgtattttttgttttcataacaccattcatcacaaagaatggtgagagtatcatggttgaactcgcagctggaccttttggaaataatgaaaagttgccagtagtcatcagagtaccaaaactgatctatttctcagtaatgagtgtgtgcctcatgcctgtttcaatattgggttttggagacattattgtaccaggcctgttgattgcatactgtagaagatttgatgttcagactggttcttcttacatatactatgtttcgtctacagttgcctatgctattggcatgatacttacatttgttgttctggtgctgatgaaaaaggggcaacctgctctcctctatttagtaccttgcacacttattactgcctcagttgttgcctggagacgtaaggaaatgaaaaagttctggaaaggtaacagctatcagatgatggaccatttggattgtgcaacaaatgaagaaaaccctgtgatatctggtgaacagattgtccagcaataatattatgtggaactgctataatgtgtcattgattttctacaaatagacttcgactttttaaattgacttttgaattgacaatctgaaagagtcttcaatgatatgcttgcaaaaatatatttttatgagctggtactgacagttacatcataaataactaaaacgctttgcttttaatgttaaagttgtgccttcacattaaataaaacatatggtctgtgtagtttccgagatgtactatatacagtatatttttctaaaaaaaaatgccttgacccacccctatacctttttttaacgaaatctgtttctttcagctctgatggtagatacaagtagttactatttctgaatgggttttactgtaaagaattatgcaaattggccgggcgcggtggctcacgcctgtgatcccaacactttgggaggccgaggcgggcggatcacgaggtcaggagatcgagaccatcctggctggcacggtgaaaccc

SEQ ID NO: 420177 - DNA, 2291 bp, Homo sapiens
ggcctggtactggtcggaattttgggatggcgctgtagcagcggcggtccagtcgtagcccggccgcccgcgcctgtccggtccggtccggccacggaggcagcgcagcggcgggactccgagcctaccccgccgagtgagctgcgccgcaccgtgccgtcccacccggcacccaccagtccgatggggccgcagcggcggctgtcccctgccggggccgccctactctggggcttcctgctccagctgacagccgctcaggaagcaatcttgcatgcgtctggaaatggcacaaccaaggactactgcatgctttataacccttattggacagctcttccaagtaccctagaaaatgcaacttccattagtttgatgaatctgacttccacaccactatgcaacctttctgatattcctcctgttggcataaagagcaaagcagttgtggttccatggggaagctgccattttcttgaaaaagccagaattgcacagaaaggaggtgctgaagcaatgttagttgtcaataacagtgtcctatttcctccctcaggtaacagatctgaatttcctgatgtgaaaatactgattgcatttataagctacaaagactttagagatatgaaccagactctaggagataacattactgtgaaaatgtattctccatcgtggcctaactttgattatactatggtggttatttttgtaattgcggtgttcactgtggcattaggtggatactggagtggactagttgaattggaaaacttgaaagcagtgacaactgaagatagagaaatgaggaaaaagaaggaagaatatttaacttttagtcctcttacagttgtaatatttgtggtcatctgctgtgttatgatggtcttactttatttcttctacaaatggttggtttatgttatgatagcaattttctgcatagcatcagcaatgagtctgtacaactgtcttgctgcactaattcataagataccatatggacaatgcacgattgcatgtcgtggcaaaaacatggaagtgagacttatttttctctctggactgtgcatagcagtagctgttgtttgggctgtgtttcgaaatgaagacaggtgggcttggattttacaggatatcttggggattgctttctgtctgaatttaattaaaacactgaagttgcccaacttcaagtcatgtgtgatacttctaggccttctcctcctctatgatgtattttttgttttcataacaccattcatcacaaagaatggtgagagtatcatggttgaactcgcagctggaccttttggaaataatgaaaagaatgatggaaacttggtggaagccactggtcaaccctcagctccccatgagaaattgccagtagtcatcagagtaccaaaactgatctatttctcagtaatgagtgtgtgcctcatgcctgtttcaatattgggttttggagacattattgtaccaggcctgttgattgcatactgtagaagatttgatgttcagactggttcttcttacatatactatgtttcgtctacagttgcctatgctattggcatgatacttacatttgttgttctggtgctgatgaaaaaggggcaacctgctctcctctatttagtaccttgcacacttattactgcctcagttgttgcctggagacgtaaggaaatgaaaaagttctggaaaggtaacagctatcagatgatggaccatttggattgtgcaacaaatgaagaaaaccctgtgatatctggtgaacagattgtccagcaataatattatgtggaactgctataatgtgtcattgattttctacaaatagacttcgactttttaaattgacttttgaattgacaatctgaaagagtcttcaatgatatgcttgcaaaaatatatttttatgagctggtactgacagttacatcataaataactaaaacgctttgcttttaatgttaaagttgtgccttcacattaaataaaacatatggtctgtgtagtttccgagatgtactatatacagtatatttttctaaaaaaaaatgccttgacccacccctatacctttttttaacgaaatctgtttctttcagctctgatggtagatacaagtagttactatttctgaatgggttttactgtaaagaattatgcaaattggccgggcgcggtggctcacgcctgtgatcccaacactttgggaggccgaggcgggcggatcacgaggtcaggagatcgagaccatcctggctggcacggtgaaaccc

SEQ ID NO: 420178 - DNA, 2010 bp, Homo sapiens
ggcctggtactggtcggaattttgggatggcgctgtagcagcggcggtccagtcgtagcccggccgcccgcgcctgtccggtccggtccggccacggaggcagcgcagcggcgggactccgagcctaccccgccgagtgagctgcgccgcaccgtgccgtcccacccggcacccaccagtccgatggggccgcagcggcggctgtcccctgccggggccgccctactctggggcttcctgctccagctgacagccgctcaggaagcaatcttgcatgcgtctggaaatggcacaaccaaggactactgcatgctttataacccttattggacagctcttccaagtaccctagaaaatgcaacttccattagtttgatgaatctgacttccacaccactatgcaacctttctgatattcctcctgttggcataaagagcaaagcagttgtggttccatggggaagctgccattttcttgaaaaagccagaattgcacagaaaggaggtgctgaagcaatgttagttgtcaataacagtgtcctatttcctccctcaggtaacagatctgaatttcctgatgtgaaaatactgattgcatttataagctacaaagactttagagatatgaaccagactctaggagataacattactgtgaaaatgtattctccatcgtggcctaactttgattatactatggtggttatttttgtaattgcggtgttcactgtggcattaggtggatactggagtggactagttgaattggaaaacttgaaagcagtgacaactgaagatagagaaatgaggaaaaagaaggaagaatatttaacttttagtcctcttacagttgtaatatttgtggtcatctgctgtgttatgatggtcttactttatttcttctacaaatggttggtttatgttatgatagcaattttctgcatagcatcagcaatgagtctgtacaactgtcttgctgcactaattcataagataccatatggacaatgcacgattgcatgtcgtggcaaaaacatggaagtgagacttatttttctctctggactgtgcatagcagtagctgttgtttgggctgtgtttcgaaatgaagacaggtgggcttggattttacaggatatcttggggattgctttctgtctgaatttaattaaaacactgaagttgcccaacttcaagtcatgtgtgatacttctaggccttctcctcctctatgatgtattttttgttttcataacaccattcatcacaaagaatggtgagagtatcatggttgaactcgcagctggaccttttggaaataatgaaaagttgccagtagtcatcagagtaccaaaactgatctatttctcagtaatgagtgtgtgcctcatgcctgtttcaatattgggttttggagacattattgtaccaggcctgttgattgcatactgtagaagatttgatgttcagactggttcttcttacatatactatgtttcgtctacagttgcctatgctattggcatgatacttacatttgttgttctggtgctgatgaaaaaggggcaacctgctctcctctatttagtaccttgcacacttattactgcctcagttgttgcctggagacgtaaggaaatgaaaaagttctggaaaggtaacagctatcagatgatggaccatttggattgtgcaacaaatgaagaaaaccctgtgatatctggtgaacagattgtccagcaataatattatgtggaactgctataatgtgtcattgattttctacaaatagacttcgactttttaaattgacttttgaattgacaatctgaaagagtcttcaatgatatgcttgcaaaaatatatttttatgagctggtactgacagttacatcataaataactaaaacgctttgcttttaatgttaaagttgtgccttcacattaaataaaacagtgatgcgacaagcccttttttttctctattgtgattatcatataccacctgaa

SEQ ID NO: 420179 - DNA, 2076 bp, Homo sapiens
ggcctggtactggtcggaattttgggatggcgctgtagcagcggcggtccagtcgtagcccggccgcccgcgcctgtccggtccggtccggccacggaggcagcgcagcggcgggactccgagcctaccccgccgagtgagctgcgccgcaccgtgccgtcccacccggcacccaccagtccgatggggccgcagcggcggctgtcccctgccggggccgccctactctggggcttcctgctccagctgacagccgctcaggaagcaatcttgcatgcgtctggaaatggcacaaccaaggactactgcatgctttataacccttattggacagctcttccaagtaccctagaaaatgcaacttccattagtttgatgaatctgacttccacaccactatgcaacctttctgatattcctcctgttggcataaagagcaaagcagttgtggttccatggggaagctgccattttcttgaaaaagccagaattgcacagaaaggaggtgctgaagcaatgttagttgtcaataacagtgtcctatttcctccctcaggtaacagatctgaatttcctgatgtgaaaatactgattgcatttataagctacaaagactttagagatatgaaccagactctaggagataacattactgtgaaaatgtattctccatcgtggcctaactttgattatactatggtggttatttttgtaattgcggtgttcactgtggcattaggtggatactggagtggactagttgaattggaaaacttgaaagcagtgacaactgaagatagagaaatgaggaaaaagaaggaagaatatttaacttttagtcctcttacagttgtaatatttgtggtcatctgctgtgttatgatggtcttactttatttcttctacaaatggttggtttatgttatgatagcaattttctgcatagcatcagcaatgagtctgtacaactgtcttgctgcactaattcataagataccatatggacaatgcacgattgcatgtcgtggcaaaaacatggaagtgagacttatttttctctctggactgtgcatagcagtagctgttgtttgggctgtgtttcgaaatgaagacaggtgggcttggattttacaggatatcttggggattgctttctgtctgaatttaattaaaacactgaagttgcccaacttcaagtcatgtgtgatacttctaggccttctcctcctctatgatgtattttttgttttcataacaccattcatcacaaagaatggtgagagtatcatggttgaactcgcagctggaccttttggaaataatgaaaagttgccagtagtcatcagagtaccaaaactgatctatttctcagtaatgagtgtgtgcctcatgcctgtttcaatattgggttttggagacattattgtaccaggcctgttgattgcatactgtagaagatttgatgttcagactggttcttcttacatatactatgtttcgtctacagttgatgatggaccatttggattgtgcaacaaatgaagaaaaccctgtgatatctggtgaacagattgtccagcaataatattatgtggaactgctataatgtgtcattgattttctacaaatagacttcgactttttaaattgacttttgaattgacaatctgaaagagtcttcaatgatatgcttgcaaaaatatatttttatgagctggtactgacagttacatcataaataactaaaacgctttgcttttaatgttaaagttgtgccttcacattaaataaaacatatggtctgtgtagtttccgagatgtactatatacagtatatttttctaaaaaaaaatgccttgacccacccctatacctttttttaacgaaatctgtttctttcagctctgatggtagatacaagtagttactatttctgaatgggttttactgtaaagaattatgcaaattggccgggcgcggtggctcacgcctgtgatcccaacactttgggaggccgaggcgggcggatcacgaggtcaggagatcgagaccatcctggctggcacggtgaaaccc

SEQ ID NO: 420180 - DNA, 996 bp, Homo sapiens
tatgagtaaagattgccaagaagttcattggcggcctctgttttgttttttgttttgttttgttttgttttgttttgtttttgaacagttgccagtagtcatcagagtaccaaaactgatctatttctcagtaatgagtgtgtgcctcatgcctgtttcaatattgggttttggagacattattgtaccaggcctgttgattgcatactgtagaagatttgatgttcagactggttcttcttacatatactatgtttcgtctacagttgcctatgctattggcatgatacttacatttgttgttctggtgctgatgaaaaaggggcaacctgctctcctctatttagtaccttgcacacttattactgcctcagttgttgcctggagacgtaaggaaatgaaaaagttctggaaaggtaacagctatcagatgatggaccatttggattgtgcaacaaatgaagaaaaccctgtgatatctggtgaacagattgtccagcaataatattatgtggaactgctataatgtgtcattgattttctacaaatagacttcgactttttaaattgacttttgaattgacaatctgaaagagtcttcaatgatatgcttgcaaaaatatatttttatgagctggtactgacagttacatcataaataactaaaacgctttgcttttaatgttaaagttgtgccttcacattaaataaaacatatggtctgtgtagtttccgagatgtactatatacagtatatttttctaaaaaaaaatgccttgacccacccctatacctttttttaacgaaatctgtttctttcagctctgatggtagatacaagtagttactatttctgaatgggttttactgtaaagaattatgcaaattggccgggcgcggtggctcacgcctgtgatcccaacactttgggaggccgaggcgggcggatcacgaggtcaggagatcgagaccatcctggctggcacggtgaaaccc

SEQ ID NO: 420181 - DNA, 1652 bp, Homo sapiens
ggcctggtactggtcggaattttgggatggcgctgtagcagcggcggtccagtcgtagcccggccgcccgcgcctgtccggtccggtccggccacggaggcagcgcagcggcgggactccgagcctaccccgccgagtgagctgcgccgcaccgtgccgtcccacccggcacccaccagtccgatggggccgcagcggcggctgtcccctgccggggccgccctactctggggcttcctgctccagctgacagccgctcaggaagcaatcttgcatgcgtctggaaatggcacaaccaaggactactgcatgctttataacccttattggacagctcttccaagtaccctagaaaatgcaacttccattagtttgatgaatctgacttccacaccactatgcaacctttctgatattcctcctgttggcataaagagcaaagcagttgtggttccatggggaagctgccattttcttgaaaaagccagaattgcacagaaaggaggtgctgaagcaatgttagttgtcaataacagtgtcctatttcctccctcaggtaacagatctgaatttcctgatgtgaaaatactgattgcatttataagctacaaagactttagagatatgaaccagactctaggagataacattactgtgaaaatgtattctccatcgtggcctaactttgattatactatggtggttatttttgtaattgcggtgttcactgtggcattaggtggatactggagtggactagttgaattggaaaacttgaaagcagtgacaactgaagatagagaaatgaggaaaaagaaggaagaatatttaacttttagtcctcttacagttgtaatatttgtggtcatctgctgtgttatgatggtcttactttatttcttctacaaatggttggtttatgttatgatagcaattttctgcatagcatcagcaatgagtctgtacaactgtcttgctgcactaattcataagataccatatggacaatgcacgattgcatgtcgtggcaaaaacatggaagtgagacttatttttctctctggactgtgcatagcagtagctgttgtttgggctgtgtttcgaaatgaagacagtcatgtgtgatacttctaggccttctcctcctctatgatgtattttttgttttcataacaccattcatcacaaagaatggtgagagtatcatggttgaactcgcagctggaccttttggaaataatgaaaaggtagggatggcaatgaaatagaaatggctatccagtgtatgtatgtgtatccggttaataatttgccttcctgtgtaattcactggccacatagtgcatgttaaggtattgtaaaacttatttctcagaaaatatagctcttttcttagttattctaaattattaaatacctattgacttgggtttcatcctagaatgatggaaacttggtggaagccactggtcaaccctcagctccccatgagaaagtaaggattgtattttagatatgttcattggactttaaatcataccctctgagacaagactcttctttgggggaaaaaaaaatccagattgccaaaaaaaattaggcctgttctgttttctatgtttcaaggcctgagttctatccttggtaaagag

SEQ ID NO: 420182 - DNA, 2088 bp, Homo sapiens
ggcctggtactggtcggaattttgggatggcgctgtagcagcggcggtccagtcgtagcccggccgcccgcgcctgtccggtccggtccggccacggaggcagcgcagcggcgggactccgagcctaccccgccgagtgagctgcgccgcaccgtgccgtcccacccggcacccaccagtccgatggggccgcagcggcggctgtcccctgccggggccgccctactctggggcttcctgctccagctgacagccgctcaggaagcaatcttgcatgcgtctggaaatggcacaaccaaggactactgcatgctttataacccttattggacagctcttccaagtaccctagaaaatgcaacttccattagtttgatgaatctgacttccacaccactatgcaacctttctgatattcctcctgttggcataaagagcaaagcagttgtggttccatggggaagctgccattttcttgaaaaagccagaattgcacagaaaggaggtgctgaagcaatgttagttgtcaataacagtgtcctatttcctccctcaggtaacagatctgaatttcctgatgtgaaaatactgattgcatttataagctacaaagactttagagatatgaaccagactctaggagataacattactgtgaaaatgtattctccatcgtggcctaactttgattatactatggtggttatttttgtaattgcggtgttcactgtggcattaggtggatactggagtggactagttgaatttttatgttatgatagcaattttctgcatagcatcagcaatgagtctgtacaactgtcttgctgcactaattcataagataccatatggacaatgcacgattgcatgtcgtggcaaaaacatggaagtgagacttatttttctctctggactgtgcatagcagtagctgttgtttgggctgtgtttcgaaatgaagacaggtgggcttggattttacaggatatcttggggattgctttctgtctgaatttaattaaaacactgaagttgcccaacttcaagtcatgtgtgatacttctaggccttctcctcctctatgatgtattttttgttttcataacaccattcatcacaaagaatggtgagagtatcatggttgaactcgcagctggaccttttggaaataatgaaaagttgccagtagtcatcagagtaccaaaactgatctatttctcagtaatgagtgtgtgcctcatgcctgtttcaatattgggttttggagacattattgtaccaggcctgttgattgcatactgtagaagatttgatgttcagactggttcttcttacatatactatgtttcgtctacagttgcctatgctattggcatgatacttacatttgttgttctggtgctgatgaaaaaggggcaacctgctctcctctatttagtaccttgcacacttattactgcctcagttgttgcctggagacgtaaggaaatgaaaaagttctggaaaggtaacagctatcagatgatggaccatttggattgtgcaacaaatgaagaaaaccctgtgatatctggtgaacagattgtccagcaataatattatgtggaactgctataatgtgtcattgattttctacaaatagacttcgactttttaaattgacttttgaattgacaatctgaaagagtcttcaatgatatgcttgcaaaaatatatttttatgagctggtactgacagttacatcataaataactaaaacgctttgcttttaatgttaaagttgtgccttcacattaaataaaacatatggtctgtgtagtttccgagatgtactatatacagtatatttttctaaaaaaaaatgccttgacccacccctatacctttttttaacgaaatctgtttctttcagctctgatggtagatacaagtagttactatttctgaatgggttttactgtaaagaattatgcaaattggccgggcgcggtggctcacgcctgtgatcccaacactttgggaggccgaggcgggcggatcacgaggtcaggagatcgagaccatcctggctggcacggtgaaaccc

SEQ ID NO: 420183 - DNA, 2003 bp, Homo sapiens
ggcctggtactggtcggaattttgggatggcgctgtagcagcggcggtccagtcgtagcccggccgcccgcgcctgtccggtccggtccggccacggaggcagcgcagcggcgggactccgagcctaccccgccgagtgagctgcgccgcaccgtgccgtcccacccggcacccaccagtccgatggggccgcagcggcggctgtcccctgccggggccgccctactctggggcttcctgctccagctgacagccgctcaggaagcaatcttgcatgcgtctggaaatggcacaaccaaggactactgcatgctttataacccttattggacagctcttccaagtaccctagaaaatgcaacttccattagtttgatgaatctgacttccacaccactatgcaacctttctgatattcctcctgttggcataaagagcaaagcagttgtggttccatggggaagctgccattttcttgaaaaagccagaattgcacagaaaggaggtgctgaagcaatgttagttgtcaataacagtgtcctatttcctccctcaggtaacagatctgaatttcctgatgtgaaaatactgattgcatttataagctacaaagactttagagatatgaaccagactctaggagataacattactgtgaaaatgtattctccatcgtggcctaactttgattatactatggtggttatttttgtaattgcggtgttcactgtggcattaggtggatactggagtggactagttgaattggaaaacttgaaagcagtgacaactgaagatagagaaatgaggaaaaagaaggaagaatatttaacttttagtcctcttacagttgtaatatttgtggtcatctgctgtgttatgatggtcttactttatttcttctacaaatggttggtttatgttatgatagcaattttctgcatagcatcagcaatgagtctgtacaactgtcttgctgcactaattcataagataccatatggacaatgcacgattgcatgtcgtggcaaaaacatggaagtgagacttatttttctctctggactgtgcatagcagtagctgttgtttgggctgtgtttcgaaatgaagacaggtgggcttggattttacaggatatcttggggattgctttctgtctgaatttaattaaaacactgaagttgcccaacttcaagtcatgtgtgatacttctaggccttctcctcctctatgatgtattttttgttttcataacaccattcatcacaaagaatggtgagagtatcatggttgaactcgcagctggaccttttggaaataatgaaaagttgccagtagtcatcagagtaccaaaactgatctatttctcagtaatgagtgtgtgcctcatgcctgtttcaatattgggttttggagacattattgtaccaggcctgttgattgcatactgtagaagatttgatgttcagactggttcttcttacatatactatgtttcgtctacagttgcctatgctattggcatgatacttacatttgttgttctggtgctgatgaaaaaggggcaacctgctctcctctatttagtaccttgcacacttattactgcctcagttgttgcctggagacgtaaggaaatgaaaaagttctggaaaggtaacagctatcagatgatggaccatttggattgtgcaacaaatgaagaaaaccctgtgatatctggtgaacagattgtccagcaataatattatgtggaactgctataatgtgtcattgattttctacaaatagacttcgactttttaaattgacttttgaattgacaatctgaaagagtcttcaatgatatgcttgcaaaaatatatttttatgagctggtactgacagttacatcataaataactaaaacgctttgcttttaatgttaaagttgtgccttcacattaaataaaacagatcggcctggatttatatcataatattccctcgcgtccgtccggca

SEQ ID NO: 420184 - DNA, 2057 bp, Homo sapiens
ggcctggtactggtcggaattttgggatggcgctgtagcagcggcggtccagtcgtagcccggccgcccgcgcctgtccggtccggtccggccacggaggcagcgcagcggcgggactccgagcctaccccgccgagtgagctgcgccgcaccgtgccgtcccacccggcacccaccagtccgatggggccgcagcggcggctgtcccctgccggggccgccctactctggggcttcctgctccagctgacagccgctcaggaagcaatcttgcatgcgtctggaaatggcacaaccaaggactactgcatgctttataacccttattggacagctcttccaagtaccctagaaaatgcaacttccattagtttgatgaatctgacttccacaccactatgcaacctttctgatattcctcctgttggcataaagagcaaagcagttgtggttccatggggaagctgccattttcttgaaaaagccagaattgcacagaaaggaggtgctgaagcaatgttagttgtcaataacagtgtcctatttcctccctcaggtaacagatctgaatttcctgatgtgaaaatactgattgcatttataagctacaaagactttagagatatgaaccagactctaggagataacattactgtgaaaatgtattctccatcgtggcctaactttgattatactatggtggttatttttgtaattgcggtgttcactgtggcattaggtggatactggagtggactagttgaattggaaaacttgaaagcagtgacaactgaagatagagaaatgaggaaaaagaaggaagaatatttaacttttagtcctcttacagttgtaatatttgtggtcatctgctgtgttatgatggtcttactttatttcttctacaaatggttggtttatgttatgatagcaattttctgcatagcatcagcaatgagtctgtacaactgtcttgctgcactaattcataagataccatatggacaatgcacgattgcatgtcgtggcaaaaacatggaagtgagacttatttttctctctggactgtgcatagcagtagctgttgtttgggctgtgtttcgaaatgaagacaggtgggcttggattttacaggatatcttggggattgctttctgtctgaatttaattaaaacactgaagttgcccaacttcaagtcatgtgtgatacttctaggccttctcctcctctatgatgtattttttgttttcataacaccattcatcacaaagaatggtgagagtatcatggttgaactcgcagctggaccttttggaaataatgaaaagaatgatggaaacttggtggaagccactggtcaaccctcagctccccatgagaaattgccagtagtcatcagagtaccaaaactgatctatttctcagtaatgagtgtgtgcctcatgcctgtttcaatattgggttttggagacattattgtaccaggcctgttgattgcatactgtagaagatttgatgttcagactggttcttcttacatatactatgtttcgtctacagttgcctatgctattggcatgatacttacatttgttgttctggtgctgatgaaaaaggggcaacctgctctcctctatttagtaccttgcacacttattactgcctcagttgttgcctggagacgtaaggaaatgaaaaagttctggaaaggtaacagctatcagatgatggaccatttggattgtgcaacaaatgaagaaaaccctgtgatatctggtgaacagattgtccagcaataatattatgtggaactgctataatgtgtcattgattttctacaaatagacttcgactttttaaattgacttttgaattgacaatctgaaagagtcttcaatgatatgcttgcaaaaatatatttttatgagctggtactgacagttacatcataaataactaaaacgctttgcttttaatgttaaagttgtgccttcacattaaataaaacagatcggcctggatttatatcataatattccctcgcgtccgtccggca

SEQ ID NO: 420185 - DNA, 1849 bp, Homo sapiens
ggcctggtactggtcggaattttgggatggcgctgtagcagcggcggtccagtcgtagcccggccgcccgcgcctgtccggtccggtccggccacggaggcagcgcagcggcgggactccgagcctaccccgccgagtgagctgcgccgcaccgtgccgtcccacccggcacccaccagtccgatggggccgcagcggcggctgtcccctgccggggccgccctactctggggcttcctgctccagctgacagccgctcaggaagcaatcttgcatgcgtctggaaatggcacaaccaaggactactgcatgctttataacccttattggacagctcttccaagtaccctagaaaatgcaacttccattagtttgatgaatctgacttccacaccactatgcaacctttctgatattcctcctgttggcataaagagcaaagcagttgtggttccatggggaagctgccattttcttgaaaaagccagaattgcacagaaaggaggtgctgaagcaatgttagttgtcaataacagtgtcctatttcctccctcaggtaacagatctgaatttcctgatgtgaaaatactgattgcatttataagctacaaagactttagagatatgaaccagactctaggagataacattactgtgaaaatgtattctccatcgtggcctaactttgattatactatggtggttatttttgtaattgcggtgttcactgtggcattaggtggatactggagtggactagttgaattggaaaacttgaaagcagtgacaactgaagatagagaaatgaggaaaaagaaggaagaatatttaacttttagtcctcttacagttgtaatatttgtggtcatctgctgtgttatgatggtcttactttatttcttctacaaatggttggtttatgttatgatagcaattttctgcatagcatcagcaatgagtctgtacaactgtcttgctgcactaattcataagataccatatggacaatgcacgattgcatgtcgtggcaaaaacatggaagtgagacttatttttctctctggactgtgcatagcagtagctgttgtttgggctgtgtttcgaaatgaagacaggtgggcttggattttacaggatatcttggggattgctttctgtctgaatttaattaaaacactgaagttgcccaacttcaagtcatgtgtgatacttctaggccttctcctcctctatgatgtattttttgttttcataacaccattcatcacaaagaatggtgagagtatcatggttgaactcgcagctggaccttttggaaataatgaaaagttgccagtagtcatcagagtaccaaaactgatctatttctcagtaatgagtgtgtgcctcatgcctgtttcaatattgggttttggagacattattgtaccaggcctgttgattgcatactgtagaagatttgatgttcagactggttcttcttacatatactatgtttcgtctacagttgatgatggaccatttggattgtgcaacaaatgaagaaaaccctgtgatatctggtgaacagattgtccagcaataatattatgtggaactgctataatgtgtcattgattttctacaaatagacttcgactttttaaattgacttttgaattgacaatctgaaagagtcttcaatgatatgcttgcaaaaatatatttttatgagctggtactgacagttacatcataaataactaaaacgctttgcttttaatgttaaagttgtgccttcacattaaataaaacagatgcggccaggtctggtacgttaaattatacttcgacagcgtactagcgaaca

SEQ ID NO: 420186 - DNA, 1072 bp, Homo sapiens
ggcctggtactggtcggaattttgggatggcgctgtagcagcggcggtccagtcgtagcccggccgcccgcgcctgtccggtccggtccggccacggaggcagcgcagcggcgggactccgagcctaccccgccgagtgagctgcgccgcaccgtgccgtcccacccggcacccaccagtccgatggggccgcagcggcggctgtcccctgccggggccgccctactctggggcttcctgctccagctgacagccgctcaggaagcaatcttgcatgcgtctggaaatggcacaaccaaggactactgcatgctttataacccttattggacagctcttccaagtaccctagaaaatgcaacttccattagtttgatgaatctgacttccacaccactatgcaacctttctgatattcctcctgttggcataaagagcaaagcagttgtggttccatggggaagctgccattttcttgaaaaagccagaattgcacagaaaggaggtgctgaagcaatgttagttgtcaataacagtgtcctatttcctccctcaggtaacagatctgaatttcctgatgtgaaaatactgattgcatttataagctacaaagactttagagatatgaaccagactctaggagataacattactgtgaaaatgtattctccatcgtggcctaactttgattatactatggtggttatttttgtaattgcggtgttcactgtggcattaggtggatactggagtggactagttgaattgaaaccttgcaagcagtgacgagctgaagatagagaactggtggaataaaaggaaggactttttaaacttttactcctttaccaggctgcactttgcggactcgggtagggcatgatggccttactcaatctctactcaaacagaaggtccatgtatgatgcaacttactgcaaacatcacaatcaagctggccatctgccttcgtgcactaactacacaaaacccaaggcccatgcacgtagctcgtctgagaaaacaggacaccgcctgattctatcattgcacggtacacgcagaagggcag

SEQ ID NO: 420187 - DNA, 1513 bp, Homo sapiens
attcacttctcacaaggactgggtgaagagttctgcagccttacagagactggaaaagaagcccaaaccaaggcccccagagaggtcccccaggcccctttgggtccctgagcctcagctggaggtggggggtgcctgcagtgcgctggctcagtctccttctgaaaagctggatccagcttgtttgaagcccttgagctgatcttagatccggcgcaggagaccaacgcctgccatgctgttccggctctcagagcactcctcaccagaggaggaagcctccccccaccagagagcctcaggagaggggcaccatctcaagtcgaagagacccaacccctgtgcctacacaccaccttcgctgaaagctgtgcagcgcattgctgagtctcacctgcagtctatcagcaatttgaatgagaaccaggcctcagaggaggaggatgagctgggggagcttcgggagctgggttatccaagagaggaagatgaggaggaagaggaggatgatgaagaagaggaagaagaagaggacagccaggctgaagtcctgaaggtcatcaggcagtctgctgggcaaaagacaacctgtggccagggtctggaagggccctgggagcgcccaccccctctggatgagtccgagagagatggaggctctgaggaccaagtggaagacccagcactaagtgagcctggggaggaacctcagcgcccttccccctctgagcctggcacataggcacccagcctgcatctcccaggaggaagtggaggggacatcgctgttccccagaaacccactctatcctcaccctgttttgtgctcttcccctcgcctgctagggctgcggcttctgacttctagaagactaaggctggtctgtgtttgcttgtttgcccacctttggctgatacccagagaacctgggcacttgctgcctgatgcccacccctgccagtcattcctccattcacccagcgggaggtgggatgtgagacagcccacattggaaaatccagaaaaccgggaacagggatttgcccttcacaattctactccccagatcctctcccctggacacaggagacccacagggcaggaccctaagatctggggaaaggaggtcctgagaaccttgaggtacccttagatccttttctacccactttcctatggaggattccaagtcaccacttctctcaccggcttctaccagggtccaggactaaggcgtttttctccatagcctcaacattttgggaatcttcccttaatcacccttgctcctcctgggtgcctggaagatggactggcagagacctctttgttgcgttttgtgctttgatgccaggaatgccgcctagtttatgtccccggtggggcacacagcggggggcgccaggttttccttgtcccccagctgctctgcccctttccccttcttccctgactccaggcctgaacccctcccgtgctgtaataaatctttgtaaataacaaaaaaaaaaa

SEQ ID NO: 420188 - DNA, 682 bp, Homo sapiens
caattgctggccgttcactcctggatcctcactaaccagatccaggcagcgtcccgggagccacgtcttcttgtggtactgacccccagggctgaccaccagcctctcacggaggcatcttatgttaacctacctaccattgcgctgtgtaacacagattctcctctgcgctatgtggacattgccatcccatgcaacaacaagggagctcactcagtgggtttaatgtggtggatgctggctcgggaagttctgcgcatgcgtggcaccatttcccgtgaacacccatgggaggtcatgcctgatctgtacttctacagagatcctgaagagattgaaaaagaagagcaggctgctgctgagaaggcagtgaccaaggaggaatttcagggtgaatggactgctcccgctcctgagttccactgctactcagcctgaggtcgcagactggtctgaagctgcccgggtgcctggaagatggactggcagagacctctttgttgcgttttgtgctttgatgccaggaatgccgcctagtttatgtccccggtggggcacacagcggggggcgccaggttttccttgtcccccagctgctctgcccctttccccttcttccctgactccaggcctgaacccctcccgtgctgtaataaatctttgtaaataacaaaaaaaaaaa

SEQ ID NO: 420189 - DNA, 2039 bp, Homo sapiens
ttcaagttctggggagaccgcagggggccccccagctggctccccaggccttggctctaactcccaccctcctcccagccccaggagaacacgattctccatgctcattggccagtttcccctaaaccctccctccgagcacccgggcgccagtcccaggcggaggggacgggctggggaccccaaagctgggaccggagggtgagcccggcagaggcagagacacacgcggagaggaggagaggctgagggagggaggtggagaaggacgggagaggcagagagaggagacacgcagagacactcaggaggggagagacaccgagacgcagagacactcaggaggggagagacaccgagacgcagagacacccaggccggggagcgcgagggagcgaggcacagacctggctcagcgagcgcggggggcgagccccgagtcccgagagcctgggggcgcgcccagcccgggcgccgaccctcctcccgctcccgcgccctcccctcggcgggcacggtatttttatccgtgcgcgaacagccctcctcctcctctcgccgcacagcccgccgcctgcgcgggggagcccagcacagaccgccgccgggaccccgagtcgcgcaccccagccccaccggccaccccgcgcgccatggaccccaaggaccgcaagaagatccagttctcggtgcccgcgccccctagccagctcgacccccgccaggtggagatgatccggcgcaggagaccaacgcctgccatgctgttccggctctcagagcactcctcaccagaggaggaagcctccccccaccagagagcctcaggagaggggcaccatctcaagtcgaagagacccaacccctgtgcctacacaccaccttcgctgaaagctgtgcagcgcattgctgagtctcacctgcagtctatcagcaatttgaatgagaaccaggcctcagaggaggaggatgagctgggggagcttcgggagctgggttatccaagagaggaagatgaggaggaagaggaggatgatgaagaagaggaagaagaagaggacagccaggctgaagtcctgaaggtcatcaggcagtctgctgggcaaaagacaacctgtggccagggtctggaagggccctgggagcgcccaccccctctggatgagtccgagagagatggaggctctgaggaccaagtggaagacccagcactaagtgagcctggggaggaacctcagcgcccttccccctctgagcctggcacataggcacccagcctgcatctcccaggaggaagtggaggggacatcgctgttccccagaaacccactctatcctcaccctgttttgtgctcttcccctcgcctgctagggctgcggcttctgacttctagaagactaaggctggtctgtgtttgcttgtttgcccacctttggctgatacccagagaacctgggcacttgctgcctgatgcccacccctgccagtcattcctccattcacccagcgggaggtgggatgtgagacagcccacattggaaaatccagaaaaccgggaacagggatttgcccttcacaattctactccccagatcctctcccctggacacaggagacccacagggcaggaccctaagatctggggaaaggaggtcctgagaaccttgaggtacccttagatccttttctacccactttcctatggaggattccaagtcaccacttctctcaccggcttctaccagggtccaggactaaggcgtttttctccatagcctcaacattttgggaatcttcccttaatcacccttgctcctcctgggtgcctggaagatggactggcagagacctctttgttgcgttttgtgctttgatgccaggaatgccgcctagtttatgtccccggtggggcacacagcggggggcgccaggttttccttgtcccccagctgctctgcccctttccccttcttccctgactccaggcctgaacccctcccgtgctgtaataaatctttgtaaataacaaaaaaaaaaa

SEQ ID NO: 420190 - DNA, 1645 bp, Homo sapiens
tgctgcctgtgtagttgcagccgcggccgcctcccgccagctcgcctcggggaacaggacgcgcgtgagctcaggcgtccccgccccagcttttctcggaaccatgaaccccaactgcgcccggtgcggcaagatcgtgtatcccacggagaaggtgaactgtctggataagcccgccgcctgcgcgggggagcccagcacagaccgccgccgggaccccgagtcgcgcaccccagccccaccggccaccccgcgcgccatggaccccaaggaccgcaagaagatccagttctcggtgcccgcgccccctagccagctcgacccccgccaggtggagatgatccggcgcaggagaccaacgcctgccatgctgttccggctctcagagcactcctcaccagaggaggaagcctccccccaccagagagcctcaggagaggggcaccatctcaagtcgaagagacccaacccctgtgcctacacaccaccttcgctgaaagctgtgcagcgcattgctgagtctcacctgcagtctatcagcaatttgaatgagaaccaggcctcagaggaggaggatgagctgggggagcttcgggagctgggttatccaagagaggaagatgaggaggaagaggaggatgatgaagaagaggaagaagaagaggacagccaggctgaagtcctgaaggtcatcaggcagtctgctgggcaaaagacaacctgtggccagggtctggaagggccctgggagcgcccaccccctctggatgagtccgagagagatggaggctctgaggaccaagtggaagacccagcactaagtgagcctggggaggaacctcagcgcccttccccctctgagcctggcacataggcacccagcctgcatctcccaggaggaagtggaggggacatcgctgttccccagaaacccactctatcctcaccctgttttgtgctcttcccctcgcctgctagggctgcggcttctgacttctagaagactaaggctggtctgtgtttgcttgtttgcccacctttggctgatacccagagaacctgggcacttgctgcctgatgcccacccctgccagtcattcctccattcacccagcgggaggtgggatgtgagacagcccacattggaaaatccagaaaaccgggaacagggatttgcccttcacaattctactccccagatcctctcccctggacacaggagacccacagggcaggaccctaagatctggggaaaggaggtcctgagaaccttgaggtacccttagatccttttctacccactttcctatggaggattccaagtcaccacttctctcaccggcttctaccagggtccaggactaaggcgtttttctccatagcctcaacattttgggaatcttcccttaatcacccttgctcctcctgggtgcctggaagatggactggcagagacctctttgttgcgttttgtgctttgatgccaggaatgccgcctagtttatgtccccggtggggcacacagcggggggcgccaggttttccttgtcccccagctgctctgcccctttccccttcttccctgactccaggcctgaacccctcccgtgctgtaataaatctttgtaaataacaaaaaaaaaaa

SEQ ID NO: 420191 - DNA, 1674 bp, Homo sapiens
ttcaagttctggggagaccgcagggggccccccagctggctccccaggccttggctctaactcccaccctcctcccagccccaggagaacacgattctccatgctcattggccagtttcccctaaaccctccctccgagcacccgggcgccagtcccaggcggaggggacgggctggggaccccaaagctgggaccggaggcccgccgcctgcgcgggggagcccagcacagaccgccgccgggaccccgagtcgcgcaccccagccccaccggccaccccgcgcgccatggaccccaaggaccgcaagaagatccagttctcggtgcccgcgccccctagccagctcgacccccgccaggtggagatgatccggcgcaggagaccaacgcctgccatgctgttccggctctcagagcactcctcaccagaggaggaagcctccccccaccagagagcctcaggagaggggcaccatctcaagtcgaagagacccaacccctgtgcctacacaccaccttcgctgaaagctgtgcagcgcattgctgagtctcacctgcagtctatcagcaatttgaatgagaaccaggcctcagaggaggaggatgagctgggggagcttcgggagctgggttatccaagagaggaagatgaggaggaagaggaggatgatgaagaagaggaagaagaagaggacagccaggctgaagtcctgaaggtcatcaggcagtctgctgggcaaaagacaacctgtggccagggtctggaagggccctgggagcgcccaccccctctggatgagtccgagagagatggaggctctgaggaccaagtggaagacccagcactaagtgagcctggggaggaacctcagcgcccttccccctctgagcctggcacataggcacccagcctgcatctcccaggaggaagtggaggggacatcgctgttccccagaaacccactctatcctcaccctgttttgtgctcttcccctcgcctgctagggctgcggcttctgacttctagaagactaaggctggtctgtgtttgcttgtttgcccacctttggctgatacccagagaacctgggcacttgctgcctgatgcccacccctgccagtcattcctccattcacccagcgggaggtgggatgtgagacagcccacattggaaaatccagaaaaccgggaacagggatttgcccttcacaattctactccccagatcctctcccctggacacaggagacccacagggcaggaccctaagatctggggaaaggaggtcctgagaaccttgaggtacccttagatccttttctacccactttcctatggaggattccaagtcaccacttctctcaccggcttctaccagggtccaggactaaggcgtttttctccatagcctcaacattttgggaatcttcccttaatcacccttgctcctcctgggtgcctggaagatggactggcagagacctctttgttgcgttttgtgctttgatgccaggaatgccgcctagtttatgtccccggtggggcacacagcggggggcgccaggttttccttgtcccccagctgctctgcccctttccccttcttccctgactccaggcctgaacccctcccgtgctgtaataaatctttgtaaataacaaaaaaaaaaa

SEQ ID NO: 420192 - DNA, 1890 bp, Homo sapiens
ttcaagttctggggagaccgcagggggccccccagctggctccccaggccttggctctaactcccaccctcctcccagccccaggagaacacgattctccatgctcattggccagtttcccctaaaccctccctccgagcacccgggcgccagtcccaggcggaggggacgggctggggaccccaaagctgggaccggagggtgagcccggcagaggcagagacacacgcggagaggaggagaggctgagggagggaggtggagaaggacgggagaggcagagagaggagacacgcagagacactcaggaggggagagacaccgagacgcagagacactcaggaggggagagacaccgagacgcagagacacccaggccggggagcgcgagggagcgaggcacagacctggctcagcgagcgcggggggcgagccccgagtcccgagagcctgggggcgcgcccagcccgggcgccgaccctcctcccgctcccgcgccctcccctcggcgggcacggtatttttatccgtgcgcgaacagccctcctcctcctctcgccgcacagcccgccgcctgcgcgggggagcccagcacagaccgccgccgggaccccgagtcgcgcaccccagccccaccggccaccccgcgcgccatggaccccaagccagagagcctcaggagaggggcaccatctcaagtcgaagagacccaacccctgtgcctacacaccaccttcgctgaaagctgtgcagcgcattgctgagtctcacctgcagtctatcagcaatttgaatgagaaccaggcctcagaggaggaggatgagctgggggagcttcgggagctgggttatccaagagaggaagatgaggaggaagaggaggatgatgaagaagaggaagaagaagaggacagccaggctgaagtcctgaaggtcatcaggcagtctgctgggcaaaagacaacctgtggccagggtctggaagggccctgggagcgcccaccccctctggatgagtccgagagagatggaggctctgaggaccaagtggaagacccagcactaagtgagcctggggaggaacctcagcgcccttccccctctgagcctggcacataggcacccagcctgcatctcccaggaggaagtggaggggacatcgctgttccccagaaacccactctatcctcaccctgttttgtgctcttcccctcgcctgctagggctgcggcttctgacttctagaagactaaggctggtctgtgtttgcttgtttgcccacctttggctgatacccagagaacctgggcacttgctgcctgatgcccacccctgccagtcattcctccattcacccagcgggaggtgggatgtgagacagcccacattggaaaatccagaaaaccgggaacagggatttgcccttcacaattctactccccagatcctctcccctggacacaggagacccacagggcaggaccctaagatctggggaaaggaggtcctgagaaccttgaggtacccttagatccttttctacccactttcctatggaggattccaagtcaccacttctctcaccggcttctaccagggtccaggactaaggcgtttttctccatagcctcaacattttgggaatcttcccttaatcacccttgctcctcctgggtgcctggaagatggactggcagagacctctttgttgcgttttgtgctttgatgccaggaatgccgcctagtttatgtccccggtggggcacacagcggggggcgccaggttttccttgtcccccagctgctctgcccctttccccttcttccctgactccaggcctgaacccctcccgtgctgtaataaatctttgtaaataacaaaaaaaaaaa

SEQ ID NO: 420193 - DNA, 1477 bp, Homo sapiens
tgctgcctgtgtagttgcagccgcggccgcctcccgccagctcgcctcggggaacaggacgcgcgtgagctcaggcgtccccgccccagcttttctcggaaccatgaaccccaactgcgcccggtgcggcaagatcgtgtatcccacggagaaggtgaactgtctggataagatccggcgcaggagaccaacgcctgccatgctgttccggctctcagagcactcctcaccagaggaggaagcctccccccaccagagagcctcaggagaggggcaccatctcaagtcgaagagacccaacccctgtgcctacacaccaccttcgctgaaagctgtgcagcgcattgctgagtctcacctgcagtctatcagcaatttgaatgagaaccaggcctcagaggaggaggatgagctgggggagcttcgggagctgggttatccaagagaggaagatgaggaggaagaggaggatgatgaagaagaggaagaagaagaggacagccaggctgaagtcctgaaggtcatcaggcagtctgctgggcaaaagacaacctgtggccagggtctggaagggccctgggagcgcccaccccctctggatgagtccgagagagatggaggctctgaggaccaagtggaagacccagcactaagtgagcctggggaggaacctcagcgcccttccccctctgagcctggcacataggcacccagcctgcatctcccaggaggaagtggaggggacatcgctgttccccagaaacccactctatcctcaccctgttttgtgctcttcccctcgcctgctagggctgcggcttctgacttctagaagactaaggctggtctgtgtttgcttgtttgcccacctttggctgatacccagagaacctgggcacttgctgcctgatgcccacccctgccagtcattcctccattcacccagcgggaggtgggatgtgagacagcccacattggaaaatccagaaaaccgggaacagggatttgcccttcacaattctactccccagatcctctcccctggacacaggagacccacagggcaggaccctaagatctggggaaaggaggtcctgagaaccttgaggtacccttagatccttttctacccactttcctatggaggattccaagtcaccacttctctcaccggcttctaccagggtccaggactaaggcgtttttctccatagcctcaacattttgggaatcttcccttaatcacccttgctcctcctgggtgcctggaagatggactggcagagacctctttgttgcgttttgtgctttgatgccaggaatgccgcctagtttatgtccccggtggggcacacagcggggggcgccaggttttccttgtcccccagctgctctgcccctttccccttcttccctgactccaggcctgaacccctcccgtgctgtaataaatctttgtaaataacaaaaaaaaaaa

SEQ ID NO: 420194 - DNA, 1429 bp, Homo sapiens
attcacttctcacaaggactgggtgaagagttctgcagccttacagagactggaaaagaagcccaaaccaaggcccccagagaggtcccccaggcccctttgggtccctgagcctcagctggagatccggcgcaggagaccaacgcctgccatgctgttccggctctcagagcactcctcaccagaggaggaagcctccccccaccagagagcctcaggagaggggcaccatctcaagtcgaagagacccaacccctgtgcctacacaccaccttcgctgaaagctgtgcagcgcattgctgagtctcacctgcagtctatcagcaatttgaatgagaaccaggcctcagaggaggaggatgagctgggggagcttcgggagctgggttatccaagagaggaagatgaggaggaagaggaggatgatgaagaagaggaagaagaagaggacagccaggctgaagtcctgaaggtcatcaggcagtctgctgggcaaaagacaacctgtggccagggtctggaagggccctgggagcgcccaccccctctggatgagtccgagagagatggaggctctgaggaccaagtggaagacccagcactaagtgagcctggggaggaacctcagcgcccttccccctctgagcctggcacataggcacccagcctgcatctcccaggaggaagtggaggggacatcgctgttccccagaaacccactctatcctcaccctgttttgtgctcttcccctcgcctgctagggctgcggcttctgacttctagaagactaaggctggtctgtgtttgcttgtttgcccacctttggctgatacccagagaacctgggcacttgctgcctgatgcccacccctgccagtcattcctccattcacccagcgggaggtgggatgtgagacagcccacattggaaaatccagaaaaccgggaacagggatttgcccttcacaattctactccccagatcctctcccctggacacaggagacccacagggcaggaccctaagatctggggaaaggaggtcctgagaaccttgaggtacccttagatccttttctacccactttcctatggaggattccaagtcaccacttctctcaccggcttctaccagggtccaggactaaggcgtttttctccatagcctcaacattttgggaatcttcccttaatcacccttgctcctcctgggtgcctggaagatggactggcagagacctctttgttgcgttttgtgctttgatgccaggaatgccgcctagtttatgtccccggtggggcacacagcggggggcgccaggttttccttgtcccccagctgctctgcccctttccccttcttccctgactccaggcctgaacccctcccgtgctgtaataaatctttgtaaataacaaaaaaaaaaa

SEQ ID NO: 420195 - DNA, 1210 bp, Homo sapiens
tactccacaaacagcctcgcgtatagagaccaacccctgtgcctacaccaaaccttcgctgaaagctgtgcagcgcattgctgagtctcacctgcagtctatcagcaatttgaatgagaaccaggcctcagaggaggaggatgagctgggggagcttcgggagctgggttatccaagagaggaagatgaggaggaagaggaggatgatgaagaagaggaagaagaagaggacagccaggctgaagtcctgaaggtcatcaggcagtctgctgggcaaaagacaacctgtggccagggtctggaagggccctgggagcgcccaccccctctggatgagtccgagagagatggaggctctgaggaccaagtggaagacccagcactaagtgagcctggggaggaacctcagcgcccttccccctctgagcctggcacataggcacccagcctgcatctcccaggaggaagtggaggggacatcgctgttccccagaaacccactctatcctcaccctgttttgtgctcttcccctcgcctgctagggctgcggcttctgacttctagaagactaaggctggtctgtgtttgcttgtttgcccacctttggctgatacccagagaacctgggcacttgctgcctgatgcccacccctgccagtcattcctccattcacccagcgggaggtgggatgtgagacagcccacattggaaaatccagaaaaccgggaacagggatttgcccttcacaattctactccccagatcctctcccctggacacaggagacccacagggcaggaccctaagatctggggaaaggaggtcctgagaaccttgaggtacccttagatccttttctacccactttcctatggaggattccaagtcaccacttctctcaccggcttctaccagggtccaggactaaggcgtttttctccatagcctcaacattttgggaatcttcccttaatcacccttgctcctcctgggtgcctggaagatggactggcagagacctctttgttgcgttttgtgctttgatgccaggaatgccgcctagtttatgtccccggtggggcacacagcggggggcgccaggttttccttgtcccccagctgctctgcccctttccccttcttccctgactccaggcctgaacccctcccgtgctgtaataaatctttgtaaataacaaaaaaaaaaa

SEQ ID NO: 420196 - DNA, 913 bp, Homo sapiens
gatctgtgattaaagcagtaatattttaagatgagctgggaaaaacatcaactcctgaagttagaaataagaatggtttgtaaatccacagctatatcctgatgctggatggtattaatcttgtgtagtcttcaactggttagtgtgaaatagttctgccaccactcccgtaccaggggacatcgctgttccccagaaacccactctatcctcaccctgttttgtgctcttcccctcgcctgctagggctgcggcttctgacttctagaagactaaggctggtctgtgtttgcttgtttgcccacctttggctgatacccagagaacctgggcacttgctgcctgatgcccacccctgccagtcattcctccattcacccagcgggaggtgggatgtgagacagcccacattggaaaatccagaaaaccgggaacagggatttgcccttcacaattctactccccagatcctctcccctggacacaggagacccacagggcaggaccctaagatctggggaaaggaggtcctgagaaccttgaggtacccttagatccttttctacccactttcctatggaggattccaagtcaccacttctctcaccggcttctaccagggtccaggactaaggcgtttttctccatagcctcaacattttgggaatcttcccttaatcacccttgctcctcctgggtgcctggaagatggactggcagagacctctttgttgcgttttgtgctttgatgccaggaatgccgcctagtttatgtccccggtggggcacacagcggggggcgccaggttttccttgtcccccagctgctctgcccctttccccttcttccctgactccaggcctgaacccctcccgtgctgtaataaatctttgtaaataacaaaaaaaaaaa

SEQ ID NO: 420197 - DNA, 1914 bp, Homo sapiens
ttcaagttctggggagaccgcagggggccccccagctggctccccaggccttggctctaactcccaccctcctcccagccccaggagaacacgattctccatgctcattggccagtttcccctaaaccctccctccgagcacccgggcgccagtcccaggcggaggggacgggctggggaccccaaagctgggaccggagggtgagcccggcagaggcagagacacacgcggagaggaggagaggctgagggagggaggtggagaaggacgggagaggcagagagaggagacacgcagagacactcaggaggggagagacaccgagacgcagagacactcaggaggggagagacaccgagacgcagagacacccaggccggggagcgcgagggagcgaggcacagacctggctcagcgagcgcggggggcgagccccgagtcccgagagcctgggggcgcgcccagcccgggcgccgaccctcctcccgctcccgcgccctcccctcggcgggcacggtatttttatccgtgcgcgaacagccctcctcctcctctcgccgcacagcccgccgcctgcgcgggggagcccagcacagaccgccgccgggaccccgagtcgcgcaccccagccccaccggccaccccgcgcgccatggaccccaaggaccgcaagaagatccagttctcggtgcccgcgccccctagccagctcgacccccgccaggtggagatgatccggcgcaggagaccaacgcctgccatgctgttccggctctcagagcactcctcaccagaggaggaagcctccccccaccagagagcctcaggagaggggcaccatctcaagtcgaagagacccaacccctgtgcctacacaccaccttcgctgaaagctgtgcagcgcattgctgagtctcacctgcagtctatcagcaatttgaatgagaaccaggcctcagaggaggaggatgagctgggggagcttcgggagctgggttatccaagagaggaagatgaggaggaagaggaggatgatgaagaagaggaagaagaagaggacagccaggctgaagtcctgaaggtcatcaggcagtctgctgggcaaaagacaacctgtggccagggtctggaagggccctgggagcgcccaccccctctggatgagtccgagagagatggaggctctgaggaccaagtggaagacccagcactaagtgagcctggggaggaacctcagcgcccttccccctctgagcctggcacataggcacccagcctgcatctcccaggaggaagtggaggggacatcgctgttccccagaaacccactctatcctcaccctgttttgtgctcttcccctcgcctgctagggctgcggcttctgacttctagaagactaaggctggtctgtgtttgcttgtttgcccacctttggctgatacccagagaacctgggcacttgctgcctgatgcccacccctgccagtcattcctccattcacccagcgggaggtgggatgtgagacagcccacattggaaaatccagaaaaccgggaacagggatttgcccttcacaattctactccccagatcctctcccctggacacaggagacccacagggcaggaccctaagatctggggaaaggaggtcctgagaaccttgaggtacccttagatccttttctacccactttcctatggaggattccaagtcaccacttctctcaccggcttctaccagggtccaggactaaggcgtttttctccatagcctcaacattttgggaatcttcccttaatcacccttgctcctcctgggtgcctggaagatggactggcagagacctccagggttgccccatgtgacaagatacagactgtgtccctaaagtaaaggcgcaggttcagc

SEQ ID NO: 420198 - DNA, 1675 bp, Homo sapiens
ttcaagttctggggagaccgcagggggccccccagctggctccccaggccttggctctaactcccaccctcctcccagccccaggagaacacgattctccatgctcattggccagtttcccctaaaccctccctccgagcacccgggcgccagtcccaggcggaggggacgggctggggaccccaaagctgggaccggagggtgagcccggcagaggcagagacacacgcggagaggaggagaggctgagggagggaggtggagaaggacgggagaggcagagagaggagacacgcagagacactcaggaggggagagacaccgagacgcagagacactcaggaggggagagacaccgagacgcagagacacccaggccggggagcgcgagggagcgaggcacagacctggctcagcgagcgcggggggcgagccccgagtcccgagagcctgggggcgcgcccagcccgggcgccgaccctcctcccgctcccgcgccctcccctcggcgggcacggtatttttatccgtgcgcgaacagccctcctcctcctctcgccgcacagcccgccgcctgcgcgggggagcccagcacagaccgccgccgggaccccgagtcgcgcaccccagccccaccggccaccccgcgcgccatggaccccaaggaccgcaagaagatccagttctcggtgcccgcgccccctagccagctcgacccccgccaggtggagatgatccggcgcaggagaccaacgcctgccatgctgttccggctctcagagcactcctcaccagaggaggaagcctccccccaccagagagcctcaggagaggggcaccatctcaagtcgaagagacccaacccctgtgcctacacaccaccttcgctgaaagctgtgcagcgcattgctgagtctcacctgcagtctatcagcaatttgaatgagaaccaggcctcagaggaggaggatgagctgggggagcttcgggagctgggttatccaagagaggaagatgaggaggaagaggaggatgatgaagaagaggaagaagaagaggacagccaggctgaagtcctgaaggtcatcaggcagtctgctgggcaaaagacaacctgtggccagggtctggaagggccctgggagcgcccaccccctctggatgagtccgagagagatggaggctctgaggaccaagtggaagacccagcactaagtgagcctggggaggaacctcagcgcccttccccctctgagcctggcacataggcacccagcctgcatctcccaggaggaagtggaggggacatcgctgttccccagaaacccactctatcctcaccctgttttgtgctcttcccctcgcctgctagggctgcggcttctgacttctagaagactaaggctggtctgtgtttgcttgtttgcccacctttggctgatacccagagaacctgggcacttgctgcctgatgcccacccctgccagtcattcctccattcacccagcgggaggtgggatgtgagacagcccacattggaaaatccagaaaaccgggaacagggatttgcccttcacaattctactccccagatcttagggtcctgccctgtgggtctcctgtgtccaggggagaggatctggggagtagaattgtaagggcatatccctgggg

SEQ ID NO: 420199 - DNA, 293 bp, Homo sapiens
cggaggcgttgaatggcccggaggcgttgaatggcccggaggcgttgaatggcccggaggcgttgaatggcccacgggtgcctggaagatggactggcagagacctctttgttgcgttttgtgctttgatgccaggaatgccgcctagtttatgtccccggtggggcacacagcggggggcgccaggttttccttgtcccccagctgctctgcccctttccccttcttccctgactccaggcctgaacccctcccgtgctgtaataaatctttgtaaataacaaaaaaaaaaa

SEQ ID NO: 420200 - DNA, 3955 bp, Homo sapiens
caattcccagctgttccccttgagcccctgcctacaactgagggcacacctggattacctttgcagcaggcagaggagagatacgagtcgcaggagcccttggctggacaggagtcccctctccccctggctaccagggaggcagccttgcccatcctggagccagtcctggggcaggagcagccagcagcccctgaccagccctgtgttctctttgctgatgcccctgagcctggacaggcactgcctgttgaggaggaggccgtgaccctagcccgggctgagaccacccaagccaggacagaggctcaagacttgtgtagggcatcccccgagcctccaggccctgaaagcagctcccgctggctggacgacctcctggcttcaccaccacccagtggtggcggtgcaaggcggggagctggagctgagctgaaggacacacagtccccaagtacctgctctgagggactccttggctggtcccagaaagatctgcagagtgaatttgggatcacaggagacccacagcccagcagtttcagtccttccagctggtgtcaaggtgcttctcaggactatggccttgggggtgcaagccctagaggagacccaggtctcggagagagggactggaccagcaagtatgggcaaggagcaggggaagggagcaccagggagtgggccagcaggtgtggcatcggccaggaggagatggaggccagcagcagccaagaccagagtaaagtgtctgccccaggggtgctcacagcccaggaccgggtagttggaaagccagcccagcttggcactcagcggagccaggaggcagatgttcaggactgggagttcagaaagagggattcccagggcacttactccagccgggatgcagaactccaggaccaggaattcggaaagagagattcactgggtacctacagtagtcgagatgtaagccttggggactgggaatttgggaagagagattctctgggtgcttatgccagccaagatgccaacgagcagggccaagatttggggaagagggaccaccatggtaggtacagcagccaggatgccgatgagcaggactgggagtttcagaagagagatgtgtcactcggcacctatggcagccgggctgcggagccacaggaacaggagtttgggaagagcgcttggataagggactacagcagtggtggcagctccaggacccttgacgcccaggacagaagctttggaacgagacccctgagctctgggttcagccccgaggaagcccagcaacaggatgaggaatttgagaagaagattccaagtgtggaagacagccttggagagggcagcagggatgctggccggccaggagagagaggatccgggggcttgttcagtcctagcactgcccacgtgccggatggggcactcgggcagagagaccagagcagctggcaaaacagtgatgctagccaggaggtgggagggcatcaggagagacagcaggcaggggctcagggccctggcagtgctgacctggaagatggggagatgggaaagcgaggctgggtcggtgagtttagcctcagtgttggcccccagcgagaggcagcatttagcccagggcagcaggactggagccgggacttctgcatcgaggccagtgagaggagctatcagtttggcatcattggcaacgacagagtgagtggtgctggctttagcccttctagcaagatggaaggtggtcactttgtgcctcctgggaagaccacagctggctcggtggactggactgaccagctgggtctcaggaacttggaagtgtccagctgtgtgggttctgggggctcgagcgaggccagggagagtgccgtgggacagatgggctggtcaggtggcctgagcttgagagacatgaacctgaccggctgtttggaaagtggagggtctgaagagccggggggaatcggagttggggagaaggactggacttctgatgttaatgtgaagagcaaagatttggctgaggtcggggagggaggaggccacagccaggccagagagagtggcgtggggcagactgactggtcaggtgtggaggccggagagttccttaaatcaagggagcgtggagttggacaggcagactggacacctgaccttgggctgagaaacatggccccaggggcagtctgcagtcctggagagtccaaagagcttggggtgggccagatggactggggtaacaatctgggcctgagggatttggaggtgacctgtgacccagactctggaggttctcaggggctacggggatgtggagtggggcagatggactggacccaggacttggcgccccagaatgtggagctctttggggctccaagtgaagccagggagcatggggtgggcggggtgagccagtgcccagagcccggcctgaggcacaatggcagcttgtctcctggcctggaggccagagaccccttggaggccaggagctgggggttggtgagacaagtgggccagagacccagggtgaagattactcctcgtcttccttggagccacaccctgcagaccctggaatggagacaggagaagccctcagcttcggagcaagccctggcaggtgcccggcccgccccccaccctccggctcccagggcctgctggaggagatgctggcagccagcagctccaaggcggtggctcggagggagtcagcggcctcgggccttgggggcctgttggaggaggaaggagccggggcaggtgctgcccaagaggaggtgctggagcctggcagggactctccaccctcctggaggccgcagcctgatggtgaggccagccagacagaagacgtggatggcacctggggctcttcagcagccaggtggagcgatcaggggccagcacagacttctcggcgaccctcccaaggccctcctgccagatcccccagtcaggacttctccttcattgaggacaccgagatcctcgacagtgccatgtatcggagccgtgccaacttggggcgcaagcgtgggcaccgggccccggtcattcggcctgggggtaccttgggcctgtcggaggcagcagactcggatgcacacctgttccaggactctacagagccacgggcatctcgggtgccatcttcagatgaagaggtagtggaggaacctcagagccgccggacacggatgtcgttgggcaccaaggggctgaaagtcaacctctttcctggcctgagcccctcagccctgaaggccaagctgcgcccccggaatcgctcagctgaggagggagagctggctgagagcaagtcgagccagaaggagtccgcggtccagcgttcgaaatcctgcaaggtcccaggactgggaaagcccctcacgttacctcccaagccagagaaatcctcagggtcagaaggatcgtcgcccaactggcttcaagccctgaaactgaagaagaagaaggtctgagaagtcactgaggttcttcccacctggcagtctcaggcagtgcccattcctgtggggtccctgggtgaggagacggctggagccccaccatgccccaggctgcagcctctgtcccctccacctctgaggagcgtctggggaggcacatttatgcactttgtatcaccctccgaactccccccacaccttcccttccctggatttcatcactagtggttgaaggttttgtcccttcctctcctccttccctctccctctctgcttcctcctccagcctcccttgggttttcttttgataccaatttatagcattttttataaaagcctttgatttttataatgggtgggactgtatccctgcctcaccccaggtctccgtctgccccgccaggtaccccacagagaccaatgacattttgccacttgaaacaataaataaagttttttgggaa

SEQ ID NO: 420201 - DNA, 530 bp, Homo sapiens
ggtacctgagactagaggagaactttaactccttatgggttaaaggaaagaggagttatctttttaggagctgttgagaggtctgggcatccaggatgcttttcctaaagtagctggggaatttaacccttcatgctcaggtagggaataagcactgttttctggggcacttgccgaatggaaaatggacagattctgtgtccctaatagttgcaggcagggctcaagagtaaatggctaggagggtttaacctttgggtgctgttaaagttgcactgggagactctcccacattttccattctgtgacagactctaacattccgtgcttccatttcctgtcctcgtccctcacaggagccttccttccgacctggccttcaacggggacctggctaaggcagccagctcggagctacctgctgatgtgagttatcctccagttatgaatcagaatcacgtattttagagctggaagggtcatatgagatcatcttttctactccttgtagttcagatggggaaactgag

SEQ ID NO: 420202 - DNA, 406 bp, Homo sapiens
accgatcttcgtcccatcagctatgtgaaggggtgtgtatggagtgatcctgccgccccctccctgggctggtccagagatctcaaactccgatgcccctggggccacgtatgttgtgtaaatggatgaaacaggcccttgagttgggagcctgcttcactttgactttcccactgttgctggagacaaagacatcctgagggagcaagactgcgcagtcttctcccatcaggagccttccttccgacctggccttcaacggggacctggctaaggcagccagctcggagctacctgctgatgtgagttatcctccagttatgaatcagaatcacgtattttagagctggaagggtcatatgagatcatcttttctactccttgtagttcagatggggaaactgag

SEQ ID NO: 420203 - DNA, 2629 bp, Homo sapiens
gatcaaagcattaatcaattgagttgcttgtcttgttgattcagtgccaccccttatagtgattatccagtttctcatccttgtgcccacgtgccggatggggcactcgggcagagagaccagagcagctggcaaaacagtgatgctagccaggaggtgggagggcatcaggagagacagcaggcaggggctcagggccctggcagtgctgacctggaagatggggagatgggaaagcgaggctgggtcggtgagtttagcctcagtgttggcccccagcgagaggcagcatttagcccagggcagcaggactggagccgggacttctgcatcgaggccagtgagaggagctatcagtttggcatcattggcaacgacagagtgagtggtgctggctttagcccttctagcaagatggaaggtggtcactttgtgcctcctgggaagaccacagctggctcggtggactggactgaccagctgggtctcaggaacttggaagtgtccagctgtgtgggttctgggggctcgagcgaggccagggagagtgccgtgggacagatgggctggtcaggtggcctgagcttgagagacatgaacctgaccggctgtttggaaagtggagggtctgaagagccggggggaatcggagttggggagaaggactggacttctgatgttaatgtgaagagcaaagatttggctgaggtcggggagggaggaggccacagccaggccagagagagtggcgtggggcagactgactggtcaggtgtggaggccggagagttccttaaatcaagggagcgtggagttggacaggcagactggacacctgaccttgggctgagaaacatggccccaggggcagtctgcagtcctggagagtccaaagagcttggggtgggccagatggactggggtaacaatctgggcctgagggatttggaggtgacctgtgacccagactctggaggttctcaggggctacggggatgtggagtggggcagatggactggacccaggacttggcgccccagaatgtggagctctttggggctccaagtgaagccagggagcatggggtgggcggggtgagccagtgcccagagcccggcctgaggcacaatggcagcttgtctcctggcctggaggccagagaccccttggaggccaggagctgggggttggtgagacaagtgggccagagacccagggtgaagattactcctcgtcttccttggagccacaccctgcagaccctggaatggagacaggagaagccctcagcttcggagcaagccctggcaggtgcccggcccgccccccaccctccggctcccagggcctgctggaggagatgctggcagccagcagctccaaggcggtggctcggagggagtcagcggcctcgggccttgggggcctgttggaggaggaaggagccggggcaggtgctgcccaagaggaggtgctggagcctggcagggactctccaccctcctggaggccgcagcctgatggtgaggccagccagacagaagacgtggatggcacctggggctcttcagcagccaggtggagcgatcaggggccagcacagacttctcggcgaccctcccaaggccctcctgccagatcccccagtcaggacttctccttcattgaggacaccgagatcctcgacagtgccatgtatcggagccgtgccaacttggggcgcaagcgtgggcaccgggccccggtcattcggcctgggggtaccttgggcctgtcggaggcagcagactcggatgcacacctgttccaggactctacagagccacgggcatctcgggtgccatcttcagatgaagaggtagtggaggaacctcagagccgccggacacggatgtcgttgggcaccaaggggctgaaagtcaacctctttcctggcctgagcccctcagccctgaaggccaagctgcgcccccggaatcgctcagctgaggagggagagctggctgagagcaagtcgagccagaaggagtccgcggtccagcgttcgaaatcctgcaaggtcccaggactgggaaagcccctcacgttacctcccaagccagagaaatcctcagggtcagaaggatcgtcgcccaactggcttcaagccctgaaactgaagaagaagaaggtctgagaagtcactgaggttcttcccacctggcagtctcaggcagtgcccattcctgtggggtccctgggtgaggagacggctggagccccaccatgccccaggctgcagcctctgtcccctccacctctgaggagcgtctggggaggcacatttatgcactttgtatcaccctccgaactccccccacaccttcccttccctggatttcatcactagtggttgaaggttttgtcccttcctctcctccttccctctccctctctgcttcctcctccagcctcccttgggttttcttttgataccaatttatagcattttttataaaagcctttgatttttataatgggtgggactgtatccctgcctcaccccaggtctccgtctgccccgccaggtaccccacagagaccaatgacattttgccacttgaaacaataaataaagttttttgggaa

SEQ ID NO: 420204 - DNA, 1990 bp, Homo sapiens
gctgggagggggcagggcagcttcggaagcagaattgaaccaaggggacagtaccaccagggacggtgtggtgcggggagctttccagaagagggagcagctcgttcaaagccagcagcatgtgagggccgggtgtcttctgatggtccctggttgctctgtgagcctggggaatgaagaggcataacgtgggggctgaagacaacatgagtccggagaggcaggtgggccagtacctggctcaccccaaggagtgtgactgcccgagcacgtggccctgggagggaacacattgctagcatgcaacagcagcaggaataatggctgctgcttctgcggtgcgtgctgaccaggactgtgctaagtgctttagatttttctttcatccttgcagcgactccgtgcagttagaggagcctgagctgtttccaggggagggggctcacccgaggtctcagggatttgaacctgccagactggctcagctcttcacctgtgtgctgtgttgctcaaggccctgaccgtgtccttggagtctggaaaaagcatgggaaggagggcaagggagagtttgggggctgggggaaggagcttgtgaagtaggcttcagggcagggagatggggccttacgatgatctcgttctctctctgtcccctttacagccctggcaggtgcccggcccgccccccaccctccggctcccagggcctgctggaggagatgctggcagccagcagctccaaggcggtggctcggagggagtcagcggcctcgggccttgggggcctgttggaggaggaaggagccggggcaggtgctgcccaagaggaggtgctggagcctggcagggactctccaccctcctggaggccgcagcctgatggtgaggccagccagacagaagacgtggatggcacctggggctcttcagcagccaggtggagcgatcaggggccagcacagacttctcggcgaccctcccaaggccctcctgccagatcccccagtcaggacttctccttcattgaggacaccgagatcctcgacagtgccatgtatcggagccgtgccaacttggggcgcaagcgtgggcaccgggccccggtcattcggcctgggggtaccttgggcctgtcggaggcagcagactcggatgcacacctgttccaggactctacagagccacgggcatctcgggtgccatcttcagatgaagaggtagtggaggaacctcagagccgccggacacggatgtcgttgggcaccaaggggctgaaagtcaacctctttcctggcctgagcccctcagccctgaaggccaagctgcgcccccggaatcgctcagctgaggagggagagctggctgagagcaagtcgagccagaaggagtccgcggtccagcgttcgaaatcctgcaaggtcccaggactgggaaagcccctcacgttacctcccaagccagagaaatcctcagggtcagaaggatcgtcgcccaactggcttcaagccctgaaactgaagaagaagaaggtctgagaagtcactgaggttcttcccacctggcagtctcaggcagtgcccattcctgtggggtccctgggtgaggagacggctggagccccaccatgccccaggctgcagcctctgtcccctccacctctgaggagcgtctggggaggcacatttatgcactttgtatcaccctccgaactccccccacaccttcccttccctggatttcatcactagtggttgaaggttttgtcccttcctctcctccttccctctccctctctgcttcctcctccagcctcccttgggttttcttttgataccaatttatagcattttttataaaagcctttgatttttataatgggtgggactgtatccctgcctcaccccaggtctccgtctgccccgccaggtaccccacagagaccaatgacattttgccacttgaaacaataaataaagttttttgggaa

SEQ ID NO: 420205 - DNA, 4022 bp, Homo sapiens
caattcccagctgttccccttgagcccctgcctacaactgagggcacacctggattacctttgcagcaggcagaggagagatacgagtcgcaggagcccttggctggacaggagtcccctctccccctggctaccagggaggcagccttgcccatcctggagccagtcctggggcaggagcagccagcagcccctgaccagccctgtgttctctttgctgatgcccctgagcctggacaggcactgcctgttgaggaggaggccgtgaccctagcccgggctgagaccacccaagccaggacagaggctcaagacttgtgtagggcatcccccgagcctccaggccctgaaagcagctcccgctggctggacgacctcctggcttcaccaccacccagtggtggcggtgcaaggcggggagctggagctgagctgaaggacacacagtccccaagtacctgctctgagggactccttggctggtcccagaaagatctgcagagtgaatttgggatcacaggagacccacagcccagcagtttcagtccttccagctggtgtcaaggtgcttctcaggactatggccttgggggtgcaagccctagaggagacccaggtctcggagagagggactggaccagcaagtatgggcaaggagcaggggaagggagcaccagggagtgggccagcaggtgtggcatcggccaggaggagatggaggccagcagcagccaagaccagagtaaagtgtctgccccaggggtgctcacagcccaggaccgggtagttggaaagccagcccagcttggcactcagcggagccaggaggcagatgttcaggactgggagttcagaaagagggattcccagggcacttactccagccgggatgcagaactccaggaccaggaattcggaaagagagattcactgggtacctacagtagtcgagatgtaagccttggggactgggaatttgggaagagagattctctgggtgcttatgccagccaagatgccaacgagcagggccaagatttggggaagagggaccaccatggtaggtacagcagccaggatgccgatgagcaggactgggagtttcagaagagagatgtgtcactcggcacctatggcagccgggctgcggagccacaggaacaggagtttgggaagagcgcttggataagggactacagcagtggtggcagctccaggacccttgacgcccaggacagaagctttggaacgagacccctgagctctgggttcagccccgaggaagcccagcaacaggatgaggaatttgagaagaagattccaagtgtggaagacagccttggagagggcagcagggatgctggccggccaggagagagaggatccgggggcttgttcagtcctagcactgcccacgtgccggatggggcactcgggcagagagaccagagcagctggcaaaacagtgatgctagccaggaggtgggagggcatcaggagagacagcaggcaggggctcagggccctggcagtgctgacctggaagatggggagatgggaaagcgaggctgggtcggtgagtttagcctcagtgttggcccccagcgagaggcagcatttagcccagggcagcaggactggagccgggacttctgcatcgaggccagtgagaggagctatcagtttggcatcattggcaacgacagagtgagtggtgctggctttagcccttctagcaagatggaaggtggtcactttgtgcctcctgggaagaccacagctggctcggtggactggactgaccagctgggtctcaggaacttggaagtgtccagctgtgtgggttctgggggctcgagcgaggccagggagagtgccgtgggacagatgggctggtcaggtggcctgagcttgagagacatgaacctgaccggctgtttggaaagtggagggtctgaagagccggggggaatcggagttggggagaaggactggacttctgatgttaatgtgaagagcaaagatttggctgaggtcggggagggaggaggccacagccaggccagagagagtggcgtggggcagactgactggtcaggtgtggaggccggagagttccttaaatcaagggagcgtggagttggacaggcagactggacacctgaccttgggctgagaaacatggccccaggggcagtctgcagtcctggagagtccaaagagcttggggtgggccagatggactggggtaacaatctgggcctgagggatttggaggtgacctgtgacccagactctggaggttctcaggggctacggggatgtggagtggggcagatggactggacccaggacttggcgccccagaatgtggagctctttggggctccaagtgaagccagggagcatggggtgggcggggtgagccagtgcccagagcccggcctgaggcacaatggcagcttgtctcctggcctggaggccagagaccccttggaggccaggagctgggggttggtgagacaagtgggccagagacccagggtgaagattactcctcgtcttccttggagccacaccctgcagaccctggaatggagacaggagaagccctcagcttcggagcaagccctggcaggtgcccggcccgccccccaccctccggctcccagggcctgctggaggagatgctggcagccagcagctccaaggcggtggctcggagggagtcagcggcctcgggccttgggggcctgttggaggaggaaggagccggggcaggtgctgcccaagaggaggtgctggagcctggcagggactctccaccctcctggaggccgcagcctgatggtgaggccagccagacagaagacgtggatggcacctggggctcttcagcagccaggtggagcgatcaggggccagcacagacttctcggcgaccctcccaaggccctcctgccagatcccccagtcaggacttctccttcattgaggacaccgagatcctcgacagtgccatgtatcggagccgtgccaacttggggcgcaagcgtgggcaccgggccccggtcattcggcctgggggtaccttgggcctgtcggaggcagcagactcggatgcacacctgttccaggactctacagagccacgggcatctcgggtgccatcttcagatgaagaggtagtggaggaacctcagagccgccggacacggatgtcgttgggcaccaaggggctgaaagtcaacctctttcctggcctgagcccctcagccctgaaggccaagctgcgcccccggaatcgctcagctgaggagggagagctggctgagagcaagtcgagccagaaggagtccgcggtccagcgttcgaaatcctgcaaggtcccaggactgggaaagcccctcacgttacctcccaagccagagaaatcctcagggtcagaaggatcgtcgcccaactggcttcaagccctgaaactgaagaagaagaaggtctgagaagtcactgaggttcttcccacctggcagtctcaggcagtgcccattcctgtggggtccctgggtgaggagacggctggagccccaccatgccccaggctgcagcctctgtcccctccacctctgaggagcgtctggggaggcacatttatgcactttgtatcaccctccgaactccccccacaccttcccttccctggatttcatcactagtggttgaaggttttgtcccttcctctcctccttccctctccctctctgcttcctcctccagcctcccttgggttttcttttgataccaatttatagcattttttataaaagcctttgatttttataatgggtgggactgtatccctgcctcaccccaggtctccgtctgccccgccaggtaccccacagagaccaatgacattttgccacttgaaacaataaataaagttttttgggaaaaaaaaggagtgaaaataaaaaaaagaataaaacagaaaaaaagggcgggggggataaaaaatccag

SEQ ID NO: 420206 - DNA, 4372 bp, Homo sapiens
caattcccagctgttccccttgagcccctgcctacaactgagggcacacctggattacctttgcagcaggcagaggagagatacgagtcgcaggagcccttggctggacaggagtcccctctccccctggctaccagggaggcagccttgcccatcctggagccagtcctggggcaggagcagccagcagcccctgaccagccctgtgttctctttgctgatgcccctgagcctggacaggcactgcctgttgaggaggaggccgtgaccctagcccgggctgagaccacccaagccaggacagaggctcaagacttgtgtagggcatcccccgagcctccaggccctgaaagcagctcccgctggctggacgacctcctggcttcaccaccacccagtggtggcggtgcaaggcggggagctggagctgagctgaaggacacacagtccccaagtacctgctctgagggactccttggctggtcccagaaagatctgcagagtgaatttgggatcacaggagacccacagcccagcagtttcagtccttccagctggtgtcaaggtgcttctcaggactatggccttgggggtgcaagccctagaggagacccaggtctcggagagagggactggaccagcaagtatgggcaaggagcaggggaagggagcaccagggagtgggccagcaggtgtggcatcggccaggaggagatggaggccagcagcagccaagaccagagtaaagtgtctgccccaggggtgctcacagcccaggaccgggtagttggaaagccagcccagcttggcactcagcggagccaggaggcagatgttcaggactgggagttcagaaagagggattcccagggcacttactccagccgggatgcagaactccaggaccaggaattcggaaagagagattcactgggtacctacagtagtcgagatgtaagccttggggactgggaatttgggaagagagattctctgggtgcttatgccagccaagatgccaacgagcagggccaagatttggggaagagggaccaccatggtaggtacagcagccaggatgccgatgagcaggactgggagtttcagaagagagatgtgtcactcggcacctatggcagccgggctgcggagccacaggaacaggagtttgggaagagcgcttggataagggactacagcagtggtggcagctccaggacccttgacgcccaggacagaagctttggaacgagacccctgagctctgggttcagccccgaggaagcccagcaacaggatgaggaatttgagaagaagattccaagtgtggaagacagccttggagagggcagcagggatgctggccggccaggagagagaggatccgggggcttgttcagtcctagcactgcccacgtgccggatggggcactcgggcagagagaccagagcagctggcaaaacagtgatgctagccaggaggtgggagggcatcaggagagacagcaggcaggggctcagggccctggcagtgctgacctggaagatggggagatgggaaagcgaggctgggtcggtgagtttagcctcagtgttggcccccagcgagaggcagcatttagcccagggcagcaggactggagccgggacttctgcatcgaggccagtgagaggagctatcagtttggcatcattggcaacgacagagtgagtggtgctggctttagcccttctagcaagatggaaggtggtcactttgtgcctcctgggaagaccacagctggctcggtggactggactgaccagctgggtctcaggaacttggaagtgtccagctgtgtgggttctgggggctcgagcgaggccagggagagtgccgtgggacagatgggctggtcaggtggcctgagcttgagagacatgaacctgaccggctgtttggaaagtggagggtctgaagagccggggggaatcggagttggggagaaggactggacttctgatgttaatgtgaagagcaaagatttggctgaggtcggggagggaggaggccacagccaggccagagagagtggcgtggggcagactgactggtcaggtgtggaggccggagagttccttaaatcaagggagcgtggagttggacaggcagactggacacctgaccttgggctgagaaacatggccccaggggcagtctgcagtcctggagagtccaaagagcttggggtgggccagatggactggggtaacaatctgggcctgagggatttggaggtgacctgtgacccagactctggaggttctcaggggctacggggatgtggagtggggcagatggactggacccaggacttggcgccccagaatgtggagctctttggggctccaagtgaagccagggagcatggggtgggcggggtgagccagtgcccagagcccggcctgaggcacaatggcagcttgtctcctggcctggaggccagagaccccttggaggccaggagctgggggttggtgagacaagtgggccagagacccagggtgaagattactcctcgtcttccttggagccacaccctgcagaccctggaatggagacaggagaagccctcagcttcggagcaagccctggcaggtgcccggcccgccccccaccctccggctcccagggcctgctggaggagatgctggcagccagcagctccaaggcggtggctcggagggagtcagcggcctcgggccttgggggcctgttggaggaggaaggagccggggcaggtgctgcccaagaggaggtgctggagcctggcagggactctccaccctcctggaggccgcagcctgatggtgaggccagccagacagaagacgtggatggcacctggggctcttcagcagccaggtggagcgatcaggggccagcacagacttctcggcgaccctcccaaggccctcctgccagatcccccagtcaggacttctccttcattgaggacaccgagatcctcgacagtgccatgtatcggagccgtgccaacttggggcgcaagcgtgggcaccgggccccggtcattcggcctgggggtaccttgggcctgtcggaggcagcagactcggatgcacacctgttccaggactctacagagccacgggcatctcgggtgccatcttcagatgaagaggtagtggaggaacctcagagccgccggacacggatgtcgttgggcaccaaggggctgaaagtcaacctctttcctggcctgagcccctcagccctgaaggccaagctgcgcccccggaatcgctcagctgaggagggagagctggctgagagcaagtcgagccagaaggagtccgcggtccagcgttcgaaatcctgcaaggtcccaggactgggaaagcccctcacgttacctcccaagccagagaaatcctcagggtcagaaggatcgtcgcccaactggcttcaagccctgaaactgaagaagaagaaggtctgagaagtcactgaggttcttcccacctggcagtctcaggcagtgcccattcctgtggggtccctgggtgaggagacggctggagccccaccatgccccaggctgcagcctctgtcccctccacctctgaggagcgtctggggaggcacatttatgcactttgtatcaccctccgaactccccccacaccttcccttccctggatttcatcactagtggttgaaggttttgtcccttcctctcctccttccctctccctctctgcttcctcctccagcctcccttgggttttcttttgataccaatttatagcattttttataaaagcctttgatttttataatgggtgggactgtatccctgcctcaccccaggtctccgtctgccccgccaggtaccccacagagaccaatgacattttgccacttgaaacaataaataaagttttttgggaacaaaaaaaaaaaaaaaaaaaaaaaaaaaaacagtgtggggggggcccgggccccgggaaaagttaaaaccatcgggtgggggggggggccccaatgggaaggggaaaaggggcaaagggggtcagggaaacaccggggcagacataaggggtggggatttcctcccaagtaaaaaacagcccccggggggaaccacgcgacgggtttgggaaacaaatcccgaaggaggggggttcggagggtcacatcgggggacttacacaaagggggatccgaggcgaggaccggattatccaaaatgacgcccacggcgcgggatggacacgaaagagaagtcaacaggacacacaacgaaagagacaaaccgaacgatgaaacgagagagcaatggaggacacaacagcgacagcgcacagc

SEQ ID NO: 420207 - DNA, 3768 bp, Homo sapiens
caattcccagctgttccccttgagcccctgcctacaactgagggcacacctggattacctttgcagcaggcagaggagagatacgagtcgcaggagcccttggctggacaggagtcccctctccccctggctaccagggaggcagccttgcccatcctggagccagtcctggggcaggagcagccagcagcccctgaccagccctgtgttctctttgctgatgcccctgagcctggacaggcactgcctgttgaggaggaggccgtgaccctagcccgggctgagaccacccaagccaggacagaggctcaagacttgtgtagggcatcccccgagcctccaggccctgaaagcagctcccgctggctggacgacctcctggcttcaccaccacccagtggtggcggtgcaaggcggggagctggagctgagctgaaggacacacagtccccaagtacctgctctgagggactccttggctggtcccagaaagatctgcagagtgaatttgggatcacaggagacccacagcccagcagtttcagtccttccagctggtgtcaaggtgcttctcaggactatggccttgggggtgcaagccctagaggagacccaggtctcggagagagggactggaccagcaagtatgggcaaggagcaggggaagggagcaccagggagtgggccagcaggtgtggcatcggccaggaggagatggaggccagcagcagccaagaccagagtaaagtgtctgccccaggggtgctcacagcccaggaccgggtagttggaaagccagcccagcttggcactcagcggagccaggaggcagatgttcaggactgggagttcagaaagagggattcccagggcacttactccagccgggatgcagaactccaggaccaggaattcggaaagagagattcactgggtacctacagtagtcgagatgtaagccttggggactgggaatttgggaagagagattctctgggtgcttatgccagccaagatgccaacgagcagggccaagatttggggaagagggaccaccatggtaggtacagcagccaggatgccgatgagcaggactgggagtttcagaagagagatgtgtcactcggcacctatggcagccgggctgcggagccacaggaacaggagtttgggaagagcgcttggataagggactacagcagtggtggcagctccaggacccttgacgcccaggacagaagctttggaacgagacccctgagctctgggttcagccccgaggaagcccagcaacaggatgaggaatttgagaagaagattccaagtgtggaagacagccttggagagggcagcagggatgctggccggccaggagagagaggatccgggggcttgttcagtcctagcactgcccacgtgccggatggggcactcgggcagagagaccagagcagctggcaaaacagtgatgctagccaggaggtgggagggcatcaggagagacagcaggcaggggctcagggccctggcagtgctgacctggaagatggggagatgggaaagcgaggctgggtcggtgagtttagcctcagtgttggcccccagcgagaggcagcatttagcccagggcagcaggactggagccgggacttctgcatcgaggccagtgagaggagctatcagtttggcatcattggcaacgacagagtgagtggtgctggctttagcccttctagcaagatggaaggtggtcactttgtgcctcctgggaagaccacagctggctcggtggactggactgaccagctgggtctcaggaacttggaagtgtccagctgtgtgggttctgggggctcgagcgaggccagggagagtgccgtgggacagatgggctggtcaggtggcctgagcttgagagacatgaacctgaccggctgtttggaaagtggagggtctgaagagccggggggaatcggagttggggagaaggactggacttctgatgttaatgtgaagagcaaagatttggctgaggtcggggagggaggaggccacagccaggccagagagagtggcgtggggcagactgactggtcaggtgtggaggccggagagttccttaaatcaagggagcgtggagttggacaggcagactggacacctgaccttgggctgagaaacatggccccaggggcagtctgcagtcctggagagtccaaagagcttggggtgggccagatggactggggtaacaatctgggcctgagggatttggaggtgacctgtgacccagactctggaggttctcaggggctacggggatgtggagtggggcagatggactggacccaggacttggcgccccagaatgtggagctctttggggctccaagtgaagccagggagcatggggtgggcggggtgagccagtgcccagagcccggcctgaggcacaatggcagcttgtctcctggcctggaggccagagaccccttggaggccaggagctgggggttggtgagacaagtgggccagagacccagggtgaagattactcctcgtcttccttggagccacaccctgcagaccctggaatggagacaggagaagccctcagcttcggagcaagccctggcaggtgcccggcccgccccccaccctccggctcccagggcctgctggaggagatgctggcagccagcagctccaaggcggtggctcggagggagtcagcggcctcgggccttgggggcctgttggaggaggaaggagccggggcaggtgctgcccaagaggaggtgctggagcctggcagggactctccaccctcctggaggccgcagcctgatggtgaggccagccagacagaagacgtggatggcacctggggctcttcagcagccaggtggagcgatcaggggccagcacagacttctcggcgaccctcccaaggccctcctgccagatcccccagtcaggacttctccttcattgaggacaccgagatcctcgacagtgccatgtatcggagccgtgccaacttggggcgcaagcgtgggcaccgggccccggtcattcggcctgggggtaccttgggcctgtcggaggcagcagactcggatgcacacctgttccaggactctacagagccacgggcatctcgggtgccatcttcagatgaagaggtagtggaggaacctcagagccgccggacacggatgtcgttgggcaccaaggggctgaaagtcaacctctttcctggcctgagcccctcagccctgaaggccaagctgcgcccccggaatcgctcagctgaggagggagagctggctgagagcaagtcgagccagaaggagtccgcggtccagcgttcgaaatcctgcaaggtcccaggactgggaaagcccctcacgttacctcccaagccagagaaatcctcagggtcagaaggatcgtcgcccaactggcttcaagccctgaaactgaagaagaagaaggtctgagaagtcactgaggttcttcccacctggcagtctcaggcagtgcccattcctgtggggtccctgggtgaggagacggctggagccccaccatgccccaggctgcagcctctgtcccctccacctctgaggagcgtctggggaggcacatttatgcactttgtatcaccctccgaactccccccacaccttcccttccctggatttcatcactagtggttgaaggttttgtcccttcctctctctctaaagcatgggatcctctaga

SEQ ID NO: 420208 - DNA, 830 bp, Homo sapiens
cccctttcccgggcctttgcagagccacgggcatctcgggtgccatcttcagatgaagaggtagtggaggaacctcagagccgccggacacggatgtcgttgggcaccaaggggctgaaagtcaacctctttcctggcctgagcccctcagccctgaaggccaagctgcgcccccggaatcgctcagctgaggagggagagctggctgagagcaagtcgagccagaaggagtccgcggtccagcgttcgaaatcctgcaaggtcccaggactgggaaagcccctcacgttacctcccaagccagagaaatcctcagggtcagaaggatcgtcgcccaactggcttcaagccctgaaactgaagaagaagaaggtctgagaagtcactgaggttcttcccacctggcagtctcaggcagtgcccattcctgtggggtccctgggtgaggagacggctggagccccaccatgccccaggctgcagcctctgtcccctccacctctgaggagcgtctggggaggcacatttatgcactttgtatcaccctccgaactccccccacaccttcccttccctggatttcatcactagtggttgaaggttttgtcccttcctctcctccttccctctccctctctgcttcctcctccagcctcccttgggttttcttttgataccaatttatagcattttttataaaagcctttgatttttataatgggtgggactgtatccctgcctcaccccaggtctccgtctgccccgccaggtaccccacagagaccaatgacattttgccacttgaaacaataaataaagttttttgggaa

SEQ ID NO: 420209 - DNA, 3732 bp, Homo sapiens
caattcccagctgttccccttgagcccctgcctacaactgagggcacacctggattacctttgcagcaggcagaggagagatacgagtcgcaggagcccttggctggacaggagtcccctctccccctggctaccagggaggcagccttgcccatcctggagccagtcctggggcaggagcagccagcagcccctgaccagccctgtgttctctttgctgatgcccctgagcctggacaggcactgcctgttgaggaggaggccgtgaccctagcccgggctgagaccacccaagccaggacagaggctcaagacttgtgtagggcatcccccgagcctccaggccctgaaagcagctcccgctggctggacgacctcctggcttcaccaccacccagtggtggcggtgcaaggcggggagctggagctgagctgaaggacacacagtccccaagtacctgctctgagggactccttggctggtcccagaaagatctgcagagtgaatttgggatcacaggagacccacagcccagcagtttcagtccttccagctggtgtcaaggtgcttctcaggactatggccttgggggtgcaagccctagaggagacccaggtctcggagagagggactggaccagcaagtatgggcaaggagcaggggaagggagcaccagggagtgggccagcaggtgtggcatcggccaggaggagatggaggccagcagcagccaagaccagagtaaagtgtctgccccaggggtgctcacagcccaggaccgggtagttggaaagccagcccagcttggcactcagcggagccaggaggcagatgttcaggactgggagttcagaaagagggattcccagggcacttactccagccgggatgcagaactccaggaccaggaattcggaaagagagattcactgggtacctacagtagtcgagatgtaagccttggggactgggaatttgggaagagagattctctgggtgcttatgccagccaagatgccaacgagcagggccaagatttggggaagagggaccaccatggtaggtacagcagccaggatgccgatgagcaggactgggagtttcagaagagagatgtgtcactcggcacctatggcagccgggctgcggagccacaggaacaggagtttgggaagagcgcttggataagggactacagcagtggtggcagctccaggacccttgacgcccaggacagaagctttggaacgagacccctgagctctgggttcagccccgaggaagcccagcaacaggatgaggaatttgagaagaagattccaagtgtggaagacagccttggagagggcagcagggatgctggccggccaggagagagaggatccgggggcttgttcagtcctagcactgcccacgtgccggatggggcactcgggcagagagaccagagcagctggcaaaacagtgatgctagccaggaggtgggagggcatcaggagagacagcaggcaggggctcagggccctggcagtgctgacctggaagatggggagatgggaaagcgaggctgggtcggtgagtttagcctcagtgttggcccccagcgagaggcagcatttagcccagggcagcaggactggagccgggacttctgcatcgaggccagtgagaggagctatcagtttggcatcattggcaacgacagagtgagtggtgctggctttagcccttctagcaagatggaaggtggtcactttgtgcctcctgggaagaccacagctggctcggtggactggactgaccagctgggtctcaggaacttggaagtgtccagctgtgtgggttctgggggctcgagcgaggccagggagagtgccgtgggacagatgggctggtcaggtggcctgagcttgagagacatgaacctgaccggctgtttggaaagtggagggtctgaagagccggggggaatcggagttggggagaaggactggacttctgatgttaatgtgaagagcaaagatttggctgaggtcggggagggaggaggccacagccaggccagagagagtggcgtggggcagactgactggtcaggtgtggaggccggagagttccttaaatcaagggagcgtggagttggacaggcagactggacacctgaccttgggctgagaaacatggccccaggggcagtctgcagtcctggagagtccaaagagcttggggtgggccagatggactggggtaacaatctgggcctgagggatttggaggtgacctgtgacccagactctggaggttctcaggggctacggggatgtggagtggggcagatggactggacccaggacttggcgccccagaatgtggagctctttggggctccaagtgaagccagggagcatggggtgggcggggtgagccagtgcccagagcccggcctgaggcacaatggcagcttgtctcctggcctggaggccagagaccccttggaggccaggagctgggggttggtgagacaagtgggccagagacccagggtgaagattactcctcgtcttccttggagccacaccctgcagaccctggaatggagacaggagaagccctcagcttcggagcaagccctggcaggtgcccggcccgccccccaccctccggctcccagggcctgctggaggagatgctggcagccagcagctccaaggcggtggctcggagggagtcagcggcctcgggccttgggggcctgttggaggaggaaggagccggggcaggtgctgcccaagaggaggtgctggagcctggcagggactctccaccctcctggaggccgcagcctgatggtgaggccagccagacagaagacgtggatggcacctggggctcttcagcagccaggtggagcgatcaggggccagcacagacttctcggcgaccctcccaaggccctcctgccagatcccccagtcaggacttctccttcattgaggacaccgagatcctcgacagtgccatgtatcggagccgtgccaacttggggcgcaagcgtgggcaccgggccccggtcattcggcctgggggtaccttgggcctgtcggaggcagcagactcggatgcacacctgttccaggactctacagagccacgggcatctcgggtgccatcttcagatgaagaggtagtggaggaacctcagagccgccggacacggatgtcgttgggcaccaaggggctgaaagtcaacctctttcctggcctgagcccctcagccctgaaggccaagctgcgcccccggaatcgctcagctgaggagggagagctggctgagagcaagtcgagccagaaggagtccgcggtccagcgttcgaaatcctgcaaggtcccaggactgggaaagcccctcacgttacctcccaagccagagaaatcctcagggtcagaaggatcgtcgcccaactggcttcaagccctgaaactgaagaagaagaaggtctgagaagtcactgaggttcttcccacctggcagtctcaggcagtgcccattcagcctcccttgggttttcttttgataccaatttatagcattttttataaaagcctttgatttttataatgggtgggactgtatccctgcctcaccccaggtctccgtctgccccgccaggtaccccacagagaccaatgacattttgccacttgaaacaataaataaagttttttgggaa

SEQ ID NO: 420210 - DNA, 3611 bp, Homo sapiens
caattcccagctgttccccttgagcccctgcctacaactgagggcacacctggattacctttgcagcaggcagaggagagatacgagtcgcaggagcccttggctggacaggagtcccctctccccctggctaccagggaggcagccttgcccatcctggagccagtcctggggcaggagcagccagcagcccctgaccagccctgtgttctctttgctgatgcccctgagcctggacaggcactgcctgttgaggaggaggccgtgaccctagcccgggctgagaccacccaagccaggacagaggctcaagacttgtgtagggcatcccccgagcctccaggccctgaaagcagctcccgctggctggacgacctcctggcttcaccaccacccagtggtggcggtgcaaggcggggagctggagctgagctgaaggacacacagtccccaagtacctgctctgagggactccttggctggtcccagaaagatctgcagagtgaatttgggatcacaggagacccacagcccagcagtttcagtccttccagctggtgtcaaggtgcttctcaggactatggccttgggggtgcaagccctagaggagacccaggtctcggagagagggactggaccagcaagtatgggcaaggagcaggggaagggagcaccagggagtgggccagcaggtgtggcatcggccaggaggagatggaggccagcagcagccaagaccagagtaaagtgtctgccccaggggtgctcacagcccaggaccgggtagttggaaagccagcccagcttggcactcagcggagccaggaggcagatgttcaggactgggagttcagaaagagggattcccagggcacttactccagccgggatgcagaactccaggaccaggaattcggaaagagagattcactgggtacctacagtagtcgagatgtaagccttggggactgggaatttgggaagagagattctctgggtgcttatgccagccaagatgccaacgagcagggccaagatttggggaagagggaccaccatggtaggtacagcagccaggatgccgatgagcaggactgggagtttcagaagagagatgtgtcactcggcacctatggcagccgggctgcggagccacaggaacaggagtttgggaagagcgcttggataagggactacagcagtggtggcagctccaggacccttgacgcccaggacagaagctttggaacgagacccctgagctctgggttcagccccgaggaagcccagcaacaggatgaggaatttgagaagaagattccaagtgtggaagacagccttggagagggcagcagggatgctggccggccaggagagagaggatccgggggcttgttcagtcctagcactgcccacgtgccggatggggcactcgggcagagagaccagagcagctggcaaaacagtgatgctagccaggaggtgggagggcatcaggagagacagcaggcaggggctcagggccctggcagtgctgacctggaagatggggagatgggaaagcgaggctgggtcggtgagtttagcctcagtgttggcccccagcgagaggcagcatttagcccagggcagcaggactggagccgggacttctgcatcgaggccagtgagaggagctatcagtttggcatcattggcaacgacagagtgagtggtgctggctttagcccttctagcaagatggaaggtggtcactttgtgcctcctgggaagaccacagctggctcggtggactggactgaccagctgggtctcaggaacttggaagtgtccagctgtgtgggttctgggggctcgagcgaggccagggagagtgccgtgggacagatgggctggtcaggtggcctgagcttgagagacatgaacctgaccggctgtttggaaagtggagggtctgaagagccggggggaatcggagttggggagaaggactggacttctgatgttaatgtgaagagcaaagatttggctgaggtcggggagggaggaggccacagccaggccagagagagtggcgtggggcagactgactggtcaggtgtggaggccggagagttccttaaatcaagggagcgtggagttggacaggcagactggacacctgaccttgggctgagaaacatggccccaggggcagtctgcagtcctggagagtccaaagagcttggggtgggccagatggactggggtaacaatctgggcctgagggatttggaggtgacctgtgacccagactctggaggttctcaggggctacggggatgtggagtggggcagatggactggacccaggacttggcgccccagaatgtggagctctttggggctccaagtgaagccagggagcatggggtgggcggggtgagccagtgcccagagcccggcctgaggcacaatggcagcttgtctcctggcctggaggccagagaccccttggaggccaggagctgggggttggtgagacaagtgggccagagacccagggtgaagattactcctcgtcttccttggagccacaccctgcagaccctggaatggagacaggagaagccctcagcttcggagcaagccctggcaggtgcccggcccgccccccaccctccggctcccagggcctgctggaggagatgctggcagccagcagctccaaggcggtggctcggagggagtcagcggcctcgggccttgggggcctgttggaggaggaaggagccggggcaggtgctgcccaagaggaggtgctggagcctggcagggactctccaccctcctggaggccgcagcctgatggtgaggccagccagacagaagacgtggatggcacctggggctcttcagcagccaggtggagcgatcaggggccagcacagacttctcggcgaccctcccaaggccctcctgccagatcccccagtcaggacttctccttcattgaggacaccgagatcctcgacagtgccatgtatcggagccgtgccaacttggggcgcaagcgtgggcaccgggccccggtcattcggcctgggggtaccttgggcctgtcggaggcagcagactcggatgcacacctgttccaggactctacagagccacgggcatctcgggtgccatcttcagatgaagaggtagtggaggaacctcagagccgccggacacggatgtcgttgggcaccaaggggctgaaagtcaacctctttcctggcctgagcccctcagccctgaaggccaagctgcgcccccggaatcgctcagctgaggagggagagctggctgagagcaagtcgagccagaaggagtccgcggtccagcgttcgaaatcctgcaaggtcccaggactgggaaagcccctcacgttacctcccaagccagagaaatcctcagggtcagaaggatcgtcgcccaactggcttcaagccctgaaactgaagaagaagaaggtctgagaagtcactgaggttcttcccacctggcagtctcaggcagtgcccattcagggctcaggccaggaaagaggttgactttcagcccctagagtgtcgaatcctcggact

SEQ ID NO: 420211 - DNA, 3609 bp, Homo sapiens
caattcccagctgttccccttgagcccctgcctacaactgagggcacacctggattacctttgcagcaggcagaggagagatacgagtcgcaggagcccttggctggacaggagtcccctctccccctggctaccagggaggcagccttgcccatcctggagccagtcctggggcaggagcagccagcagcccctgaccagccctgtgttctctttgctgatgcccctgagcctggacaggcactgcctgttgaggaggaggccgtgaccctagcccgggctgagaccacccaagccaggacagaggctcaagacttgtgtagggcatcccccgagcctccaggccctgaaagcagctcccgctggctggacgacctcctggcttcaccaccacccagtggtggcggtgcaaggcggggagctggagctgagctgaaggacacacagtccccaagtacctgctctgagggactccttggctggtcccagaaagatctgcagagtgaatttgggatcacaggagacccacagcccagcagtttcagtccttccagctggtgtcaaggtgcttctcaggactatggccttgggggtgcaagccctagaggagacccaggtctcggagagagggactggaccagcaagtatgggcaaggagcaggggaagggagcaccagggagtgggccagcaggtgtggcatcggccaggaggagatggaggccagcagcagccaagaccagagtaaagtgtctgccccaggggtgctcacagcccaggaccgggtagttggaaagccagcccagcttggcactcagcggagccaggaggcagatgttcaggactgggagttcagaaagagggattcccagggcacttactccagccgggatgcagaactccaggaccaggaattcggaaagagagattcactgggtacctacagtagtcgagatgtaagccttggggactgggaatttgggaagagagattctctgggtgcttatgccagccaagatgccaacgagcagggccaagatttggggaagagggaccaccatggtaggtacagcagccaggatgccgatgagcaggactgggagtttcagaagagagatgtgtcactcggcacctatggcagccgggctgcggagccacaggaacaggagtttgggaagagcgcttggataagggactacagcagtggtggcagctccaggacccttgacgcccaggacagaagctttggaacgagacccctgagctctgggttcagccccgaggaagcccagcaacaggatgaggaatttgagaagaagattccaagtgtggaagacagccttggagagggcagcagggatgctggccggccaggagagagaggatccgggggcttgttcagtcctagcactgcccacgtgccggatggggcactcgggcagagagaccagagcagctggcaaaacagtgatgctagccaggaggtgggagggcatcaggagagacagcaggcaggggctcagggccctggcagtgctgacctggaagatggggagatgggaaagcgaggctgggtcggtgagtttagcctcagtgttggcccccagcgagaggcagcatttagcccagggcagcaggactggagccgggacttctgcatcgaggccagtgagaggagctatcagtttggcatcattggcaacgacagagtgagtggtgctggctttagcccttctagcaagatggaaggtggtcactttgtgcctcctgggaagaccacagctggctcggtggactggactgaccagctgggtctcaggaacttggaagtgtccagctgtgtgggttctgggggctcgagcgaggccagggagagtgccgtgggacagatgggctggtcaggtggcctgagcttgagagacatgaacctgaccggctgtttggaaagtggagggtctgaagagccggggggaatcggagttggggagaaggactggacttctgatgttaatgtgaagagcaaagatttggctgaggtcggggagggaggaggccacagccaggccagagagagtggcgtggggcagactgactggtcaggtgtggaggccggagagttccttaaatcaagggagcgtggagttggacaggcagactggacacctgaccttgggctgagaaacatggccccaggggcagtctgcagtcctggagagtccaaagagcttggggtgggccagatggactggggtaacaatctgggcctgagggatttggaggtgacctgtgacccagactctggaggttctcaggggctacggggatgtggagtggggcagatggactggacccaggacttggcgccccagaatgtggagctctttggggctccaagtgaagccagggagcatggggtgggcggggtgagccagtgcccagagcccggcctgaggcacaatggcagcttgtctcctggcctggaggccagagaccccttggaggccaggagctgggggttggtgagacaagtgggccagagacccagggtgaagattactcctcgtcttccttggagccacaccctgcagaccctggaatggagacaggagaagccctcagcttcggagcaagccctggcaggtgcccggcccgccccccaccctccggctcccagggcctgctggaggagatgctggcagccagcagctccaaggcggtggctcggagggagtcagcggcctcgggccttgggggcctgttggaggaggaaggagccggggcaggtgctgcccaagaggaggtgctggagcctggcagggactctccaccctcctggaggccgcagcctgatggtgaggccagccagacagaagacgtggatggcacctggggctcttcagcagccaggtggagcgatcaggggccagcacagacttctcggcgaccctcccaaggccctcctgccagatcccccagtcaggacttctccttcattgaggacaccgagatcctcgacagtgccatgtatcggagccgtgccaacttggggcgcaagcgtgggcaccgggccccggtcattcggcctgggggtaccttgggcctgtcggaggcagcagactcggatgcacacctgttccaggactctacagagccacgggcatctcgggtgccatcttcagatgaagaggtagtggaggaacctcagagccgccggacacggatgtcgttgggcaccaaggggctgaaagtcaacctctttcctggcctgagcccctcagccctgaaggccaagctgcgcccccggaatcgctcagctgaggagggagagctggctgagagcaagtcgagccagaaggagtccgcggtccagcgttcgaaatcctgcaaggtcccaggactgggaaagcccctcacgttacctcccaagccagagaaatcctcagggtcagaaggatcgtcgcccaactggcttcaagccctgaaactgaagaagaagaaggtctgagaagtcactgaggttcttcccacctggcagtctcaggcagtgcccattccccacagagaccaatgacattttgccacttgaaacaataaataaagttttttgggaa

SEQ ID NO: 420212 - DNA, 3149 bp, Homo sapiens
caattcccagctgttccccttgagcccctgcctacaactgagggcacacctggattacctttgcagcaggcagaggagagatacgagtcgcaggagcccttggctggacaggagtcccctctccccctggctaccagggaggcagccttgcccatcctggagccagtcctggggcaggagcagccagcagcccctgaccagccctgtgttctctttgctgatgcccctgagcctggacaggcactgcctgttgaggaggaggccgtgaccctagcccgggctgagaccacccaagccaggacagaggctcaagacttgtgtagggcatcccccgagcctccaggccctgaaagcagctcccgctggctggacgacctcctggcttcaccaccacccagtggtggcggtgcaaggcggggagctggagctgagctgaaggacacacagtccccaagtacctgctctgagggactccttggctggtcccagaaagatctgcagagtgaatttgggatcacaggagacccacagcccagcagtttcagtccttccagctggtgtcaaggtgcttctcaggactatggccttgggggtgcaagccctagaggagacccaggtctcggagagagggactggaccagcaagtatgggcaaggagcaggggaagggagcaccagggagtgggccagcaggtgtggcatcggccaggaggagatggaggccagcagcagccaagaccagagtaaagtgtctgccccaggggtgctcacagcccaggaccgggtagttggaaagccagcccagcttggcactcagcggagccaggaggcagatgttcaggactgggagttcagaaagagggattcccagggcacttactccagccgggatgcagaactccaggaccaggaattcggaaagagagattcactgggtacctacagtagtcgagatgtaagccttggggactgggaatttgggaagagagattctctgggtgcttatgccagccaagatgccaacgagcagggccaagatttggggaagagggaccaccatggtaggtacagcagccaggatgccgatgagcaggactgggagtttcagaagagagatgtgtcactcggcacctatggcagccgggctgcggagccacaggaacaggagtttgggaagagcgcttggataagggactacagcagtggtggcagctccaggacccttgacgcccaggacagaagctttggaacgagacccctgagctctgggttcagccccgaggaagcccagcaacaggatgaggaatttgagaagaagattccaagtgtggaagacagccttggagagggcagcagggatgctggccggccaggagagagaggatccgggggcttgttcagtcctagcactgcccacgtgccggatggggcactcgggcagagagaccagagcagctggcaaaacagtgatgctagccaggaggtgggagggcatcaggagagacagcaggcaggggctcagggccctggcagtgctgacctggaagatggggagatgggaaagcgaggctgggtcggtgagtttagcctcagtgttggcccccagcgagaggcagcatttagcccagggcagcaggactggagccgggacttctgcatcgaggccagtgagaggagctatcagtttggcatcattggcaacgacagagtgagtggtgctggctttagcccttctagcaagatggaaggtggtcactttgtgcctcctgggaagaccacagctggctcggtggactggactgaccagctgggtctcaggaacttggaagtgtccagctgtgtgggttctgggggctcgagcgaggccagggagagtgccgtgggacagatgggctggtcaggtggcctgagcttgagagacatgaacctgaccggctgtttggaaagtggagggtctgaagagccggggggaatcggagttggggagaaggactggacttctgatgttaatgtgaagagcaaagatttggctgaggtcggggagggaggaggccacagccaggccagagagagtggcgtggggcagactgactggtcaggtgtggaggccggagagttccttaaatcaagggagcgtggagttggacaggcagactggacacctgaccttgggctgagaaacatggccccaggggcagtctgcagtcctggagagtccaaagagcttggggtgggccagatggactggggtaacaatctgggcctgagggatttggaggtgacctgtgacccagactctggaggttctcaggggctacggggatgtggagtggggcagatggactggacccaggacttggcgccccagaatgtggagctctttggggctccaagtgaagccagggagcatggggtgggcggggtgagccagtgcccagagcccggcctgaggcacaatggcagcttgtctcctggcctggaggccagagaccccttggaggccaggagctgggggttggtgagacaagtgggccagagacccagggtgaagattactcctcgtcttccttggagccacaccctgcagaccctggaatggagacaggagaagccctcagcttcggagcaagccctggcaggtgcccggcccgccccccaccctccggctcccagggcctgctggaggagatgctggcagccagcagctccaaggcggtggctcggagggagtcagcggcctcgggccttgggggcctgttggaggaggaaggagccggggcaggtgctgcccaagaggaggtgctggagcctggcagggactctccaccctcctggaggccgcagcctgatggtgaggccagccagacagaagacgtggatggcacctggggctcttcagcagccaggtggagcgatcaggggccagcacagacttctcggcgaccctcccaaggccctcctgccagatcccccagtcaggacttctccttcattgaggacaccgagatcctcgacagtgccgatgaatagcgaggtgccgatgaatagcgaggcacctttttttttctataaatttgttgaagttcagttccttacagatgacggatatcagacctttgttggatgcaaagtttacgtgccgaggatagc

SEQ ID NO: 420213 - DNA, 3521 bp, Homo sapiens
  misc_feature (3502)..(3502): n is a, c, g, or t
caattcccagctgttccccttgagcccctgcctacaactgagggcacacctggattacctttgcagcaggcagaggagagatacgagtcgcaggagcccttggctggacaggagtcccctctccccctggctaccagggaggcagccttgcccatcctggagccagtcctggggcaggagcagccagcagcccctgaccagccctgtgttctctttgctgatgcccctgagcctggacaggcactgcctgttgaggaggaggccgtgaccctagcccgggctgagaccacccaagccaggacagaggctcaagacttgtgtagggcatcccccgagcctccaggccctgaaagcagctcccgctggctggacgacctcctggcttcaccaccacccagtggtggcggtgcaaggcggggagctggagctgagctgaaggacacacagtccccaagtacctgctctgagggactccttggctggtcccagaaagatctgcagagtgaatttgggatcacaggagacccacagcccagcagtttcagtccttccagctggtgtcaaggtgcttctcaggactatggccttgggggtgcaagccctagaggagacccaggtctcggagagagggactggaccagcaagtatgggcaaggagcaggggaagggagcaccagggagtgggccagcaggtgtggcatcggccaggaggagatggaggccagcagcagccaagaccagagtaaagtgtctgccccaggggtgctcacagcccaggaccgggtagttggaaagccagcccagcttggcactcagcggagccaggaggcagatgttcaggactgggagttcagaaagagggattcccagggcacttactccagccgggatgcagaactccaggaccaggaattcggaaagagagattcactgggtacctacagtagtcgagatgtaagccttggggactgggaatttgggaagagagattctctgggtgcttatgccagccaagatgccaacgagcagggccaagatttggggaagagggaccaccatggtaggtacagcagccaggatgccgatgagcaggactgggagtttcagaagagagatgtgtcactcggcacctatggcagccgggctgcggagccacaggaacaggagtttgggaagagcgcttggataagggactacagcagtggtggcagctccaggacccttgacgcccaggacagaagctttggaacgagacccctgagctctgggttcagccccgaggaagcccagcaacaggatgaggaatttgagaagaagattccaagtgtggaagacagccttggagagggcagcagggatgctggccggccaggagagagaggatccgggggcttgttcagtcctagcactgcccacgtgccggatggggcactcgggcagagagaccagagcagctggcaaaacagtgatgctagccaggaggtgggagggcatcaggagagacagcaggcaggggctcagggccctggcagtgctgacctggaagatggggagatgggaaagcgaggctgggtcggtgagtttagcctcagtgttggcccccagcgagaggcagcatttagcccagggcagcaggactggagccgggacttctgcatcgaggccagtgagaggagctatcagtttggcatcattggcaacgacagagtgagtggtgctggctttagcccttctagcaagatggaaggtggtcactttgtgcctcctgggaagaccacagctggctcggtggactggactgaccagctgggtctcaggaacttggaagtgtccagctgtgtgggttctgggggctcgagcgaggccagggagagtgccgtgggacagatgggctggtcaggtggcctgagcttgagagacatgaacctgaccggctgtttggaaagtggagggtctgaagagccggggggaatcggagttggggagaaggactggacttctgatgttaatgtgaagagcaaagatttggctgaggtcggggagggaggaggccacagccaggccagagagagtggcgtggggcagactgactggtcaggtgtggaggccggagagttccttaaatcaagggagcgtggagttggacaggcagactggacacctgaccttgggctgagaaacatggccccaggggcagtctgcagtcctggagagtccaaagagcttggggtgggccagatggactggggtaacaatctgggcctgagggatttggaggtgacctgtgacccagactctggaggttctcaggggctacggggatgtggagtggggcagatggactggacccaggacttggcgccccagaatgtggagctctttggggctccaagtgaagccagggagcatggggtgggcggggtgagccagtgcccagagcccggcctgaggcacaatggcagcttgtctcctggcctggaggccagagaccccttggaggccaggagctgggggttggtgagacaagtgggccagagacccagggtgaagattactcctcgtcttccttggagccacaccctgcagaccctggaatggagacaggagaagccctcagcttcggagcaaggtaatgaacggagccccatcccaagtgtgggagggaacatgtgaaggctgtccaagaaatcggaacctttctgaggagggaagaaacagtttttcctgaggacttttagtgtttgggtaattgagacattttggactaagaatttttagttctacttaaaaataattgaaatatgatacacatacaggtgagttcctttttttgaaggatgactaatgtgttacttttgcaacccatgtttgagcttggtgatttggaattgtgactgtgacgggggaaatggtgcatgtcatagcttggatggtttctgatgggttctactcttgtacacagtagccgttccccaggcctctcagccctgaagccacaggtggtttcataggtatagggcagagaattccgtgtcttcttggctggggccaccacagccaggagtggagtggacagtggaacccacgggttctcaaagaggttaggtacttggtgcttcttgcctgtcctgtcttgaagcctggaatagcaagttcaagaacctgaagggtatggggacctggccccatgaccttggcctctgtgcaaatttgctgaaagaactttccaaaggctttgcaaggcaagcacagtctgtttcatggatgttttaaaaccagctgagatggttttgcagctgagaaacgtgctaaaaaggcattgcatccgttttgttaacatttccatccattgagattcgcttttattccctttagtgagcagaaaatgttaaccttttccagccccccaacagctgctatgggggggctaaattatctctactttgtagagaggatctatatttgtagggggttcgggcccaggcccggtccctatctctgngataaactgtcagaccgtg

SEQ ID NO: 420214 - DNA, 3800 bp, Homo sapiens
caattcccagctgttccccttgagcccctgcctacaactgagggcacacctggattacctttgcagcaggcagaggagagatacgagtcgcaggagcccttggctggacaggagtcccctctccccctggctaccagggaggcagccttgcccatcctggagccagtcctggggcaggagcagccagcagcccctgaccagccctgtgttctctttgctgatgcccctgagcctggacaggcactgcctgttgaggaggaggccgtgaccctagcccgggctgagaccacccaagccaggacagaggctcaagacttgtgtagggcatcccccgagcctccaggccctgaaagcagctcccgctggctggacgacctcctggcttcaccaccacccagtggtggcggtgcaaggcggggagctggagctgagctgaaggacacacagtccccaagtacctgctctgagggactccttggctggtcccagaaagatctgcagagtgaatttgggatcacaggagacccacagcccagcagtttcagtccttccagctggtgtcaaggtgcttctcaggactatggccttgggggtgcaagccctagaggagacccaggtctcggagagagggactggaccagcaagtatgggcaaggagcaggggaagggagcaccagggagtgggccagcaggtgtggcatcggccaggaggagatggaggccagcagcagccaagaccagagtaaagtgtctgccccaggggtgctcacagcccaggaccgggtagttggaaagccagcccagcttggcactcagcggagccaggaggcagatgttcaggactgggagttcagaaagagggattcccagggcacttactccagccgggatgcagaactccaggaccaggaattcggaaagagagattcactgggtacctacagtagtcgagatgtaagccttggggactgggaatttgggaagagagattctctgggtgcttatgccagccaagatgccaacgagcagggccaagatttggggaagagggaccaccatggtaggtacagcagccaggatgccgatgagcaggactgggagtttcagaagagagatgtgtcactcggcacctatggcagccgggctgcggagccacaggaacaggagtttgggaagagcgcttggataagggactacagcagtggtggcagctccaggacccttgacgcccaggacagaagctttggaacgagacccctgagctctgggttcagccccgaggaagcccagcaacaggatgaggaatttgagaagaagattccaagtgtggaagacagccttggagagggcagcagggatgctggccggccaggagagagaggatccgggggcttgttcagtcctagcactgcccacgtgccggatggggcactcgggcagagagaccagagcagctggcaaaacagtgatgctagccaggaggtgggagggcatcaggagagacagcaggcaggggctcagggccctggcagtgctgacctggaagatggggagatgggaaagcgaggctgggtcggtgagtttagcctcagtgttggcccccagcgagaggcagcatttagcccagggcagcaggactggagccgggacttctgcatcgaggccagtgagaggagctatcagtttggcatcattggcaacgacagagtgagtggtgctggctttagcccttctagcaagatggaaggtggtcactttgtgcctcctgggaagaccacagctggctcggtggactggactgaccagctgggtctcaggaacttggaagtgtccagctgtgtgggttctgggggctcgagcgaggccagggagagtgccgtgggacagatgggctggtcaggtggcctgagcttgagagacatgaacctgaccggctgtttggaaagtggagggtctgaagagccggggggaatcggagttggggagaaggactggacttctgatgttaatgtgaagagcaaagatttggctgaggtcggggagggaggaggccacagccaggccagagagagtggcgtggggcagactgactggtcaggtgtggaggccggagagttccttaaatcaagggagcgtggagttggacaggcagactggacacctgaccttgggctgagaaacatggccccaggggcagtctgcagtcctggagagtccaaagagcttggggtgggccagatggactggggtaacaatctgggcctgagggatttggaggtgacctgtgacccagactctggaggttctcaggggctacggggatgtggagtggggcagatggactggacccaggacttggcgccccagaatgtggagctctttggggctccaagtgaagccagggagcatggggtgggcggggtgagccagtgcccagagcccggcctgaggcacaatggcagcttgtctcctggcctggaggccagagaccccttggaggccaggagctgggggttggtgagacaagtgggccagagacccagggtgaagattactcctcgtcttccttggagccacaccctgcagaccctggaatggagacaggagaagccctcagcttcggagcaaggtaatgaacggagccccatcccaagtgtgggagggaacatgtgaaggctgtccaagaaatcggaacctttctgaggagggaagaaacagtttttcctgaggacttttagtgtttgggtaattgagacattttggactaagaatttttagttctacttaaaaataattgaaatatgatacacatacaggtgagttcctttttttgaaggatgactaatgtgttacttttgcaacccatgtttgagcttggtgatttggaattgtgactgtgacgggggaaatggtgcatgtcatagcttggatggtttctgatgggttctactcttgtacacagtagccgttccccaggcctctcagccctgaagccacaggtggtttcataggtatagggcagagaattccgtgtcttcttggctggggccaccacagccaggagtggagtggacagtggaacccacgggttctcaaagaggttaggtacttggtgcttcttgcctgtcctgtcttgaagcctggaatagcaagttcaagaacctgaagggtatggggacctggccccatgaccttggcctctgtgcaaatttgctgaaagaactttccaaaggctttgcaaggcaagcacagtctgtttcatggatgttttaaaaccagctgagatggttttgcagctgagaaacgtgctaaaaaggcattgcatccgttttgttaacatttccatccattgagattcgcttttattccctttagtgagcagaaaatgttaaccttttccagccccacagtgggagcttctcactgggtatgtggggaaggcaagggaagtgtggggcaggggcttttataagtggaaggggttggtggtgggaggagaggagcaggaaggggctagagcatatcatggtggtcttggggactctggagaggcatttgggatggaggagaggggagagaggaagatgggcccagtgagatgcccagggggatttgaggaagtggagcttcctgacgactcaggctgttgacggggtggtgacggagcacagggaaccactgaggctgcattgaggactgcagggacgaggggagggcgcaggactaggagttgggaggcccttgtggtcctgggcaggttgctgggctcttccgcccacacacccttatcctaaagattt

SEQ ID NO: 420215 - DNA, 3703 bp, Homo sapiens
caattcccagctgttccccttgagcccctgcctacaactgagggcacacctggattacctttgcagcaggcagaggagagatacgagtcgcaggagcccttggctggacaggagtcccctctccccctggctaccagggaggcagccttgcccatcctggagccagtcctggggcaggagcagccagcagcccctgaccagccctgtgttctctttgctgatgcccctgagcctggacaggcactgcctgttgaggaggaggccgtgaccctagcccgggctgagaccacccaagccaggacagaggctcaagacttgtgtagggcatcccccgagcctccaggccctgaaagcagctcccgctggctggacgacctcctggcttcaccaccacccagtggtggcggtgcaaggcggggagctggagctgagctgaaggacacacagtccccaagtacctgctctgagggactccttggctggtcccagaaagatctgcagagtgaatttgggatcacaggagacccacagcccagcagtttcagtccttccagctggtgtcaaggtgcttctcaggactatggccttgggggtgcaagccctagaggagacccaggtctcggagagagggactggaccagcaagtatgggcaaggagcaggggaagggagcaccagggagtgggccagcaggtgtggcatcggccaggaggagatggaggccagcagcagccaagaccagagtaaagtgtctgccccaggggtgctcacagcccaggaccgggtagttggaaagccagcccagcttggcactcagcggagccaggaggcagatgttcaggactgggagttcagaaagagggattcccagggcacttactccagccgggatgcagaactccaggaccaggaattcggaaagagagattcactgggtacctacagtagtcgagatgtaagccttggggactgggaatttgggaagagagattctctgggtgcttatgccagccaagatgccaacgagcagggccaagatttggggaagagggaccaccatggtaggtacagcagccaggatgccgatgagcaggactgggagtttcagaagagagatgtgtcactcggcacctatggcagccgggctgcggagccacaggaacaggagtttgggaagagcgcttggataagggactacagcagtggtggcagctccaggacccttgacgcccaggacagaagctttggaacgagacccctgagctctgggttcagccccgaggaagcccagcaacaggatgaggaatttgagaagaagattccaagtgtggaagacagccttggagagggcagcagggatgctggccggccaggagagagaggatccgggggcttgttcagtcctagcactgcccacgtgccggatggggcactcgggcagagagaccagagcagctggcaaaacagtgatgctagccaggaggtgggagggcatcaggagagacagcaggcaggggctcagggccctggcagtgctgacctggaagatggggagatgggaaagcgaggctgggtcggtgagtttagcctcagtgttggcccccagcgagaggcagcatttagcccagggcagcaggactggagccgggacttctgcatcgaggccagtgagaggagctatcagtttggcatcattggcaacgacagagtgagtggtgctggctttagcccttctagcaagatggaaggtggtcactttgtgcctcctgggaagaccacagctggctcggtggactggactgaccagctgggtctcaggaacttggaagtgtccagctgtgtgggttctgggggctcgagcgaggccagggagagtgccgtgggacagatgggctggtcaggtggcctgagcttgagagacatgaacctgaccggctgtttggaaagtggagggtctgaagagccggggggaatcggagttggggagaaggactggacttctgatgttaatgtgaagagcaaagatttggctgaggtcggggagggaggaggccacagccaggccagagagagtggcgtggggcagactgactggtcaggtgtggaggccggagagttccttaaatcaagggagcgtggagttggacaggcagactggacacctgaccttgggctgagaaacatggccccaggggcagtctgcagtcctggagagtccaaagagcttggggtgggccagatggactggggtaacaatctgggcctgagggatttggaggtgacctgtgacccagactctggaggttctcaggggctacggggatgtggagtggggcagatggactggacccaggacttggcgccccagaatgtggagctctttggggctccaagtgaagccagggagcatggggtgggcggggtgagccagtgcccagagcccggcctgaggcacaatggcagcttgtctcctggcctggaggccagagaccccttggaggccaggagctgggggttggtgagacaagtgggccagagacccagggtgaagattactcctcgtcttccttggagccacaccctgcagaccctggaatggagacaggagaagccctcagcttcggagcaaggtaatgaacggagccccatcccaagtgtgggagggaacatgtgaaggctgtccaagaaatcggaacctttctgaggagggaagaaacagtttttcctgaggacttttagtgtttgggtaattgagacattttggactaagaatttttagttctacttaaaaataattgaaatatgatacacatacaggtgagttcctttttttgaaggatgactaatgtgttacttttgcaacccatgtttgagcttggtgatttggaattgtgactgtgacgggggaaatggtgcatgtcatagcttggatggtttctgatgggttctactcttgtacacagtagccgttccccaggcctctcagccctgaagccacaggtggtttcataggtatagggcagagaattccgtgtcttcttggctggggccaccacagccaggagtggagtggacagtggaacccacgggttctcaaagaggttaggtacttggtgcttcttgcctgtcctgtcttgaagcctggaatagcaagttcaagaacctgaagggtatggggacctggccccatgaccttggcctctgtgcaaatttgctgaaagaactttccaaaggctttgcaaggcaagcacagtctgtttcatggatgttttaaaaccagctgagatggttttgcagctgagaaacgtgctaaaaaggcattgcatccgttttgttaacatttccatccattgagattcgcttttattccctttagtgagcagaaaatgttaaccttttccagccccacagtgggagcttctcactgggtatgtggggaaggcaagggaagtgtggggcaggggcttttataagtggaaggggttggtggtgggaggagaggagcaggaaggggctagagcatatcatggtggtcttggggactctggagaggcatttgggatttattttattcctataggggctttcacagctttatggctgtcggaatttatgtccccaaacttgcagcaagtatggtgaaggcccctaaatttaattaaacttaggattttatactcttttggcggtgaacctcttatggt

SEQ ID NO: 420216 - DNA, 3795 bp, Homo sapiens
caattcccagctgttccccttgagcccctgcctacaactgagggcacacctggattacctttgcagcaggcagaggagagatacgagtcgcaggagcccttggctggacaggagtcccctctccccctggctaccagggaggcagccttgcccatcctggagccagtcctggggcaggagcagccagcagcccctgaccagccctgtgttctctttgctgatgcccctgagcctggacaggcactgcctgttgaggaggaggccgtgaccctagcccgggctgagaccacccaagccaggacagaggctcaagacttgtgtagggcatcccccgagcctccaggccctgaaagcagctcccgctggctggacgacctcctggcttcaccaccacccagtggtggcggtgcaaggcggggagctggagctgagctgaaggacacacagtccccaagtacctgctctgagggactccttggctggtcccagaaagatctgcagagtgaatttgggatcacaggagacccacagcccagcagtttcagtccttccagctggtgtcaaggtgcttctcaggactatggccttgggggtgcaagccctagaggagacccaggtctcggagagagggactggaccagcaagtatgggcaaggagcaggggaagggagcaccagggagtgggccagcaggtgtggcatcggccaggaggagatggaggccagcagcagccaagaccagagtaaagtgtctgccccaggggtgctcacagcccaggaccgggtagttggaaagccagcccagcttggcactcagcggagccaggaggcagatgttcaggactgggagttcagaaagagggattcccagggcacttactccagccgggatgcagaactccaggaccaggaattcggaaagagagattcactgggtacctacagtagtcgagatgtaagccttggggactgggaatttgggaagagagattctctgggtgcttatgccagccaagatgccaacgagcagggccaagatttggggaagagggaccaccatggtaggtacagcagccaggatgccgatgagcaggactgggagtttcagaagagagatgtgtcactcggcacctatggcagccgggctgcggagccacaggaacaggagtttgggaagagcgcttggataagggactacagcagtggtggcagctccaggacccttgacgcccaggacagaagctttggaacgagacccctgagctctgggttcagccccgaggaagcccagcaacaggatgaggaatttgagaagaagattccaagtgtggaagacagccttggagagggcagcagggatgctggccggccaggagagagaggatccgggggcttgttcagtcctagcactgcccacgtgccggatggggcactcgggcagagagaccagagcagctggcaaaacagtgatgctagccaggaggtgggagggcatcaggagagacagcaggcaggggctcagggccctggcagtgctgacctggaagatggggagatgggaaagcgaggctgggtcggtgagtttagcctcagtgttggcccccagcgagaggcagcatttagcccagggcagcaggactggagccgggacttctgcatcgaggccagtgagaggagctatcagtttggcatcattggcaacgacagagtgagtggtgctggctttagcccttctagcaagatggaaggtggtcactttgtgcctcctgggaagaccacagctggctcggtggactggactgaccagctgggtctcaggaacttggaagtgtccagctgtgtgggttctgggggctcgagcgaggccagggagagtgccgtgggacagatgggctggtcaggtggcctgagcttgagagacatgaacctgaccggctgtttggaaagtggagggtctgaagagccggggggaatcggagttggggagaaggactggacttctgatgttaatgtgaagagcaaagatttggctgaggtcggggagggaggaggccacagccaggccagagagagtggcgtggggcagactgactggtcaggtgtggaggccggagagttccttaaatcaagggagcgtggagttggacaggcagactggacacctgaccttgggctgagaaacatggccccaggggcagtctgcagtcctggagagtccaaagagcttggggtgggccagatggactggggtaacaatctgggcctgagggatttggaggtgacctgtgacccagactctggaggttctcaggggctacggggatgtggagtggggcagatggactggacccaggacttggcgccccagaatgtggagctctttggggctccaagtgaagccagggagcatggggtgggcggggtgagccagtgcccagagcccggcctgaggcacaatggcagcttgtctcctggcctggaggccagagaccccttggaggccaggagctgggggttggtgagacaagtgggccagagacccagggtgaagattactcctcgtcttccttggagccacaccctgcagaccctggaatggagacaggagaagccctcagcttcggagcaaggtaatgaacggagccccatcccaagtgtgggagggaacatgtgaaggctgtccaagaaatcggaacctttctgaggagggaagaaacagtttttcctgaggacttttagtgtttgggtaattgagacattttggactaagaatttttagttctacttaaaaataattgaaatatgatacacatacaggtgagttcctttttttgaaggatgactaatgtgttacttttgcaacccatgtttgagcttggtgatttggaattgtgactgtgacgggggaaatggtgcatgtcatagcttggatggtttctgatgggttctactcttgtacacagtagccgttccccaggcctctcagccctgaagccacaggtggtttcataggtatagggcagagaattccgtgtcttcttggctggggccaccacagccaggagtggagtggacagtggaacccacgggttctcaaagaggttaggtacttggtgcttcttgcctgtcctgtcttgaagcctggaatagcaagttcaagaacctgaagggtatggggacctggccccatgaccttggcctctgtgcaaatttgctgaaagaactttccaaaggctttgcaaggcaagcacagtctgtttcatggatgttttaaaaccagctgagatggttttgcagctgagaaacgtgctaaaaaggcattgcatccgttttgttaacatttccatccattgagattcgcttttattccctttagtgagcagaaaatgttaaccttttccagccccacagtgggagcttctcactgggtatgtggggaaggcaagggaagtgtggggcaggggcttttataagtggaaggggttggtggtgggaggagaggagcaggaaggggctagagcatatcatggtggtcttggggactctggagaggcatttgggatggaggagaggggagagaggaagatgggcccagtgagatgcccagggggatttgaggaagtggagcttcctgacgactcaggctgttgacggggtggtgacggagcacagggaaccactgaggctgcattgaggactgcagggacgaggggagggcgcaggactaggagttgggaggcccttgtggtcctgggcaggttgctgggctctgagcctcagtttctcagggtttgac

SEQ ID NO: 420217 - DNA, 2517 bp, Homo sapiens
caattcccagctgttccccttgagcccctgcctacaactgagggcacacctggattacctttgcagcaggcagaggagagatacgagtcgcaggagcccttggctggacaggagtcccctctccccctggctaccagggaggcagccttgcccatcctggagccagtcctggggcaggagcagccagcagcccctgaccagccctgtgttctctttgctgatgcccctgagcctggacaggcactgcctgttgaggaggaggccgtgaccctagcccgggctgagaccacccaagccaggacagaggctcaagacttgtgtagggcatcccccgagcctccaggccctgaaagcagctcccgctggctggacgacctcctggcttcaccaccacccagtggtggcggtgcaaggcggggagctggagctgagctgaaggacacacagtccccaagtacctgctctgagggactccttggctggtcccagaaagatctgcagagtgaatttgggatcacaggagacccacagcccagcagtttcagtccttccagctggtgtcaaggtgcttctcaggactatggccttgggggtgcaagccctagaggagacccaggtctcggagagagggactggaccagcaagtatgggcaaggagcaggggaagggagcaccagggagtgggccagcaggtgtggcatcggccaggaggagatggaggccagcagcagccaagaccagagtaaagtgtctgccccaggggtgctcacagcccaggaccgggtagttggaaagccagcccagcttggcactcagcggagccaggaggcagatgttcaggactgggagttcagaaagagggattcccagggcacttactccagccgggatgcagaactccaggaccaggaattcggaaagagagattcactgggtacctacagtagtcgagatgtaagccttggggactgggaatttgggaagagagattctctgggtgcttatgccagccaagatgccaacgagcagggccaagatttggggaagagggaccaccatggtaggtacagcagccaggatgccgatgagcaggactgggagtttcagaagagagatgtgtcactcggcacctatggcagccgggctgcggagccacaggaacaggagtttgggaagagcgcttggataagggactacagcagtggtggcagctccaggacccttgacgcccaggacagaagctttggaacgagacccctgagctctgggttcagccccgaggaagcccagcaacaggatgaggaatttgagaagaagattccaagtgtggaagacagccttggagagggcagcagggatgctggccggccaggagagagaggatccgggggcttgttcagtcctagcactgcccacgtgccggatggggcactcgggcagagagaccagagcagctggcaaaacagtgatgctagccaggaggtgggagggcatcaggagagacagcaggcaggggctcagggccctggcagtgctgacctggaagatggggagatgggaaagcgaggctgggtcggtgagtttagcctcagtgttggcccccagcgagaggcagcatttagcccagggcagcaggactggagccgggacttctgcatcgaggccagtgagaggagctatcagtttggcatcattggcaacgacagagtgagtggtgctggctttagcccttctagcaagatggaaggtggtcactttgtgcctcctgggaagaccacagctggctcggtggactggactgaccagctgggtctcaggaacttggaagtgtccagctgtgtgggttctgggggctcgagcgaggccagggagagtgccgtgggacagatgggctggtcaggtggcctgagcttgagagacatgaacctgaccggctgtttggaaagtggagggtctgaagagccggggggaatcggagttggggagaaggactggacttctgatgttaatgtgaagagcaaagatttggctgaggtcggggagggaggaggccacagccaggccagagagagtggcgtggggcagactgactggtcaggtgtggaggccggagagttccttaaatcaagggagcgtggagttggacaggcagactggacacctgaccttgggctgagaaacatggccccaggggcagtctgcagtcctggagagtccaaagagcttggggtgggccagatggactggggtaacaatctgggcctgagggatttggaggtgacctgtgacccagactctggaggttctcaggggctacggggatgtggagtggggcagagcctcccttgggttttcttttgataccaatttatagcattttttataaaagcctttgatttttataatgggtgggactgtatccctgcctcaccccaggtctccgtctgccccgccaggtaccccacagagaccaatgacattttgccacttgaaacaataaataaagttttttgggaa

SEQ ID NO: 420218 - DNA, 2537 bp, Homo sapiens
caattcccagctgttccccttgagcccctgcctacaactgagggcacacctggattacctttgcagcaggcagaggagagatacgagtcgcaggagcccttggctggacaggagtcccctctccccctggctaccagggaggcagccttgcccatcctggagccagtcctggggcaggagcagccagcagcccctgaccagccctgtgttctctttgctgatgcccctgagcctggacaggcactgcctgttgaggaggaggccgtgaccctagcccgggctgagaccacccaagccaggacagaggctcaagacttgtgtagggcatcccccgagcctccaggccctgaaagcagctcccgctggctggacgacctcctggcttcaccaccacccagtggtggcggtgcaaggcggggagctggagctgagctgaaggacacacagtccccaagtacctgctctgagggactccttggctggtcccagaaagatctgcagagtgaatttgggatcacaggagacccacagcccagcagtttcagtccttccagctggtgtcaaggtgcttctcaggactatggccttgggggtgcaagccctagaggagacccaggtctcggagagagggactggaccagcaagtatgggcaaggagcaggggaagggagcaccagggagtgggccagcaggtgtggcatcggccaggaggagatggaggccagcagcagccaagaccagagtaaagtgtctgccccaggggtgctcacagcccaggaccgggtagttggaaagccagcccagcttggcactcagcggagccaggaggcagatgttcaggactgggagttcagaaagagggattcccagggcacttactccagccgggatgcagaactccaggaccaggaattcggaaagagagattcactgggtacctacagtagtcgagatgtaagccttggggactgggaatttgggaagagagattctctgggtgcttatgccagccaagatgccaacgagcagggccaagatttggggaagagggaccaccatggtaggtacagcagccaggatgccgatgagcaggactgggagtttcagaagagagatgtgtcactcggcacctatggcagccgggctgcggagccacaggaacaggagtttgggaagagcgcttggataagggactacagcagtggtggcagctccaggacccttgacgcccaggacagaagctttggaacgagacccctgagctctgggttcagccccgaggaagcccagcaacaggatgaggaatttgagaagaagattccaagtgtggaagacagccttggagagggcagcagggatgctggccggccaggagagagaggatccgggggcttgttcagtcctagcactgcccacgtgccggatggggcactcgggcagagagaccagagcagctggcaaaacagtgatgctagccaggaggtgggagggcatcaggagagacagcaggcaggggctcagggccctggcagtgctgacctggaagatggggagatgggaaagcgaggctgggtcggtgagtttagcctcagtgttggcccccagcgagaggcagcatttagcccagggcagcaggactggagccgggacttctgcatcgaggccagtgagaggagctatcagtttggcatcattggcaacgacagagtgagtggtgctggctttagcccttctagcaagatggaaggtggtcactttgtgcctcctgggaagaccacagctggctcggtggactggactgaccagctgggtctcaggaacttggaagtgtccagctgtgtgggttctgggggctcgagcgaggccagggagagtgccgtgggacagatgggctggtcaggtggcctgagcttgagagacatgaacctgaccggctgtttggaaagtggagggtctgaagagccggggggaatcggagttggggagaaggactggacttctgatgttaatgtgaagagcaaagatttggctgaggtcggggagggaggaggccacagccaggccagagagagtggcgtggggcagactgactggtcaggtgtggaggccggagagttccttaaatcaagggagcgtggagttggacaggcagactggacacctgaccttgggctgagaaacatggccccaggggcagtctgcagtcctggagagtccaaagagcttggggtgggccagatggactggggtaacaatctgggcctgagggatttggaggtgacctgtgacccagactctggaggttctcaggggctacggggatgtggagtggggcagagcctcccttgggttttcttttgataccaatttatagcattttttataaaagcctttgatttttataatgggtgggactgtatccctgcctcaccccaggtctccgtctgccccgccaggtaccccacagagaccaatgacattttgccacttgaaacaataaataaagttttttgggaaaattggtgctgtccaggtgg

SEQ ID NO: 420219 - DNA, 595 bp, Homo sapiens
gtctgtaaagttggatggaccatcaatgggaaaatgagagctgcccaccctggccttacactccttcaattaatacataaacagaaaggaggatatacagagagccaaaggcccatgggacgtgaccaacattccgctgagtctatacgatcaaacagcaaactgtttatcatgaatacagaatgtgggcagctgtggggtccctgggtgaggagacggctggagccccaccatgccccaggctgcagcctctgtcccctccacctctgaggagcgtctggggaggcacatttatgcactttgtatcaccctccgaactccccccacaccttcccttccctggatttcatcactagtggttgaaggttttgtcccttcctctcctccttccctctccctctctgcttcctcctccagcctcccttgggttttcttttgataccaatttatagcattttttataaaagcctttgatttttataatgggtgggactgtatccctgcctcaccccaggtctccgtctgccccgccaggtaccccacagagaccaatgacattttgccacttgaaacaataaataaagttttttgggaa

SEQ ID NO: 420220 - DNA, 2007 bp, Homo sapiens
  misc_feature (1995)..(1995): n is a, c, g, or t
caattcccagctgttccccttgagcccctgcctacaactgagggcacacctggattacctttgcagcaggcagaggagagatacgagtcgcaggagcccttggctggacaggagtcccctctccccctggctaccagggaggcagccttgcccatcctggagccagtcctggggcaggagcagccagcagcccctgaccagccctgtgttctctttgctgatgcccctgagcctggacaggcactgcctgttgaggaggaggccgtgaccctagcccgggctgagaccacccaagccaggacagaggctcaagacttgtgtagggcatcccccgagcctccaggccctgaaagcagctcccgctggctggacgacctcctggcttcaccaccacccagtggtggcggtgcaaggcggggagctggagctgagctgaaggacacacagtccccaagtacctgctctgagggactccttggctggtcccagaaagatctgcagagtgaatttgggatcacaggagacccacagcccagcagtttcagtccttccagctggtgtcaaggtgcttctcaggactatggccttgggggtgcaagccctagaggagacccaggtctcggagagagggactggaccagcaagtatgggcaaggagcaggggaagggagcaccagggagtgggccagcaggtgtggcatcggccaggaggagatggaggccagcagcagccaagaccagagtaaagtgtctgccccaggggtgctcacagcccaggaccgggtagttggaaagccagcccagcttggcactcagcggagccaggaggcagatgttcaggactgggagttcagaaagagggattcccagggcacttactccagccgggatgcagaactccaggaccaggaattcggaaagagagattcactgggtacctacagtagtcgagatgtaagccttggggactgggaatttgggaagagagattctctgggtgcttatgccagccaagatgccaacgagcagggccaagatttggggaagagggaccaccatggtaggtacagcagccaggatgccgatgagcaggactgggagtttcagaagagagatgtgtcactcggcacctatggcagccgggctgcggagccacaggaacaggagtttgggaagagcgcttggataagggactacagcagtggtggcagctccaggacccttgacgcccaggacagaagctttggaacgagacccctgagctctgggttcagccccgaggaagcccagcaacaggatgaggaatttgagaagaagattccaagtgtggaagacagccttggagagggcagcagggatgctggccggccaggagagagaggatccgggggcttgttcagtcctagcactgcccacgtgccggatggggcactcgggcagagagaccagagcagctggcaaaacagtgatgctagccaggaggtgggagggcatcaggagagacagcaggcaggggctcagggccctggcagtgctgacctggaagatggggagatgggaaagcgaggctgggtcggtgagtttagcctcagtgttggcccccagcgagaggcagcatttagcccagggcagcaggactggagccgggacttctgcatcgaggccagtgagaggagctatcagtttggcatcattggcaacgacagagtgagtggtgctggctttagcccttctagcaagatggaaggtggtcactttgtgcctcctgggaagaccacagctggctcggtggactggactgaccagctgggtctcaggaacttggaagtgtccagctgtgtgggttctgggggctcgagcgaggccagggagagtgccgtgggacagatgggctggtcaggtggcctgagcttgagagacatgaacctgaccggctgtttggaaagtggagggtctgaagagccggggggaatctaacttcacccggggatcctntaaaagtcgacc

SEQ ID NO: 420221 - DNA, 397 bp, Homo sapiens
aagtcctgagtgctctgtctgctaatgaatacagattcttgaggatgggggttgagatcgccagagggacccccaaccacccatcagaccttccctcctaagattccagtccctccgaactccccccacaccttcccttccctggatttcatcactagtggttgaaggttttgtcccttcctctcctccttccctctccctctctgcttcctcctccagcctcccttgggttttcttttgataccaatttatagcattttttataaaagcctttgatttttataatgggtgggactgtatccctgcctcaccccaggtctccgtctgccccgccaggtaccccacagagaccaatgacattttgccacttgaaacaataaataaagttttttgggaa

SEQ ID NO: 420222 - DNA, 1633 bp, Homo sapiens
caattcccagctgttccccttgagcccctgcctacaactgagggcacacctggattacctttgcagcaggcagaggagagatacgagtcgcaggagcccttggctggacaggagtcccctctccccctggctaccagggaggcagccttgcccatcctggagccagtcctggggcaggagcagccagcagcccctgaccagccctgtgttctctttgctgatgcccctgagcctggacaggcactgcctgttgaggaggaggccgtgaccctagcccgggctgagaccacccaagccaggacagaggctcaagacttgtgtagggcatcccccgagcctccaggccctgaaagcagctcccgctggctggacgacctcctggcttcaccaccacccagtggtggcggtgcaaggcggggagctggagctgagctgaaggacacacagtccccaagtacctgctctgagggactccttggctggtcccagaaagatctgcagagtgaatttgggatcacaggagacccacagcccagcagtttcagtccttccagctggtgtcaaggtgcttctcaggactatggccttgggggtgcaagccctagaggagacccaggtctcggagagagggactggaccagcaagtatgggcaaggagcaggggaagggagcaccagggagtgggccagcaggtgtggcatcggccaggaggagatggaggccagcagcagccaagaccagagtaaagtgtctgccccaggggtgctcacagcccaggaccgggtagttggaaagccagcccagcttggcactcagcggagccaggaggcagatgttcaggactgggagttcagaaagagggattcccagggcacttactccagccgggatgcagaactccaggaccaggaattcggaaagagagattcactgggtacctacagtagtcgagatgtaagccttggggactgggaatttgggaagagagattctctgggtgcttatgccagccaagatgccaacgagcagggccaagatttggggaagagggaccaccatggtaggtacagcagccaggatgccgatgagcaggactgggagtttcagaagagagatgtgtcactcggcacctatggcagccgggctgcggagccacaggaacaggagtttgggaagagcgcttggataagggactacagcagtggtggcagctccaggacccttgacgcccaggacagaagctttggaacgagacccctgagctctgggttcagccccgaggaagcccagcaacaggatggcagcaccctcttcaggggatggtcccaggaggggccagtaaagtctccagcagagtgccgggaagagcacagcaagacccctgaggagaggagccttccttccgacctggccttcaacggggacctggctaaggcagccagctcggagctacagcctcccttgggttttcttttgataccaatttatagcattttttataaaagcctttgatttttataatgggtgggactgtatccctgcctcaccccaggtctccgtctgccccgccaggtaccccacagagaccaatgacattttgccacttgaaacaataaataaagttttttgggaa

SEQ ID NO: 420223 - DNA, 1357 bp, Homo sapiens
caattcccagctgttccccttgagcccctgcctacaactgagggcacacctggattacctttgcagcaggcagaggagagatacgagtcgcaggagcccttggctggacaggagtcccctctccccctggctaccagggaggcagccttgcccatcctggagccagtcctggggcaggagcagccagcagcccctgaccagccctgtgttctctttgctgatgcccctgagcctggacaggcactgcctgttgaggaggaggccgtgaccctagcccgggctgagaccacccaagccaggacagaggctcaagacttgtgtagggcatcccccgagcctccaggccctgaaagcagctcccgctggctggacgacctcctggcttcaccaccacccagtggtggcggtgcaaggcggggagctggagctgagctgaaggacacacagtccccaagtacctgctctgagggactccttggctggtcccagaaagatctgcagagtgaatttgggatcacaggagacccacagcccagcagtttcagtccttccagctggtgtcaaggtgcttctcaggactatggccttgggggtgcaagccctagaggagacccaggtctcggagagagggactggaccagcaagtatgggcaaggagcaggggaagggagcaccagggagtgggccagcaggtgtggcatcggccaggaggagatggaggccagcagcagccaagaccagagtaaagtgtctgccccaggggtgctcacagcccaggaccgggtagttggaaagccagcccagcttggcactcagcggagccaggaggcagatgttcaggactgggagttcagaaagagggattcccagggcacttactccagccgggatgcagaactccaggaccaggaattcggaaagagagattcactgggtacctacagtagtcgagatgtaagccttggggactgggaatttgggaagagagattctctgggtgcttatgccagccaagatgccaacgagcagggccaagatttggggaagagggaccaccatggtaggtacagcagccaggatgccgatgagcaggactgggagtttcagaagagagatgtgtcactcggcacctatggcagccgggctgcggagccacaggaacaggagtttgggaagagcgcttggataagggactacagcagtggtggcagctccaggacccttgacgcccaggacagaagctttggaacgagacccctgagctctgggttcagccccgaggaagcccagcaacaggatgaggaatttgagaagaagattccaagtgtgagaaattgaacggggtcctctaagatcg

SEQ ID NO: 420224 - DNA, 1208 bp, Homo sapiens
caattcccagctgttccccttgagcccctgcctacaactgagggcacacctggattacctttgcagcaggcagaggagagatacgagtcgcaggagcccttggctggacaggagtcccctctccccctggctaccagggaggcagccttgcccatcctggagccagtcctggggcaggagcagccagcagcccctgaccagccctgtgttctctttgctgatgcccctgagcctggacaggcactgcctgttgaggaggaggccgtgaccctagcccgggctgagaccacccaagccaggacagaggctcaagacttgtgtagggcatcccccgagcctccaggccctgaaagcagctcccgctggctggacgacctcctggcttcaccaccacccagtggtggcggtgcaaggcggggagctggagctgagctgaaggacacacagtccccaagtacctgctctgagggactccttggctggtcccagaaagatctgcagagtgaatttgggatcacaggagacccacagcccagcagtttcagtccttccagctggtgtcaaggtgcttctcaggactatggccttgggggtgcaagccctagaggagacccaggtctcggagagagggactggaccagcaagtatgggcaaggagcaggggaagggagcaccagggagtgggccagcaggtgtggcatcggccaggaggagatggaggccagcagcagccaagaccagagtaaagtgtctgccccaggggtgctcacagcccaggaccgggtagttggaaagccagcccagcttggcactcagcggagccaggaggcagatgttcaggactgggagttcagaaagagggattcccagggcacttactccagccgggatgcagaactccaggaccaggaattcggaaagagagattcactgggtacctacagtagtcgagatgtaagccttggggactgggaatttgggaagagagattctctgggtgcttatgccagccaagatgccaacgagcagggccaagatttggggaagagggaccaccatggtaggtacagcagccaggatgccgatgagcaggactgggagtttcagaagagagatgtgtcactcggcacctatggcagccgggctgcggagccacaggaacaggagtttgggaagagcggcaacacggggcagagcgcaacaccggg

SEQ ID NO: 420225 - DNA, 1319 bp, Homo sapiens
caattcccagctgttccccttgagcccctgcctacaactgagggcacacctggattacctttgcagcaggcagaggagagatacgagtcgcaggagcccttggctggacaggagtcccctctccccctggctaccagggaggcagccttgcccatcctggagccagtcctggggcaggagcagccagcagcccctgaccagccctgtgttctctttgctgatgcccctgagcctggacaggcactgcctgttgaggaggaggccgtgaccctagcccgggctgagaccacccaagccaggacagaggctcaagacttgtgtagggcatcccccgagcctccaggccctgaaagcagctcccgctggctggacgacctcctggcttcaccaccacccagtggtggcggtgcaaggcggggagctggagctgagctgaaggacacacagtccccaagtacctgctctgagggactccttggctggtcccagaaagatctgcagagtgaatttgggatcacaggagacccacagcccagcagtttcagtccttccagctggtgtcaaggtgcttctcaggactatggccttgggggtgcaagccctagaggagacccaggtctcggagagagggactggaccagcaagtatgggcaaggagcaggggaagggagcaccagggagtgggccagcaggtgtggcatcggccaggaggagatggaggccagcagcagccaagaccagagtaaagtgtctgccccaggggtgctcacagcccaggaccgggtagttggaaagccagcccagcttggcactcagcggagccaggaggcagatgttcaggactgggagttcagaaagagggattcccagggcacttactccagccgggatgcagaactccaggaccaggaattcggaaagagagattcactgggtacctacagtagtcgagatgtaagccttggggactgggaatttgggaagagagattctctgggtgcttatgccagccaagatgccaacgagcagggccaagatttggggaagagggaccaccatggtaggtacagcagccaggatgccgatgagcaggactgggagtttcagaagagagatgtgtcactcggcacctatggcagccgggctgcggagccacaggaacaggagtttgggaagagcgcttggataagggactacagcagtggtggcagctccaggacccttgacgcccaggacagaagctttggaacgagacccctgagctccgccatgcgttctcgcagtcacgaacgcttagcaggacgacggaccaggtagca

SEQ ID NO: 420226 - DNA, 1032 bp, Homo sapiens
  misc_feature (41)..(41): n is a, c, g, or t
cggcggcggggactggcatcggggccccgagccgagcggancggaccccgggcgagcgcgtctgcagccaccccagctcatacctctctgcctccccgctctcaaggagggtctgccgcatgtgatgaaagtgtctactctcagggaaagctcagccatggcttccccactgccccgggagatggaggaggagctggtgcctactggctctgagccaggtgacactcgggccaaaccccctgtcaagcccaaaccccgggccctgcctgccaagccagccctgcctgccaaacccagcctgctggtgcctgttgggcctcggcctccccggggtcccctggctgagttgccttctgccaggaagatgaacatgctggcaggaccccagccctatggtggcagcaagcgcccccttccctttgcaccaaggcctgcggttgaggcctccactggaggagaagccacccaagagactgggaaagaggaggctgggaaagaggagccaccccctttgacacccccagctcgatgtgcagccccagggggtgtacggaaggcccctgcccctttccgcccagcctcagagcgcttcgcggccaccacggtggaagagatcctggccaagatggagcagcctcggaaggaggtccttgccagccccgaccgcctgtggggttcccgcctcacctttaaccacgatggcagctcgcgatatggccccaggacctatggcacgaccactgctcccagggatgaggatggcagcaccctcttcaggggatggtcccaggaggggccagtaaagtctccagcagagtgccgggaagagcacagcaagacccctgaggagaggagccttccttccgacctggccttcaacggggacctggctaaggcagccagctcggagctacctgctgatatttccaagccctggattccctcaagtccagccccctcctcagagaatggaggccctgccagcccaggcctccccgcagaagcctcaggctcaggccctggctctcccca

SEQ ID NO: 420227 - DNA, 467 bp, Homo sapiens
tgcctcttctggttagagggtggtttctgtccctatcacgtctccttgttgtgttcagtttcctcaaagtttgcattctggacctttgccgtctgcctcctaggtcagaaggatcgtcgcccaactggcttcaagccctgaaactgaagaagaagaaggtctgagaagtcactgaggtgaggacaggttcctgggcttggatccagtctgaggagggcctgccctggaggcttcggaggcctcatgccccttctgtcccttagctcccacccctttctgtgcaagtttagaaacagcaggtgaagccaagctccagagactcggtaggcccttggcttctctagattttgtccacagggaggtcaggttgttgtctggcctggtgtggaagaggagaagggctaccatcctggcctgcttccctgtgctcagggacagtccccccatgctccctggctggacggaga

SEQ ID NO: 420228 - DNA, 873 bp, Homo sapiens
gtccgtggctgtgcagcttgggtgtcctgtgctcggcttaggggcacaggcttgcgggcggacctagggacggcggaggcatcgtgtccttcctgcaggaaggaaggagcttccggagctttcctgggaggctcactggggccgcggagataacctgaggtcctgcaacaggctgggggcccaaggaccatcccaggccttggaacagttggtatctttcagtcgccgccctggagaggcaggtgtttgacttcctgggctaccagtgggcgcccatcctggccaactttgtccacatcatcatcgtcatcctgggactcttcggcaccatccagtaccggctgcgctacgtcatggtgtacacgctgtgggcagccgtctgggtcacctggaacgtcttcatcatctgcttctacctggaagtcggtggcctcttaaaggacagcgagctactgaccttcagcctctcccggcatcgctcctggtggcgtgagcgctggccaggctgtctgcatgaggaggtgccagcagtgggcctcggggccccccatggccaggccctggtgtcaggtgctggctgtgccctggagcccagctatgtggaggccctacacagttgcctgcagatcctgatcgcgcttctgggctttgtctgtggctgccaggtggtcagcgtgtttacggaggaagaggacagctgtgagtatggggcctctgcaggcagtggggcgggagacggctacagaggtggcagctctgagtctgtcccgtctggggcaaggcgagagacctccccacttggaagggacctcacgcccagcagggccttgctcacggccgtaggcctgagcgaggactcgccacacaccaggg

SEQ ID NO: 420229 - DNA, 588 bp, Homo sapiens
aactttatttacaaaagcagctggcagctctttggggtgctctcttgggggtggcttctggggtgctctgcagtggaggcctgtgctgtccacgtgtaatgtcagcccggtgaggcgaggacaggtcacggcagctcagccaggatgctgtgtccgtacgccgacctgcgctggggctcccttgagctggctgtcccaccgcctcattcccggggcacccacgtgggaaagctctgagacgtgtcccaggtgggcttgggggacccctttctccatgctgtgcatctgggggccgccagactcaggagcagaggccgcccctcctatgcgatcatgggaccccttcccccgggggctggatgcaagcaggtgtgcccgggagctgtgttcagccgccgccccatcctctcctctccctagtacacgctgtgggcagccgtctgggtcacctggaacgtcttcatcatctgcttctacctggaagtcggtggcctcttaaaggggctctctgctctggccagtgtagcacaggtgggcactggggcaggtgcccagccaggcagacgggcccccgcttcctggaaccac

SEQ ID NO: 420230 - DNA, 1438 bp, Homo sapiens
gagcgggtccaggctgcggcgcgtggggagcgggcggagcgggggcgggggccgagcgcggggcacccgggggcctcctgtataggcgggcaccatgggctcctgctccggccgctgcgcgctcgtcgtcctctgcgcttttcagctggtcgccgccctggagaggcaggtgtttgacttcctgggctaccagtgggcgcccatcctggccaactttgtccacatcatcatcgtcatcctgggactcttcggcaccatccagtaccggctgcgctacgtcatggtgtacacgctgtgggcagccgtctgggtcacctggaacgtcttcatcatctgcttctacctggaagtcggtggcctcttaaaggacagcgagctactgaccttcagcctctcccggcatcgctcctggtggcgtgagcgctggccaggctgtctgcatgaggaggtgccagcagtgggcctcggggccccccatggccaggccctggtgtcaggtgctggctgtgccctggagcccagctatgtggaggccctacacagttgcctgcagatcctgatcgcgcttctgggctttgtctgtggctgccaggtggtcagcgtgtttacggaggaagaggacagctttgatttcattggtggatttgatccatttcctctctaccatgtcaatgaaaagccatccagtctcttgtccaagcaggtgtacttgcctgcgtaagtgaggaaacagctgatcctgctcctgtggcctccagcctcagcgaccgaccagtgacaatgacaggagctcccaggccttgggacgcgcccccacccagcaccccccaggcggccggcagcacctgccctgggttctaagtactggacaccagccagggcggcagggcagtgccacggctggctgcagcgtcaagagagtttgtaatttcctttctcttaaaaaaaaaaaagaaaagaaaacatacaaaagaaaaggcaaaaccccacatgcccacctcctctggcaacatgggggtcacagctctgcccccaggctgtcgtctcgtcgaggagcccctccctcaggtgcccacctggggctgctggaccctcgggctgcaagcactgctgctgggatgcagcctccccaggaagtcaatgtgaggcccgagacccctcaagcggtgagggcccctgttgaacatggagggttcctaaccccaaactcgtgccagaagaacccccaccccacccaggagctgaggctgatggagccctagggtgggggctgggcttgaccaggaacagcagagccaggccccaaggcatagggcagggcacatggtggtgacgagcaggcagtactcttgtaaagggggctcttgggcaaacagtcccaaaggctcccccaggtatcatcaagttggtaaataaacaggaacatggccctcaaaaa

SEQ ID NO: 420231 - DNA, 1511 bp, Homo sapiens
gtccgtggctgtgcagcttgggtgtcctgtgctcggcttaggggcacaggcttgcgggcggacctagggacggcggaggcatcgtgtccttcctgcaggaaggaaggagcttccggagctttcctgggaggctcactggggccgcggagataacctgaggtcctgcaacaggctgggggcccaaggaccatcccaggccttggaacagttggtatctttcagtcgccgccctggagaggcaggtgtttgacttcctgggctaccagtgggcgcccatcctggccaactttgtccacatcatcatcgtcatcctgggactcttcggcaccatccagtaccggctgcgctacgtcatggtgtacacgctgtgggcagccgtctgggtcacctggaacgtcttcatcatctgcttctacctggaagtcggtggcctcttaaaggacagcgagctactgaccttcagcctctcccggcatcgctcctggtggcgtgagcgctggccaggctgtctgcatgaggaggtgccagcagtgggcctcggggccccccatggccaggccctggtgtcaggtgctggctgtgccctggagcccagctatgtggaggccctacacagttgcctgcagatcctgatcgcgcttctgggctttgtctgtggctgccaggtggtcagcgtgtttacggaggaagaggacagctttgatttcattggtggatttgatccatttcctctctaccatgtcaatgaaaagccatccagtctcttgtccaagcaggtgtacttgcctgcgtaagtgaggaaacagctgatcctgctcctgtggcctccagcctcagcgaccgaccagtgacaatgacaggagctcccaggccttgggacgcgcccccacccagcaccccccaggcggccggcagcacctgccctgggttctaagtactggacaccagccagggcggcagggcagtgccacggctggctgcagcgtcaagagagtttgtaatttcctttctcttaaaaaaaaaaaagaaaagaaaacatacaaaagaaaaggcaaaaccccacatgcccacctcctctggcaacatgggggtcacagctctgcccccaggctgtcgtctcgtcgaggagcccctccctcaggtgcccacctggggctgctggaccctcgggctgcaagcactgctgctgggatgcagcctccccaggaagtcaatgtgaggcccgagacccctcaagcggtgagggcccctgttgaacatggagggttcctaaccccaaactcgtgccagaagaacccccaccccacccaggagctgaggctgatggagccctagggtgggggctgggcttgaccaggaacagcagagccaggccccaaggcatagggcagggcacatggtggtgacgagcaggcagtactcttgtaaagggggctcttgggcaaacagtcccaaaggctcccccaggtatcatcaagttggtaaataaacaggaacatggccctcaaaaa

SEQ ID NO: 420232 - DNA, 1407 bp, Homo sapiens
gcagtccaactcccaccccgggccccggaccgcagctggtcgtagtggccgcggaggacggcagcttttgggggccgggcgggagaagcgtccgttcatccgcggaaccaagctgaggtcgccgccctggagaggcaggtgtttgacttcctgggctaccagtgggcgcccatcctggccaactttgtccacatcatcatcgtcatcctgggactcttcggcaccatccagtaccggctgcgctacgtcatggtgtacacgctgtgggcagccgtctgggtcacctggaacgtcttcatcatctgcttctacctggaagtcggtggcctcttaaaggacagcgagctactgaccttcagcctctcccggcatcgctcctggtggcgtgagcgctggccaggctgtctgcatgaggaggtgccagcagtgggcctcggggccccccatggccaggccctggtgtcaggtgctggctgtgccctggagcccagctatgtggaggccctacacagttgcctgcagatcctgatcgcgcttctgggctttgtctgtggctgccaggtggtcagcgtgtttacggaggaagaggacagctttgatttcattggtggatttgatccatttcctctctaccatgtcaatgaaaagccatccagtctcttgtccaagcaggtgtacttgcctgcgtaagtgaggaaacagctgatcctgctcctgtggcctccagcctcagcgaccgaccagtgacaatgacaggagctcccaggccttgggacgcgcccccacccagcaccccccaggcggccggcagcacctgccctgggttctaagtactggacaccagccagggcggcagggcagtgccacggctggctgcagcgtcaagagagtttgtaatttcctttctcttaaaaaaaaaaaagaaaagaaaacatacaaaagaaaaggcaaaaccccacatgcccacctcctctggcaacatgggggtcacagctctgcccccaggctgtcgtctcgtcgaggagcccctccctcaggtgcccacctggggctgctggaccctcgggctgcaagcactgctgctgggatgcagcctccccaggaagtcaatgtgaggcccgagacccctcaagcggtgagggcccctgttgaacatggagggttcctaaccccaaactcgtgccagaagaacccccaccccacccaggagctgaggctgatggagccctagggtgggggctgggcttgaccaggaacagcagagccaggccccaaggcatagggcagggcacatggtggtgacgagcaggcagtactcttgtaaagggggctcttgggcaaacagtcccaaaggctcccccaggtatcatcaagttggtaaataaacaggaacatggccctcaaaaa

SEQ ID NO: 420233 - DNA, 1572 bp, Homo sapiens
aactttatttacaaaagcagctggcagctctttggggtgctctcttgggggtggcttctggggtgctctgcagtggaggcctgtgctgtccacgtgtaatgtcagcccggtgaggcgaggacaggtcacggcagctcagccaggatgctgtgtccgtacgccgacctgcgctggggctcccttgagctggctgtcccaccgcctcattcccggggcacccacgtgggaaagctctgagacgtgtcccaggtgggcttgggggacccctttctccatgctgtgcatctgggggccgccagactcaggagcagaggccgcccctcctatgcgatcatgggaccccttcccccgggggctggatgcaagcaggtgtgcccgggagctgtgttcagccgccgccccatcctctcctctccctagtacacgctgtgggcagccgtctgggtcacctggaacgtcttcatcatctgcttctacctggaagtcggtggcctcttaaaggacagcgagctactgaccttcagcctctcccggcatcgctcctggtggcgtgagcgctggccaggctgtctgcatgaggaggtgccagcagtgggcctcggggccccccatggccaggccctggtgtcaggtgctggctgtgccctggagcccagctatgtggaggccctacacagttgcctgcagatcctgatcgcgcttctgggctttgtctgtggctgccaggtggtcagcgtgtttacggaggaagaggacagctttgatttcattggtggatttgatccatttcctctctaccatgtcaatgaaaagccatccagtctcttgtccaagcaggtgtacttgcctgcgtaagtgaggaaacagctgatcctgctcctgtggcctccagcctcagcgaccgaccagtgacaatgacaggagctcccaggccttgggacgcgcccccacccagcaccccccaggcggccggcagcacctgccctgggttctaagtactggacaccagccagggcggcagggcagtgccacggctggctgcagcgtcaagagagtttgtaatttcctttctcttaaaaaaaaaaaagaaaagaaaacatacaaaagaaaaggcaaaaccccacatgcccacctcctctggcaacatgggggtcacagctctgcccccaggctgtcgtctcgtcgaggagcccctccctcaggtgcccacctggggctgctggaccctcgggctgcaagcactgctgctgggatgcagcctccccaggaagtcaatgtgaggcccgagacccctcaagcggtgagggcccctgttgaacatggagggttcctaaccccaaactcgtgccagaagaacccccaccccacccaggagctgaggctgatggagccctagggtgggggctgggcttgaccaggaacagcagagccaggccccaaggcatagggcagggcacatggtggtgacgagcaggcagtactcttgtaaagggggctcttgggcaaacagtcccaaaggctcccccaggtatcatcaagttggtaaataaacaggaacatggccctcaaaaa

SEQ ID NO: 420234 - DNA, 1159 bp, Homo sapiens
ccctggcagagatctgcaggtgaatggacaccaccctcctggggccacgtggggtcctttgtcccagcccgaccaaccctccaggctggacagcgagctactgaccttcagcctctcccggcatcgctcctggtggcgtgagcgctggccaggctgtctgcatgaggaggtgccagcagtgggcctcggggccccccatggccaggccctggtgtcaggtgctggctgtgccctggagcccagctatgtggaggccctacacagttgcctgcagatcctgatcgcgcttctgggctttgtctgtggctgccaggtggtcagcgtgtttacggaggaagaggacagctttgatttcattggtggatttgatccatttcctctctaccatgtcaatgaaaagccatccagtctcttgtccaagcaggtgtacttgcctgcgtaagtgaggaaacagctgatcctgctcctgtggcctccagcctcagcgaccgaccagtgacaatgacaggagctcccaggccttgggacgcgcccccacccagcaccccccaggcggccggcagcacctgccctgggttctaagtactggacaccagccagggcggcagggcagtgccacggctggctgcagcgtcaagagagtttgtaatttcctttctcttaaaaaaaaaaaagaaaagaaaacatacaaaagaaaaggcaaaaccccacatgcccacctcctctggcaacatgggggtcacagctctgcccccaggctgtcgtctcgtcgaggagcccctccctcaggtgcccacctggggctgctggaccctcgggctgcaagcactgctgctgggatgcagcctccccaggaagtcaatgtgaggcccgagacccctcaagcggtgagggcccctgttgaacatggagggttcctaaccccaaactcgtgccagaagaacccccaccccacccaggagctgaggctgatggagccctagggtgggggctgggcttgaccaggaacagcagagccaggccccaaggcatagggcagggcacatggtggtgacgagcaggcagtactcttgtaaagggggctcttgggcaaacagtcccaaaggctcccccaggtatcatcaagttggtaaataaacaggaacatggccctcaaaaa

SEQ ID NO: 420235 - DNA, 1244 bp, Homo sapiens
caatcctagtttggggctcagaataggtggctgcaccgcccctgggctgcccaggcccccagacacacctgatggcacgcccctgggtagcccctggctcttctctcctaaaaatgagggctgtcccggcaggggccgttcaaggtagcaggagcccagctcccatgtcagagaacaggggaataaagacctgggaaggggtggggtcacacgcagaccctgagccagggacccaggcacacccctgggtgagccccctctccactcccagccccacaggccagaccccactgagttgtcagcaaacaggcacaagacgctgacctgccggcacagggagaggcagtgggggctttccagagcctcagtcccacccatctcctttctgccaaaggcctgaagccgtccactgcttggactttgttccatttcaggttctccaaggggagggggtggcagcccccagtggccgccccagccctgttcccccaggtgctctctgaccttgtccccacaggcctgcgtaagtgaggaaacagctgatcctgctcctgtggcctccagcctcagcgaccgaccagtgacaatgacaggagctcccaggccttgggacgcgcccccacccagcaccccccaggcggccggcagcacctgccctgggttctaagtactggacaccagccagggcggcagggcagtgccacggctggctgcagcgtcaagagagtttgtaatttcctttctcttaaaaaaaaaaaagaaaagaaaacatacaaaagaaaaggcaaaaccccacatgcccacctcctctggcaacatgggggtcacagctctgcccccaggctgtcgtctcgtcgaggagcccctccctcaggtgcccacctggggctgctggaccctcgggctgcaagcactgctgctgggatgcagcctccccaggaagtcaatgtgaggcccgagacccctcaagcggtgagggcccctgttgaacatggagggttcctaaccccaaactcgtgccagaagaacccccaccccacccaggagctgaggctgatggagccctagggtgggggctgggcttgaccaggaacagcagagccaggccccaaggcatagggcagggcacatggtggtgacgagcaggcagtactcttgtaaagggggctcttgggcaaacagtcccaaaggctcccccaggtatcatcaagttggtaaataaacaggaacatggccctcaaaaa

SEQ ID NO: 420236 - DNA, 959 bp, Homo sapiens
cctgaggctgggctggcaagaagcccctcagccttgtcgggaaccctggcgtatgcatctggcaaggctggcgccacgtgacccagcttctgggctttgtctgtggctgccaggtggtcagcgtgtttacggaggaagaggacagctttgatttcattggtggatttgatccatttcctctctaccatgtcaatgaaaagccatccagtctcttgtccaagcaggtgtacttgcctgcgtaagtgaggaaacagctgatcctgctcctgtggcctccagcctcagcgaccgaccagtgacaatgacaggagctcccaggccttgggacgcgcccccacccagcaccccccaggcggccggcagcacctgccctgggttctaagtactggacaccagccagggcggcagggcagtgccacggctggctgcagcgtcaagagagtttgtaatttcctttctcttaaaaaaaaaaaagaaaagaaaacatacaaaagaaaaggcaaaaccccacatgcccacctcctctggcaacatgggggtcacagctctgcccccaggctgtcgtctcgtcgaggagcccctccctcaggtgcccacctggggctgctggaccctcgggctgcaagcactgctgctgggatgcagcctccccaggaagtcaatgtgaggcccgagacccctcaagcggtgagggcccctgttgaacatggagggttcctaaccccaaactcgtgccagaagaacccccaccccacccaggagctgaggctgatggagccctagggtgggggctgggcttgaccaggaacagcagagccaggccccaaggcatagggcagggcacatggtggtgacgagcaggcagtactcttgtaaagggggctcttgggcaaacagtcccaaaggctcccccaggtatcatcaagttggtaaataaacaggaacatggccctcaaaaa

SEQ ID NO: 420237 - DNA, 1426 bp, Homo sapiens
gtccgtggctgtgcagcttgggtgtcctgtgctcggcttaggggcacaggcttgcgggcggacctagggacggcggaggcatcgtgtccttcctgcaggaaggaaggagcttccggagctttcctgggaggctcactggggccgcggagataacctgaggtcctgcaacaggctgggggcccaaggaccatcccaggccttggaacagttggtatctttcagtcgccgccctggagaggcaggtgtttgacttcctgggctaccagtgggcgcccatcctggccaactttgtccacatcatcatcgtcatcctgggactcttcggcaccatccagtaccggctgcgctacgtcatggtgtacacgctgtgggcagccgtctgggtcacctggaacgtcttcatcatctgcttctacctggaagtcggtggcctcttaaaggacagcgagctactgaccttcagcctctcccggcatcgctcctggtggcgtgagcgctggccaggctgtctgcatgaggaggtgccagcagtgggcctcggggccccccatggccaggccctggtgtcaggtgctggctgtgccctggagcccagctatgtggaggccctacacagttgcctgcagatcctgatcgcgcttctgggctttgtctgtggctgccaggtggtcagcgtgtttacggaggaagaggacagctgcctgcgtaagtgaggaaacagctgatcctgctcctgtggcctccagcctcagcgaccgaccagtgacaatgacaggagctcccaggccttgggacgcgcccccacccagcaccccccaggcggccggcagcacctgccctgggttctaagtactggacaccagccagggcggcagggcagtgccacggctggctgcagcgtcaagagagtttgtaatttcctttctcttaaaaaaaaaaaagaaaagaaaacatacaaaagaaaaggcaaaaccccacatgcccacctcctctggcaacatgggggtcacagctctgcccccaggctgtcgtctcgtcgaggagcccctccctcaggtgcccacctggggctgctggaccctcgggctgcaagcactgctgctgggatgcagcctccccaggaagtcaatgtgaggcccgagacccctcaagcggtgagggcccctgttgaacatggagggttcctaaccccaaactcgtgccagaagaacccccaccccacccaggagctgaggctgatggagccctagggtgggggctgggcttgaccaggaacagcagagccaggccccaaggcatagggcagggcacatggtggtgacgagcaggcagtactcttgtaaagggggctcttgggcaaacagtcccaaaggctcccccaggtatcatcaagttggtaaataaacaggaacatggccctcaaaaa

SEQ ID NO: 420238 - DNA, 1353 bp, Homo sapiens
gagcgggtccaggctgcggcgcgtggggagcgggcggagcgggggcgggggccgagcgcggggcacccgggggcctcctgtataggcgggcaccatgggctcctgctccggccgctgcgcgctcgtcgtcctctgcgcttttcagctggtcgccgccctggagaggcaggtgtttgacttcctgggctaccagtgggcgcccatcctggccaactttgtccacatcatcatcgtcatcctgggactcttcggcaccatccagtaccggctgcgctacgtcatggtgtacacgctgtgggcagccgtctgggtcacctggaacgtcttcatcatctgcttctacctggaagtcggtggcctcttaaaggacagcgagctactgaccttcagcctctcccggcatcgctcctggtggcgtgagcgctggccaggctgtctgcatgaggaggtgccagcagtgggcctcggggccccccatggccaggccctggtgtcaggtgctggctgtgccctggagcccagctatgtggaggccctacacagttgcctgcagatcctgatcgcgcttctgggctttgtctgtggctgccaggtggtcagcgtgtttacggaggaagaggacagctgcctgcgtaagtgaggaaacagctgatcctgctcctgtggcctccagcctcagcgaccgaccagtgacaatgacaggagctcccaggccttgggacgcgcccccacccagcaccccccaggcggccggcagcacctgccctgggttctaagtactggacaccagccagggcggcagggcagtgccacggctggctgcagcgtcaagagagtttgtaatttcctttctcttaaaaaaaaaaaagaaaagaaaacatacaaaagaaaaggcaaaaccccacatgcccacctcctctggcaacatgggggtcacagctctgcccccaggctgtcgtctcgtcgaggagcccctccctcaggtgcccacctggggctgctggaccctcgggctgcaagcactgctgctgggatgcagcctccccaggaagtcaatgtgaggcccgagacccctcaagcggtgagggcccctgttgaacatggagggttcctaaccccaaactcgtgccagaagaacccccaccccacccaggagctgaggctgatggagccctagggtgggggctgggcttgaccaggaacagcagagccaggccccaaggcatagggcagggcacatggtggtgacgagcaggcagtactcttgtaaagggggctcttgggcaaacagtcccaaaggctcccccaggtatcatcaagttggtaaataaacaggaacatggccctcaaaaa

SEQ ID NO: 420239 - DNA, 2285 bp, Homo sapiens
aataaaagtaccagtgtagcaagtgaagaccaaatttatagcactgtgcattagatagcaaaatcaggttcttaacaatgaaaagtaaacctcaagtttctaaatccatatgcagatggttaggctgtccctctcttagcaaatctctcagcctccttctttcccaagtgccaaggatccctggagtaaagctctggggtctgtgctctctttctgtgaggggaaggctgcggccctatttgcccctctctagcaaacacccccaccaccctgccgcttcctgtggttattgagccagctaggagttactcatggactctaacctggttttagtcccatgtacatcgttgttttaggtttcatactgaagagccaatggtttatgtggttttattctgtcttaaatataagtttcaaggaagggaaaacaaaagtgataaaatgatagaacagtctagaggccactgtaaagtcaccgccactttacgtgtatgtcagtcttggtgttcttgtatgagtaaaatggatgtaaaatcataaaatcacagtgaatgtttcaggctacactggaaaaagtatgcacttagaattaaaggaaattgtataattcaccaagatttctttgtgtagatcaggggttggcaactatgacccacaggctaagactggtcagcggtctggtttttcacagccatgagctaagttacctttttaaagggttatataagtaattacatcatatttttgattttgcctttggcccacaccacataaaatattcaatacctggccttttttttttttttttgagacagagtctcgctctgtcacccaggatagagtgcactggtgcgattttggctcactgcaacctcttcctcctgggttcaagcaattctccctgcctcagcctctaagtagctgggactacaggcacccactaccatgccttgctaatttttgtatttttaatagagatggggtttcaccatgttggccaggctggtctcgaactcctgacctcaggggatccgcccgccttggcctcccaaactgctgggattacaggtgagccactgcgcccagccaatacctggccttttaagaagtttgctgactcctggtatggatgacagaaaatggaataacgttttgtttctccagtctaggaaaagcaagtcaggtagtggatagactgactggcgtccggggagcccagggtatgtgagggccacgtggatggaagcaaatgcctcctgcatagcccttggctctttgtcccacttgggaggagtccatggatgtaatatttacaaaacaattttttccttaccatttgcagaaagcattgcatatatttccttttagctcaggaaactggcatgccccaccctctgctactccatcagatgtaaatacaatgactataagccgtacaactcccctctcttagaaacctcagcaggaccacagagcaagggagtcaaagctttcttaattctctccagtaaatgactcaactaatttgatttttttaattaagtcaaaatatcaagagaaaaattgctactaaaacttacattttgatccacactgatgtgcaacacaaaatgaaagttttcacctccatttccattttttaaaaattcacggtccacactgaaacttgctgggttttagcaggagacaaaggtgtcacccacgctgtcctcatcctgctctctctgtcccagtgacgctccagcatatgatcactgcagccggtccctggcccgtgccgattctgccacctcccagccacacacatttgcagacccacaagaagaactgtagccttgataatttcagttcaggctggaaaaatgccatgcaataatctggtttgctttcagtaagtaggcaacaagtgaaaactgtataattttcatcacctattctgctgttctatctaaaatgagtgtacctgtggtttgtgaactgggcccttgtttgtgccagatccttcaaagatgttccctgtcaggacacctgtggccctgcccctcctcagacacctttccactggcattcacgttccttatatgcagtgttagccatctttggcctacgtggactttttttgtaaattacaccatttccagacattaaactttttatattatgaaatttaccatgtaaaaagaacttcatatttttattgagattgctaaggcacttggccttcctcctttgtgattttcagtgtctattaaagcatgagttccctcagttttaaaaaaaaaaac

SEQ ID NO: 420240 - DNA, 937 bp, Homo sapiens
cgcagggggactagagaggaccccccttagagacaaaggcgactgttatctcttataaaagctgagaatgcttcagggatgtctgatatctaaacaacaagaaaagccactcagcaggaccacagagcaagggagtcaaagctttcttaattctctccagtaaatgactcaactaatttgatttttttaattaagtcaaaatatcaagagaaaaattgctactaaaacttacattttgatccacactgatgtgcaacacaaaatgaaagttttcacctccatttccattttttaaaaattcacggtccacactgaaacttgctgggttttagcaggagacaaaggtgtcacccacgctgtcctcatcctgctctctctgtcccagtgacgctccagcatatgatcactgcagccggtccctggcccgtgccgattctgccacctcccagccacacacatttgcagacccacaagaagaactgtagccttgataatttcagttcaggctggaaaaatgccatgcaataatctggtttgctttcagtaagtaggcaacaagtgaaaactgtataattttcatcacctattctgctgttctatctaaaatgagtgtacctgtggtttgtgaactgggcccttgtttgtgccagatccttcaaagatgttccctgtcaggacacctgtggccctgcccctcctcagacacctttccactggcattcacgttccttatatgcagtgttagccatctttggcctacgtggactttttttgtaaattacaccatttccagacattaaactttttatattatgaaatttaccatgtaaaaagaacttcatatttttattgagattgctaaggcacttggccttcctcctttgtgattttcagtgtctattaaagcatgagttccctcagttttaaaaaaaaaaac

SEQ ID NO: 420241 - DNA, 86 bp, Homo sapiens
ctgatcaggccaaagttggagaaccactgactttaagattctagcaggcatcaccactttgaaaatacctgtctgactactcaagg

SEQ ID NO: 420242 - DNA, 1146 bp, Homo sapiens
ccaccagcccgtctggtttgtctagtcccattttcaccccacatccagagttactattattaccaactcctgagcatttgcaggattctgtagtatgaattgggatgcttcttggctttccctacagccagcttagaattgtgctttctcaggtctactaagttcaataccatccttcagcctgctctccagtttccaacatgttactgttaaggccttttccctcattttctatcattgtgagtatgtgccctttgaaaacccttttgctgtcatttttgtgggatttggtgaagaagcagtggtaaatgcatgtattattctgtcatctaagtgttcactgttagctcttctcataagtgggatgctaggcctcagttgctttctctgtgaaatgagaggatcatactaactggataatttgtaaaattcctttcatcccagactttttatgattctgtagtacttactgttaagtcaaacacagttcttccttttttctgaaataatttctctttgtcttaaatccttaaagctgctagcagaagaaagtcttcccacaaccccattttatttcatattgggaaaacacaggcaacagcaggatgaaaaactaaacgaaactttagagaatgagctggtacaactacccttaacagaaaacatacccgcaattagtgagcttcttcacactccagcccatgtcctgccatctgctgctttcctgtgctccatgtttgtaaattcattgctgctgtctaaagagactaagagtgctaaggaaattcctgaagatgtagatatggaagaagaaaaagaaagtgaagattcagatgaagaaaatgattttaccgaaaaagtccaggatacaagtaacacaggtttaggagaagacattatacatcagttgtcaaaatctgaagaaaaagaactgagaaaatttaggaaaatagactacagctggatagctgccctttaagccttggagatggggaggatccttggactttgtgtttttgattgtatgttgatattctaaaaacatctattttaatgttatttctgttctaaaaataagataataaatattaacaaactttgcttttttaaaaaactgataaaaaaaaaatgtatttgcatcatgct

SEQ ID NO: 420243 - DNA, 657 bp, Homo sapiens
  misc_feature (43)..(43): n is a, c, g, or t
gactcctagaggattccccactgctcataatagcgcaagcaancagctgctagcagaagaaagtcttcccacaaccccattttatttcatattgggaaaacacaggcaacagcaggatgaaaaactaaacgaaactttagagaatgagctggtacaactacccttaacagaaaacatacccgcaattagtgagcttcttcacactccagcccatgtcctgccatctgctgctttcctgtgctccatgtttgtaaattcattgctgctgtctaaagagactaagagtgctaaggaaattcctgaagatgtagatatggaagaagaaaaagaaagtgaagattcagatgaagaaaatgattttaccgaaaaagtccaggatacaagtaacacaggtttaggagaagacattatacatcagttgtcaaaatctgaagaaaaagaactgagaaaatttaggaaaatagactacagctggatagctgccctttaagccttggagatggggaggatccttggactttgtgtttttgattgtatgttgatattctaaaaacatctattttaatgttatttctgttctaaaaataagataataaatattaacaaactttgcttttttaaaaaactgataaaaaaaaaatgtatttgcatcatgct

SEQ ID NO: 420244 - DNA, 481 bp, Homo sapiens
gcctggcccatagtaggaacacagtagatacctcttgaatcaaagcctaaaacagtcatgacttgggccagttactcaatggggtgagtcccaggattagtgtgatctgccagtctgaggctagaactaaccttttcaggcaaaatgttattgtttctttgttttttccctctagtgtttgtatttaaacctagtgagccaaggccattgtatattcaaaagggtatctccagagagaaagtccagtggggagtgtttgttccacgagatgtccctgaatccttcacctcagaagcttaccagtggctaaatagatcccagttttacttcctaacaaaatcacagagtttattgacattcagtacaaagtctccagaagaaaaactcacaccaacaagcaaacaggtatgttttagccattcatagcaggatgtattgcctccctaaaaggatacaattaccttttagaagtcaactatga

SEQ ID NO: 420245 - DNA, 355 bp, Homo sapiens
acccggctcaacgaaggaagttcagggcgggaccagagattggccattccgctactgcgcaaagatggtggaggaggagaacatccgcgtggttcgttgtggcggcagcgagttgaactttaggagagctgtgttctctgcagattctaagtatatcttctgtgtctctggagactttgttaaagtttacagcacagttacagaagagtgtgtacacatactgcatggacacagaaatctggtgactggaatccagcttaaccccaacaaccatctacaggttcccttacatgcattgcgaatatccaaaagagtcacagccaacttggaagttattgattaaggatggatttgc

SEQ ID NO: 420246 - DNA, 2724 bp, Homo sapiens
acccggctcaacgaaggaagttcagggcgggaccagagattggccattccgctactgcgcaaagatggtggaggaggagaacatccgcgtggttcgttgtggcggcagcgagttgaactttaggagagctgtgttctctgcagattctaagtatatcttctgtgtctctggagactttgttaaagtttacagcacagttacagaagagtgtgtacacatactgcatggacacagaaatctggtgactggaatccagcttaaccccaacaaccatctacagctgtattcttgttcccttgatggcacaattaaactgtgggactatatagatggcatcttaataaagactttcatagttggatgtaaacttcatgccctctttactcttgcccaagctgaggattctgtctttgttatagtgaataaagaaaaaccagatatatttcagctggtttcagtgaaactgccaaaatcctcaagccaggaagtagaagccaaggagctgtcctttgttttggattacataaaccagtcacccaagtgcattgcctttggaaacgagggagtatatgttgctgcagtacgggaattttacttgtctgtttattttttcaaaaagaaaacaacatcaaggtttactttatcatcatcaagaaataagaagcatgctaaaaacaattttacgtgtgtagcatgtcacccaacggaagactgcatcgcatctggtcacatggatggcaaaattcgtctttggaggaatttttatgatgataagaaatatacgtacacatgtttacattggcaccatgatatggttatggatttggctttttcagtgacaggcaccagtctgctgagtggcggtcgtgaatctgtacttgtagagtggcgcgatgcaacagagaagaataaggagtttctcccgcgtttaggagctactattgaacatatctcagtctcgcctgcaggagatttattctgcacttctcactctgataataagataataattattcaccgaaaccttgaagcatccgcagtaattcaaggcctagtgaaagataggagtatcttcactggtttgatgattgatccaagaactaaagctttggttttgaatggaaaacctggccacctgcagttttattctctccagagtgataaacagttatacaatttagatattatacagcaagaatatattaatgattatggtctgatccaaattgaactaacaaaggctgcatttggctgctttggtaactggcttgcaacagtggaacagcggcaagaaaaggaaactgagcttgaattgcaaatgaaactgtggatgtataataagaaaacacaagggtttattcttaacactaaaattaacatgccacacgaagactgcattacagctctctgtttctgtaatgcagaaaaatctgaacagcccaccttggttacagctagcaaagatggttacttcaaagtatggatattaacagatgactctgacatatacaaaaaagctgttggctggacctgtgactttgttggtagttatcacaagtatcaagcaactaactgttgtttctccgaagatggttctttactagcagttagttttgaggaaatagtcacaatatgggattctgtaacatgggaacttaaatgtacattttgccaacgagctgggaaaataaggcacctttgctttgggagattgacgtgttcaaagtatctacttggtgctactgaaaatggcattctttgctgttggaatctgctgagctgtgcattggagtggaatgcaaaattaaatgttagagttatggaacccgatcctaattcagagaatattgctgcaatctctcagtcttcagtgggttcagacttgtttgtatttaaacctagtgagccaaggccattgtatattcaaaagggtatctccagagagaaagtccagtggggagtgtttgttccacgagatgtccctgaatccttcacctcagaagcttaccagtggctaaatagatcccagttttacttcctaacaaaatcacagagtttattgacattcagtacaaagtctccagaagaaaaactcacaccaacaagcaaacagctgctagcagaagaaagtcttcccacaaccccattttatttcatattgggaaaacacaggcaacagcaggatgaaaaactaaacgaaactttagagaatgagctggtacaactacccttaacagaaaacatacccgcaattagtgagcttcttcacactccagcccatgtcctgccatctgctgctttcctgtgctccatgtttgtaaattcattgctgctgtctaaagagactaagagtgctaaggaaattcctgaagatgtagatatggaagaagaaaaagaaagtgaagattcagatgaagaaaatgattttaccgaaaaagtccaggatacaagtaacacaggtttaggagaagacattatacatcagttgtcaaaatctgaagaaaaagaactgagaaaatttaggaaaatagactacagctggatagctgccctttaagccttggagatggggaggatccttggactttgtgtttttgattgtatgttgatattctaaaaacatctattttaatgttatttctgttctaaaaataagataataaatattaacaaactttgcttttttaaaaaactgataaaaaaaaaatgtatttgcatcatgct

SEQ ID NO: 420247 - DNA, 2679 bp, Homo sapiens
acccggctcaacgaaggaagttcagggcgggaccagagattggccattccgctactgcgcaaagatggtggaggaggagaacatccgcgtggttcgttgtggcggcagcgagttgaactttaggagagctgtgttctctgcagattctaagtatatcttctgtgtctctggagactttgttaaagtttacagcacagttacagaagagtgtgtacacatactgcatggacacagaaatctggtgactggaatccagcttaaccccaacaaccatctacagctgtattcttgttcccttgatggcacaattaaactgtgggactatatagatggcatcttaataaagactttcatagttggatgtaaacttcatgccctctttactcttgcccaagctgaggattctgtctttgttatagtgaataaagaaaaaccagatatatttcagctggtttcagtgaaactgccaaaatcctcaagccaggaagtagaagccaaggagctgtcctttgttttggattacataaaccagtcacccaagtgcattgcctttggaaacgagggagtatatgttgctgcagtacgggaattttacttgtctgtttattttttcaaaaagaaaacaacatcaaggtttactttatcatcatcaagaaataagaagcatgctaaaaacaattttacgtgtgtagcatgtcacccaacggaagactgcatcgcatctggtcacatggatggcaaaattcgtctttggaggaatttttatgatgataagaaatatacgtacacatgtttacattggcaccatgatatggttatggatttggctttttcagtgacaggcaccagtctgctgagtggcggtcgtgaatctgtacttgtagagtggcgcgatgcaacagagaagaataaggagtttctcccgcgtttaggagctactattgaacatatctcagtctcgcctgcaggagatttattctgcacttctcactctgataataagataataattattcaccgaaaccttgaagcatccgcagtaattcaaggcctagtgaaagataggagtatcttcactggtttgatgattgatccaagaactaaagctttggttttgaatggaaaacctggccacctgcagttttattctctccagagtgataaacagttatacaatttagatattatacagcaagaatatattaatgattatggtctgatccaaattgaactaacaaaggctgcatttggctgctttggtaactggcttgcaacagtggaacagcggcaagaaaaggaaactgagcttgaattgcaaatgaaactgtggatgtataataagaaaacacaagggtttattcttaacactaaaattaacatgccacacgaagactgcattacagctctctgtttctgtaatgcagaaaaatctgaacagcccaccttggttacagctagcaaagatggttacttcaaagtatggatattaacagatgactctgacatatacaaaaaagctgttggctggacctgtgactttgttggtagttatcacaagtatcaagcaactaactgttgtttctccgaagatggttctttactagcagttagttttgaggaaatagtcacaatatgggattctgtaacatgggaacttaaatgtacattttgccaacgagctgggaaaataaggcacctttgctttgggagattgacgtgttcaaagtatctacttggtgctactgaaaatggcattctttgctgttggaatctgctgagctgtgcattggagtggaatgcaaaattaaatgttagagttatggaacccgatcctaattcagagaatattgctgcaatctctcagtcttcagtgggttcagacttgtttgtatttaaacctagtgagccaaggccattgtatattcaaaagggtatctccagagagaaagtccagtggggagtgtttgttccacgagatgtccctgaatccttcacctcagaagcttaccagtggctaaatagatcccagttttacttcctaacaaaatcacagagtttattgacattcagtacaaagtctccagaagaaaaactcacaccaacaagcaaacagctgctagcagaagaaagtcttcccacaaccccattttatttcatattgggaaaacacaggcaacagcaggatgaaaaactaaacgaaactttagagaatgagctggtacaactacccttaacagaaaacatacccgcaattagtgagcttcttcacactccagcccatgtcctgccatctgctgctttcctgtgctccatgtttgtaaattcattgctgctgtctaaagagactaagagtgctaaggaaattcctgaagatgtagatatggaagaagaaaaagaaagtgaagattcagatgaagaaaatgattttaccgaaaaagtccaggatacaagtaacacaggtttaggagaagacattatacatcagttgtcaaaatctgaagaaaaagaactgagaaaatttaggaaaatagactacagctggatagctgccctttaagccttggagatggggaggatccttggactttgtgtttttgattgtatgttgatattctaaaaacatctattttaatgttatttctgttctaaaaataagataataaatattaacaaactttg

SEQ ID NO: 420248 - DNA, 2761 bp, Homo sapiens
acccggctcaacgaaggaagttcagggcgggaccagagattggccattccgctactgcgcaaagatggtggaggaggagaacatccgcgtggttcgttgtggcggcagcgagttgaactttaggagagctgtgttctctgcagattctaagtatatcttctgtgtctctggagactttgttaaagtttacagcacagttacagaagagtgtgtacacatactgcatggacacagaaatctggtgactggaatccagcttaaccccaacaaccatctacagctgtattcttgttcccttgatggcacaattaaactgtgggactatatagatggcatcttaataaagactttcatagttggatgtaaacttcatgccctctttactcttgcccaagctgaggattctgtctttgttatagtgaataaagaaaaaccagatatatttcagctggtttcagtgaaactgccaaaatcctcaagccaggaagtagaagccaaggagctgtcctttgttttggattacataaaccagtcacccaagtgcattgcctttggaaacgagggagtatatgttgctgcagtacgggaattttacttgtctgtttattttttcaaaaagaaaacaacatcaaggtttactttatcatcatcaagaaataagaagcatgctaaaaacaattttacgtgtgtagcatgtcacccaacggaagactgcatcgcatctggtcacatggatggcaaaattcgtctttggaggaatttttatgatgataagaaatatacgtacacatgtttacattggcaccatgatatggttatggatttggctttttcagtgacaggcaccagtctgctgagtggcggtcgtgaatctgtacttgtagagtggcgcgatgcaacagagaagaataaggagtttctcccgcgtttaggagctactattgaacatatctcagtctcgcctgcaggagatttattctgcacttctcactctgataataagataataattattcaccgaaaccttgaagcatccgcagtaattcaaggcctagtgaaagataggagtatcttcactggtttgatgattgatccaagaactaaagctttggttttgaatggaaaacctggccacctgcagttttattctctccagagtgataaacagttatacaatttagatattatacagcaagaatatattaatgattatggtctgatccaaattgaactaacaaaggctgcatttggctgctttggtaactggcttgcaacagtggaacagcggcaagaaaaggaaactgagcttgaattgcaaatgaaactgtggatgtataataagaaaacacaagggtttattcttaacactaaaattaacatgccacacgaagactgcattacagctctctgtttctgtaatgcagaaaaatctgaacagcccaccttggttacagctagcaaagatggttacttcaaagtatggatattaacagatgactctgacatatacaaaaaagctgttggctggacctgtgactttgttggtagttatcacaagtatcaagcaactaactgttgtttctccgaagatggttctttactagcagttagttttgaggaaatagtcacaatatgggattctgtaacatgggaacttaaatgtacattttgccaacgagctgggaaaataaggcacctttgctttgggagattgacgtgttcaaagtatctacttggtgctactgaaaatggcattctttgctgttggaatctgctgagctgtgcattggagtggaatgcaaaattaaatgttagagttatggaacccgatcctaattcagagaatattgctgcaatctctcagtcttcagtgggttcagacttgtttgtatttaaacctagtgagccaaggccattgtatattcaaaagggtatctccagagagaaagtccagtggggagtgtttgttccacgagatgtccctgaatccttcacctcagaagcttaccagtggctaaatagatcccagttttacttcctaacaaaatcacagagtttattgacattcagtacaaagtctccagaagaaaaactcacaccaacaagcaaacagctgctagcagaagaaagtcttcccacaaccccattttatttcatattgggaaaacacaggcaacagcaggatgaaaaactaaacgaaactttagagaatgagctggtacaactacccttaacagaaaacatacccgcaattagtgagcttcttcacactccagcccatgtcctgccatctgctgctttcctgtgctccatgtttgtaaattcattgctgctgtctaaagagactaagagtgctaaggaaattcctgaagatgtagatatggaagaagaaaaagaaagtgaagattcagatgaagaaaatgattttaccgaaaaagtccaggatacaagtaacacaggtttaggagaagacattatacatcagttgtcaaaatctgaagaaaaagaactgagaaaatttaggaaaatagactacagctggatagctgccctttaagccttggagatggggaggatccttggactttgtgtttttgattgtatgttgatattctaaaaacatctattttaatgttatttctgttctaaaaataagataataaatattaacaaactttgaaaaaaaacacaaacaacaaccaaaacaaaccacaacaaacacaaaaccaaacaaacaaaaaaacacaaacaacacccaggg

SEQ ID NO: 420249 - DNA, 2670 bp, Homo sapiens
acccggctcaacgaaggaagttcagggcgggaccagagattggccattccgctactgcgcaaagatggtggaggaggagaacatccgcgtggttcgttgtggcggcagcgagttgaactttaggagagctgtgttctctgcagattctaagtatatcttctgtgtctctggagactttgttaaagtttacagcacagttacagaagagtgtgtacacatactgcatggacacagaaatctggtgactggaatccagcttaaccccaacaaccatctacagctgtattcttgttcccttgatggcacaattaaactgtgggactatatagatggcatcttaataaagactttcatagttggatgtaaacttcatgccctctttactcttgcccaagctgaggattctgtctttgttatagtgaataaagaaaaaccagatatatttcagctggtttcagtgaaactgccaaaatcctcaagccaggaagtagaagccaaggagctgtcctttgttttggattacataaaccagtcacccaagtgcattgcctttggaaacgagggagtatatgttgctgcagtacgggaattttacttgtctgtttattttttcaaaaagaaaacaacatcaaggtttactttatcatcatcaagaaataagaagcatgctaaaaacaattttacgtgtgtagcatgtcacccaacggaagactgcatcgcatctggtcacatggatggcaaaattcgtctttggaggaatttttatgatgataagaaatatacgtacacatgtttacattggcaccatgatatggttatggatttggctttttcagtgacaggcaccagtctgctgagtggcggtcgtgaatctgtacttgtagagtggcgcgatgcaacagagaagaataaggagtttctcccgcgtttaggagctactattgaacatatctcagtctcgcctgcaggagatttattctgcacttctcactctgataataagataataattattcaccgaaaccttgaagcatccgcagtaattcaaggcctagtgaaagataggagtatcttcactggtttgatgattgatccaagaactaaagctttggttttgaatggaaaacctggccacctgcagttttattctctccagagtgataaacagttatacaatttagatattatacagcaagaatatattaatgattatggtctgatccaaattgaactaacaaaggctgcatttggctgctttggtaactggcttgcaacagtggaacagcggcaagaaaaggaaactgagcttgaattgcaaatgaaactgtggatgtataataagaaaacacaagggtttattcttaacactaaaattaacatgccacacgaagactgcattacagctctctgtttctgtaatgcagaaaaatctgaacagcccaccttggttacagctagcaaagatggttacttcaaagtatggatattaacagatgactctgacatatacaaaaaagctgttggctggacctgtgactttgttggtagttatcacaagtatcaagcaactaactgttgtttctccgaagatggttctttactagcagttagttttgaggaaatagtcacaatatgggattctgtaacatgggaacttaaatgtacattttgccaacgagctgggaaaataaggcacctttgctttgggagattgacgtgttcaaagtatctacttggtgctactgaaaatggcattctttgctgttggaatctgctgagctgtgcattggagtggaatgcaaaattaaatgttagagttatggaacccgatcctaattcagagaatattgctgcaatctctcagtcttcagtgggttcagacttgtttgtatttaaacctagtgagccaaggccattgtatattcaaaagggtatctccagagagaaagtccagtggggagtgtttgttccacgagatgtccctgaatccttcacctcagaagcttaccagtggctaaatagatcccagttttacttcctaacaaaatcacagagtttattgacattcagtacaaagtctccagaagaaaaactcacaccaacaagcaaacagctgctagcagaagaaagtcttcccacaaccccattttatttcatattgggaaaacacaggcaacagcaggatgaaaaactaaacgaaactttagagaatgagctggtacaactacccttaacagaaaacatacccgcaattagtgagcttcttcacactccagcccatgtcctgccatctgctgctttcctgtgctccatgtttgtaaattcattgctgctgtctaaagagactaagagtgctaaggaaattcctgaagatgtagatatggaagaagaaaaagaaagtgaagattcagatgaagaaaatgattttaccgaaaaagtccaggatacaagtaacacaggtttaggagaagacattatacatcagttgtcaaaatctgaagaaaaagaactgagaaaatttaggcttggactttgtgtttttgattgtatgttgatattctaaaaacatctattttaatgttatttctgttctaaaaataagataataaatattaacaaactttgcttttttaaaaaactgataaaaaaaaaatgtatttgcatcatgct

SEQ ID NO: 420250 - DNA, 2822 bp, Homo sapiens
  misc_feature (1)..(5): n is a, c, g, or t
nnnnnttataaaatgcatagggctgggcgtggtggctcacaactgtaatcccaaagtgctgagattacaggtggcagccactgcaccttggtgcttttcatatctcattcaaaaccttaccatctccctcttcaagacagaaagttggcttttttcctctctcttttagttaaaacttgaaatggatggatctgcttcttgcagaaagctgtgaaaagattgttttgcagaagcaatataaataaatgactctacctctttaaggttaacagtgaattaatgaatagaaaatgcccctgatcaacatttaattattcatttgatatcttgatgaatttcttttttttaaatcaattttgtattgttttacccttttagctgtattcttgttcccttgatggcacaattaaactgtgggactatatagatggcatcttaataaagactttcatagttggatgtaaacttcatgccctctttactcttgcccaagctgaggattctgtctttgttatagtgaataaagaaaaaccagatatatttcagctggtttcagtgaaactgccaaaatcctcaagccaggaagtagaagccaaggagctgtcctttgttttggattacataaaccagtcacccaagtgcattgcctttggaaacgagggagtatatgttgctgcagtacgggaattttacttgtctgtttattttttcaaaaagaaaacaacatcaaggtttactttatcatcatcaagaaataagaagcatgctaaaaacaattttacgtgtgtagcatgtcacccaacggaagactgcatcgcatctggtcacatggatggcaaaattcgtctttggaggaatttttatgatgataagaaatatacgtacacatgtttacattggcaccatgatatggttatggatttggctttttcagtgacaggcaccagtctgctgagtggcggtcgtgaatctgtacttgtagagtggcgcgatgcaacagagaagaataaggagtttctcccgcgtttaggagctactattgaacatatctcagtctcgcctgcaggagatttattctgcacttctcactctgataataagataataattattcaccgaaaccttgaagcatccgcagtaattcaaggcctagtgaaagataggagtatcttcactggtttgatgattgatccaagaactaaagctttggttttgaatggaaaacctggccacctgcagttttattctctccagagtgataaacagttatacaatttagatattatacagcaagaatatattaatgattatggtctgatccaaattgaactaacaaaggctgcatttggctgctttggtaactggcttgcaacagtggaacagcggcaagaaaaggaaactgagcttgaattgcaaatgaaactgtggatgtataataagaaaacacaagggtttattcttaacactaaaattaacatgccacacgaagactgcattacagctctctgtttctgtaatgcagaaaaatctgaacagcccaccttggttacagctagcaaagatggttacttcaaagtatggatattaacagatgactctgacatatacaaaaaagctgttggctggacctgtgactttgttggtagttatcacaagtatcaagcaactaactgttgtttctccgaagatggttctttactagcagttagttttgaggaaatagtcacaatatgggattctgtaacatgggaacttaaatgtacattttgccaacgagctgggaaaataaggcacctttgctttgggagattgacgtgttcaaagtatctacttggtgctactgaaaatggcattctttgctgttggaatctgctgagctgtgcattggagtggaatgcaaaattaaatgttagagttatggaacccgatcctaattcagagaatattgctgcaatctctcagtcttcagtgggttcagacttgtttgtatttaaacctagtgagccaaggccattgtatattcaaaagggtatctccagagagaaagtccagtggggagtgtttgttccacgagatgtccctgaatccttcacctcagaagcttaccagtggctaaatagatcccagttttacttcctaacaaaatcacagagtttattgacattcagtacaaagtctccagaagaaaaactcacaccaacaagcaaacagctgctagcagaagaaagtcttcccacaaccccattttatttcatattgggaaaacacaggcaacagcaggatgaaaaactaaacgaaactttagagaatgagctggtacaactacccttaacagaaaacatacccgcaattagtgagcttcttcacactccagcccatgtcctgccatctgctgctttcctgtgctccatgtttgtaaattcattgctgctgtctaaagagactaagagtgctaaggaaattcctgaagatgtagatatggaagaagaaaaagaaagtgaagattcagatgaagaaaatgattttaccgaaaaagtccaggatacaagtaacacaggtttaggagaagacattatacatcagttgtcaaaatctgaagaaaaagaactgagaaaatttaggaaaatagactacagctggatagctgccctttaagccttggagatggggaggatccttggactttgtgtttttgattgtatgttgatattctaaaaacatctattttaatgttatttctgttctaaaaataagataataaatattaacaaactttgcttttttaaaaaactgataaaaaaaaaatgtatttgcatcatgct

SEQ ID NO: 420251 - DNA, 2548 bp, Homo sapiens
acccggctcaacgaaggaagttcagggcgggaccagagattggccattccgctactgcgcaaagatggtggaggaggagaacatccgcgtggttcgttgtggcggcagcgagttgaactttaggagagctgtgttctctgcagattctaagtatatcttctgtgtctctggagactttgttaaagtttacagcacagttacagaagagtgtgtacacatactgcatggacacagaaatctggtgactggaatccagcttaaccccaacaaccatctacagctgtattcttgttcccttgatggcacaattaaactgtgggactatatagatggcatcttaataaagactttcatagttggatgtaaacttcatgccctctttactcttgcccaagctgaggattctgtctttgttatagtgaataaagaaaaaccagatatatttcagctggtttcagtgaaactgccaaaatcctcaagccaggaagtagaagccaaggagctgtcctttgttttggattacataaaccagtcacccaagtgcattgcctttggaaacgagggagtatatgttgctgcagtacgggaattttacttgtctgtttattttttcaaaaagaaaacaacatcaaggtttactttatcatcatcaagaaataagaagcatgctaaaaacaattttacgtgtgtagcatgtcacccaacggaagactgcatcgcatctggtcacatggatggcaaaattcgtctttggaggaatttttatgatgataagaaatatacgtacacatgtttacattggcaccatgatatggttatggatttggctttttcagtgacaggcaccagtctgctgagtggcggtcgtgaatctgtacttgtagagtggcgcgatgcaacagagaagaataaggagtttctcccgcgtttaggagctactattgaacatatctcagtctcgcctgcaggagatttattctgcacttctcactctgataataagataataattattcaccgaaaccttgaagcatccgcagtaattcaaggcctagtgaaagataggagtatcttcactggtttgatgattgatccaagaactaaagctttggttttgaatggaaaacctggccacctgcagttttattctctccagagtgataaacagttatacaatgtttattcttaacactaaaattaacatgccacacgaagactgcattacagctctctgtttctgtaatgcagaaaaatctgaacagcccaccttggttacagctagcaaagatggttacttcaaagtatggatattaacagatgactctgacatatacaaaaaagctgttggctggacctgtgactttgttggtagttatcacaagtatcaagcaactaactgttgtttctccgaagatggttctttactagcagttagttttgaggaaatagtcacaatatgggattctgtaacatgggaacttaaatgtacattttgccaacgagctgggaaaataaggcacctttgctttgggagattgacgtgttcaaagtatctacttggtgctactgaaaatggcattctttgctgttggaatctgctgagctgtgcattggagtggaatgcaaaattaaatgttagagttatggaacccgatcctaattcagagaatattgctgcaatctctcagtcttcagtgggttcagacttgtttgtatttaaacctagtgagccaaggccattgtatattcaaaagggtatctccagagagaaagtccagtggggagtgtttgttccacgagatgtccctgaatccttcacctcagaagcttaccagtggctaaatagatcccagttttacttcctaacaaaatcacagagtttattgacattcagtacaaagtctccagaagaaaaactcacaccaacaagcaaacagctgctagcagaagaaagtcttcccacaaccccattttatttcatattgggaaaacacaggcaacagcaggatgaaaaactaaacgaaactttagagaatgagctggtacaactacccttaacagaaaacatacccgcaattagtgagcttcttcacactccagcccatgtcctgccatctgctgctttcctgtgctccatgtttgtaaattcattgctgctgtctaaagagactaagagtgctaaggaaattcctgaagatgtagatatggaagaagaaaaagaaagtgaagattcagatgaagaaaatgattttaccgaaaaagtccaggatacaagtaacacaggtttaggagaagacattatacatcagttgtcaaaatctgaagaaaaagaactgagaaaatttaggaaaatagactacagctggatagctgccctttaagccttggagatggggaggatccttggactttgtgtttttgattgtatgttgatattctaaaaacatctattttaatgttatttctgttctaaaaataagataataaatattaacaaactttgcttttttaaaaaactgataaaaaaaaaatgtatttgcatcatgct

SEQ ID NO: 420252 - DNA, 2275 bp, Homo sapiens
atgtcctgccatctgctgctttcctgtgctccatgtttgtaaattcattgctgctgtcctttgttttggattacataaaccagtcacccaagtgcattgcctttggaaacgagggagtatatgttgctgcagtacgggaattttacttgtctgtttattttttcaaaaagaaaacaacatcaaggtttactttatcatcatcaagaaataagaagcatgctaaaaacaattttacgtgtgtagcatgtcacccaacggaagactgcatcgcatctggtcacatggatggcaaaattcgtctttggaggaatttttatgatgataagaaatatacgtacacatgtttacattggcaccatgatatggttatggatttggctttttcagtgacaggcaccagtctgctgagtggcggtcgtgaatctgtacttgtagagtggcgcgatgcaacagagaagaataaggagtttctcccgcgtttaggagctactattgaacatatctcagtctcgcctgcaggagatttattctgcacttctcactctgataataagataataattattcaccgaaaccttgaagcatccgcagtaattcaaggcctagtgaaagataggagtatcttcactggtttgatgattgatccaagaactaaagctttggttttgaatggaaaacctggccacctgcagttttattctctccagagtgataaacagttatacaatttagatattatacagcaagaatatattaatgattatggtctgatccaaattgaactaacaaaggctgcatttggctgctttggtaactggcttgcaacagtggaacagcggcaagaaaaggaaactgagcttgaattgcaaatgaaactgtggatgtataataagaaaacacaagggtttattcttaacactaaaattaacatgccacacgaagactgcattacagctctctgtttctgtaatgcagaaaaatctgaacagcccaccttggttacagctagcaaagatggttacttcaaagtatggatattaacagatgactctgacatatacaaaaaagctgttggctggacctgtgactttgttggtagttatcacaagtatcaagcaactaactgttgtttctccgaagatggttctttactagcagttagttttgaggaaatagtcacaatatgggattctgtaacatgggaacttaaatgtacattttgccaacgagctgggaaaataaggcacctttgctttgggagattgacgtgttcaaagtatctacttggtgctactgaaaatggcattctttgctgttggaatctgctgagctgtgcattggagtggaatgcaaaattaaatgttagagttatggaacccgatcctaattcagagaatattgctgcaatctctcagtcttcagtgggttcagacttgtttgtatttaaacctagtgagccaaggccattgtatattcaaaagggtatctccagagagaaagtccagtggggagtgtttgttccacgagatgtccctgaatccttcacctcagaagcttaccagtggctaaatagatcccagttttacttcctaacaaaatcacagagtttattgacattcagtacaaagtctccagaagaaaaactcacaccaacaagcaaacagctgctagcagaagaaagtcttcccacaaccccattttatttcatattgggaaaacacaggcaacagcaggatgaaaaactaaacgaaactttagagaatgagctggtacaactacccttaacagaaaacatacccgcaattagtgagcttcttcacactccagcccatgtcctgccatctgctgctttcctgtgctccatgtttgtaaattcattgctgctgtctaaagagactaagagtgctaaggaaattcctgaagatgtagatatggaagaagaaaaagaaagtgaagattcagatgaagaaaatgattttaccgaaaaagtccaggatacaagtaacacaggtttaggagaagacattatacatcagttgtcaaaatctgaagaaaaagaactgagaaaatttaggaaaatagactacagctggatagctgccctttaagccttggagatggggaggatccttggactttgtgtttttgattgtatgttgatattctaaaaacatctattttaatgttatttctgttctaaaaataagataataaatattaacaaactttgcttttttaaaaaactgataaaaaaaaaatgtatttgcatcatgct

SEQ ID NO: 420253 - DNA, 3128 bp, Homo sapiens
acccggctcaacgaaggaagttcagggcgggaccagagattggccattccgctactgcgcaaagatggtggaggaggagaacatccgcgtggttcgttgtggcggcagcgagttgaactttaggagagctgtgttctctgcagattctaagtatatcttctgtgtctctggagactttgttaaagtttacagcacagttacagaagagtgtgtacacatactgcatggacacagaaatctggtgactggaatccagcttaaccccaacaaccatctacagctgtattcttgttcccttgatggcacaattaaactgtgggactatatagatggcatcttaataaagactttcatagttggatgtaaacttcatgccctctttactcttgcccaagctgaggattctgtctttgttatagtgaataaagaaaaaccagatatatttcagctggtttcagtgaaactgccaaaatcctcaagccaggaagtagaagccaaggagctgtcctttgttttggattacataaaccagtcacccaagtgcattgcctttggaaacgagggagtatatgttgctgcagtacgggaattttacttgtctgtttattttttcaaaaagaaaacaacatcaaggtttactttatcatcatcaagaaataagaagcatgctaaaaacaattttacgtgtgtagcatgtcacccaacggaagactgcatcgcatctggtcacatggatggcaaaattcgtctttggaggaatttttatgatgataagaaatatacgtacacatgtttacattggcaccatgatatggttatggatttggctttttcagtgacaggcaccagtctgctgagtggcggtcgtgaatctgtacttgtagagtggcgcgatgcaacagagaagaataaggagtttctcccgcgtttaggagctactattgaacatatctcagtctcgcctgcaggagatttattctgcacttctcactctgataataagataataattattcaccgaaaccttgaagcatccgcagtaattcaaggcctagtgaaagataggagtatcttcactggtttgatgattgatccaagaactaaagctttggttttgaatggaaaacctggccacctgcagttttattctctccagagtgataaacagttatacaatttagatattatacagcaagaatatattaatgattatggtctgatccaaattgaactaacaaaggctgcatttggctgctttggtaactggcttgcaacagtggaacagcggcaagaaaaggaaactgagcttgaattgcaaatgaaactgtggatgtataataagaaaacacaagggtttattcttaacactaaaattaacatgccacacgaagactgcattacagctctctgtttctgtaatgcagaaaaatctgaacagcccaccttggttacagctagcaaagatggttacttcaaagtatggatattaacagatgactctgacatatacaaaaaagctgttggctggacctgtgactttgttggtagttatcacaagtatcaagcaactaactgttgtttctccgaagatggttctttactagcagttagttttgaggaaatagtcacaatatgggattctgtaacatgggaacttaaatgtacattttgccaacgagctgggaaaataaggcacctttgctttgggagattgacgtgttcaaagtatctacttggtgctactgaaaatggcattctttgctgttggaatctgctgagctgtgcattggagtggaatgcaaaattaaatgttagagttatggaacccgatcctaattcagagaatattgctgcaatctctcagtcttcagtgggttcagacttgtttgtatttaaacctagtgagccaaggccattgtatattcaaaagggtatctccagagagaaagtccagtggggagtgtttgttccacgagatgtccctgaatccttcacctcagaagcttaccagtggctaaatagatcccagttttacttcctaacaaaatcacagagtttattgacattcagtacaaagtctccagaagaaaaactcacaccaacaagcaaacagctgctagcagaagaaagtcttcccacaaccccattttatttcatattgggaaaacacaggcaacagcaggatgaaaaactaaacgaaactttagagaatgagctggtacaactacccttaacagaaaacatacccgcaattagtgagcttcttcacactccagcccatgtcctgccatctgctgctttcctgtgctccatgtttgtaaattcattgctgctgtctaaagagactaagaggtaaagcagttcttaagacaggtttggacactctcttttgggaaacaggatcgtttgtgtttatccttttttagagtattcttccactgtatttctttttatttcataagttttaaaatagatttaaaggctataggattattaagtcaagtaacatacattgaaaataagtttcaaaaaagatcttgtatgtgtgtgttttaagggcttggtacataatttaaaattacatgtttgtaaattcacctgctcttttataaataacccataatttttaaagtgtacttagtaacaaaattcttcatttactttgtgtgattatatttctacataggtgtcaaattagaaagttactgtttagaaacatttaatagtgtttatattttattctgttattgttaaagtgctaaggaaattcctgaagatgtagatatggaagaagaaaaagaaagtgaagattcagatgaagaaaatgattttaccgaaaaagtccaggatacaagtaacacaggtttaggagaagacattatacatcagttgtcaaaatctgaagaaaaagaactgagaaaatttaggaaaatagactacagctggatagctgccctttaagccttggagatggggaggatccttggactttgtgtttttgattgtatgttgatattctaaaaacatctattttaatgttatttctgttctaaaaataagataataaatattaacaaactttgcttttttaaaaaactgataaaaaaaaaatgtatttgcatcatgct

SEQ ID NO: 420254 - DNA, 1016 bp, Homo sapiens
gcctggcccatagtaggaacacagtagatacctcttgaatcaaagcctaaaacagtcatgacttgggccagttactcaatggggtgagtcccaggattagtgtgatctgccagtctgaggctagaactaaccttttcaggcaaaatgttattgtttctttgttttttccctctagtgtttgtatttaaacctagtgagccaaggccattgtatattcaaaagggtatctccagagagaaagtccagtggggagtgtttgttccacgagatgtccctgaatccttcacctcagaagcttaccagtggctaaatagatcccagttttacttcctaacaaaatcacagagtttattgacattcagtacaaagtctccagaagaaaaactcacaccaacaagcaaacagctgctagcagaagaaagtcttcccacaaccccattttatttcatattgggaaaacacaggcaacagcaggatgaaaaactaaacgaaactttagagaatgagctggtacaactacccttaacagaaaacatacccgcaattagtgagcttcttcacactccagcccatgtcctgccatctgctgctttcctgtgctccatgtttgtaaattcattgctgctgtctaaagagactaagagtgctaaggaaattcctgaagatgtagatatggaagaagaaaaagaaagtgaagattcagatgaagaaaatgattttaccgaaaaagtccaggatacaagtaacacaggtttaggagaagacattatacatcagttgtcaaaatctgaagaaaaagaactgagaaaatttaggaaaatagactacagctggatagctgccctttaagccttggagatggggaggatccttggactttgtgtttttgattgtatgttgatattctaaaaacatctattttaatgttatttctgttctaaaaataagataataaatattaacaaactttgcttttttaaaaaactgataaaaaaaaaatgtatttgcatcatgct

SEQ ID NO: 420255 - DNA, 878 bp, Homo sapiens
taccatttcttaagtatctctcagacataatcttgtaactctcatcgtggttattaaataggtttaaatcttttattccttttctgttgtcaaatatatatatcaaagtgaaaaatttgaccttctcattttttaacaccctgtaacaccttgtttagatttgcactctacagtttgtcttttgcatcattaattctctcttttcagagtttattgacattcagtacaaagtctccagaagaaaaactcacaccaacaagcaaacagctgctagcagaagaaagtcttcccacaaccccattttatttcatattgggaaaacacaggcaacagcaggatgaaaaactaaacgaaactttagagaatgagctggtacaactacccttaacagaaaacatacccgcaattagtgagcttcttcacactccagcccatgtcctgccatctgctgctttcctgtgctccatgtttgtaaattcattgctgctgtctaaagagactaagagtgctaaggaaattcctgaagatgtagatatggaagaagaaaaagaaagtgaagattcagatgaagaaaatgattttaccgaaaaagtccaggatacaagtaacacaggtttaggagaagacattatacatcagttgtcaaaatctgaagaaaaagaactgagaaaatttaggaaaatagactacagctggatagctgccctttaagccttggagatggggaggatccttggactttgtgtttttgattgtatgttgatattctaaaaacatctattttaatgttatttctgttctaaaaataagataataaatattaacaaactttgcttttttaaaaaactgataaaaaaaaaatgtatttgcatcatgct

SEQ ID NO: 420256 - DNA, 1061 bp, Homo sapiens
ggggtggttgttggcataaatgtaggaaggtagaaatgtatttttctttggtttggcttttgtatagggaaagccttttcatgtttcactcttggcatttacaataaaagggactccgtgaggacactgtaggaacagactgcggtggaggataagctttttaattgcaaccgtgttttctgtttgactccagcttcttcacactccagcccatgtcctgccatctgctgctttcctgtgctccatgtttgtaaattcattgctgctgtctaaagagactaagaggtaaagcagttcttaagacaggtttggacactctcttttgggaaacaggatcgtttgtgtttatccttttttagagtattcttccactgtatttctttttatttcataagttttaaaatagatttaaaggctataggattattaagtcaagtaacatacattgaaaataagtttcaaaaaagatcttgtatgtgtgtgttttaagggcttggtacataatttaaaattacatgtttgtaaattcacctgctcttttataaataacccataatttttaaagtgtacttagtaacaaaattcttcatttactttgtgtgattatatttctacataggtgtcaaattagaaagttactgtttagaaacatttaatagtgtttatattttattctgttattgttaaagtgctaaggaaattcctgaagatgtagatatggaagaagaaaaagaaagtgaagattcagatgaagaaaatgattttaccgaaaaagtccaggatacaagtaacacaggtttaggagaagacattatacatcagttgtcaaaatctgaagaaaaagaactgagaaaatttaggaaaatagactacagctggatagctgccctttaagccttggagatggggaggatccttggactttgtgtttttgattgtatgttgatattctaaaaacatctattttaatgttatttctgttctaaaaataagataataaatattaacaaactttgcttttttaaaaaactgataaaaaaaaaatgtatttgcatcatgct

SEQ ID NO: 420257 - DNA, 964 bp, Homo sapiens
  misc_feature (1)..(5): n is a, c, g, or t
nnnnnttataaaatgcatagggctgggcgtggtggctcacaactgtaatcccaaagtgctgagattacaggtggcagccactgcaccttggtgcttttcatatctcattcaaaaccttaccatctccctcttcaagacagaaagttggcttttttcctctctcttttagttaaaacttgaaatggatggatctgcttcttgcagaaagctgtgaaaagattgttttgcagaagcaatataaataaatgactctacctctttaaggttaacagtgaattaatgaatagaaaatgcccctgatcaacatttaattattcatttgatatcttgatgaatttcttttttttaaatcaattttgtattgttttacccttttagctgtattcttgttcccttgatggcacaattaaactgtgggactatatagatggcatcttaataaagactttcatagttggatgtaaacttcatgccctctttactcttgcccaagctgaggattctgtctttgttatagtgaataaagaaaaaccagatatatttcagctggtttcagtgaaactgccaaaatcctcaagccaggaagtagaagccaaggagctgtcctttgttttggattacataaaccagtcacccaagtgcattgcctttggaaacgaggtaaattttgttttgttcgttttctgttttgtacctaaaatttctttcctgcaatctctcttctgagcattttatgttacagtgattttatattcccttgaattactatatttgtattagtaactaagaagcctcttcattgctttagcatgtatttatggtatagatttttttaggactatccttatttttgtgtgttctgtcctattgcctttgtaaactctcttagactatgtgtctttagaaattatggcctcccatatgttaattaattaatgtttataattaatatgcccattataga

SEQ ID NO: 420258 - DNA, 866 bp, Homo sapiens
acccggctcaacgaaggaagttcagggcgggaccagagattggccattccgctactgcgcaaagatggtggaggaggagaacatccgcgtggttcgttgtggcggcagcgagttgaactttaggagagctgtgttctctgcagattctaagtatatcttctgtgtctctggagactttgttaaagtttacagcacagttacagaagagtgtgtacacatactgcatggacacagaaatctggtgactggaatccagcttaaccccaacaaccatctacagctgtattcttgttcccttgatggcacaattaaactgtgggactatatagatggcatcttaataaagactttcatagttggatgtaaacttcatgccctctttactcttgcccaagctgaggattctgtctttgttatagtgaataaagaaaaaccagatatatttcagctggtttcagtgaaactgccaaaatcctcaagccaggaagtagaagccaaggagctgtcctttgttttggattacataaaccagtcacccaagtgcattgcctttggaaacgaggtaaattttgttttgttcgttttctgttttgtacctaaaatttctttcctgcaatctctcttctgagcattttatgttacagtgattttatattcccttgaattactatatttgtattagtaactaagaagcctcttcattgctttagcatgtatttatggtatagatttttttaggactatccttatttttgtgtgttctgtcctattgcctttgtaaactctcttagactatgtgtctttagaaattatggcctcccatatgttaattaattaatgtttataattaatatgcccattataga

SEQ ID NO: 420259 - DNA, 621 bp, Homo sapiens
tactactaaattcgcggccgcgtcgacgctcttcgttaagtcggccttcccaacatggcgcagtctattaacatcacggagctgaatctgccgcagctagaaatgctcaagaaccagctggaccaggaagtggagttcttgtccacgtccattgctcagctcaaagtggtacagaccaagtatgtggaagccaaggactgtctgaacgtgctgaacaagagcaacgaggggaaagaattactcgtcccactgacgagttctatgtatgtccctgggaagctgcatgatgtggaacacgtgctcatcgatgtgggaactgggtactatgtagagaagacagctgaggatgccaaggacttcttcaagaggaagatagattttctaaccaagcagatggagaaaatccaaccagctcttcaggagaagcacgccatgaaacaggccgtcatggaaatgatgagtcagaagattcagcagctcacagccctgggggcagctcaggctactgctaaggcctgagagtttttgcagaaatggggcagagggacaccctttgggcgtggcttcctggtgatgggaagggtcttgtgttttaatgccaataaatgtgccagctgggca

SEQ ID NO: 420260 - DNA, 2235 bp, Homo sapiens
atatcgtggttgtgtcgtgagaactttaagattttgcagttccttgtaggcaggagtcctgtttgctgctactttacaatactaggcttaagacattttatgaaatgaactcacacaacagtctctgagaggctcaagcccctccttcccttccgggacggaggatcatagagctgtctggcgcagcgaggcctcccggcgccaccgagacgcgcagaggacggctagagcgttgctcgccgagagacttcctcttcgttaagtcggccttcccaacatggcgcagtctattaacatcacggagctgaatctgccgcagctagaaatgctcaagaaccagctggaccaggaagtggagttcttgtccacgtccattgctcagctcaaagtggtacagaccaagtatgtggaagccaaggactgtctgaacgtgctgaacaagagcaacgaggacggaatttcgctctgtcgcccaggctggagcgcaatggtgagatcttggcttactgcaacctccgcctcccgagttcaagagattcttctgcctcagtctcccgagtagctgggactttaggtacgcgccaccacgaccggctaatttttgtattaatagtggagttgggggtttcaccatgttggccaggctagtctcgaactcctgacctcgtgatccgcctgcctcggcctcccaaagtgctaggattacattacaggcgtgagccactgcccccggccaagaatactcttattacacactttgtagctcttttatctgacttcacaccaacatccagctaatgtcttgtgaacaccaaggagtatgtatagttgagatgtaatatttccctttgctgtttgagaacattaatatggagataaagctggtggtttacactttgctaatatcttagaagatacaggcaatagacaaaaataggaggatatagaaacagggagcttggctctgttaatcttcaacttcagcttaattgtggctcatttctaaactgtcactaagaaacctggattgtgttcacttgttcagtgttttatttgaatgagcaagttatggcagtagggcatctttaatctgtagtctcagaactgacaggctaaaaggaacacaggaatagtagtgtgtagtagggaatggtttaaaaaaaaaaattagccaggcacagtggttcacgcctgtaatcccagcactttgggaggccaaggctggcagatcacctgaggtcaggagttagagatcggtctggccaacatggtgaaaccccgtctttactaaatatacaaaaattagccaggcgtggtggcacatgcttgtaatcccagctactccggcgactgagacaggagaattgctttaacccgagaggcagaggttgcagtgagccgatagcgggcaattgcactccaacctgggcgatagagcgagactctgtctcagaaagcaaaaaacaaacaaaacattgactttgtcaggaattagctacttcatgattgagggcattaagggaaatgaggctggctttttacttgtagtactctacaacagtaggaaaacattatgtctagtctttctggaggggctaatgggaagaattgcaagaactgcttagagagtgagagatgggatgaggcaggacaagagggtgttccagcatacatcattttctccttaaagaaccaacttctctgtcttctttccatttggagttataggtattgttctaaggcctccagattattcagtccttatgccttgtagctttttggaaaaagagggtctttggaggccaagcaggctggctggcggaatcatggctcatgctgggctggctagtttttcccttaattcttgcttctcagatgtatgtccctgggaagctgcatgatgtggaacacgtgctcatcgatgtgggaactgggtactatgtagagaagacagctgaggatgccaaggacttcttcaagaggaagatagattttctaaccaagcagatggagaaaatccaaccagctcttcaggagaagcacgccatgaaacaggccgtcatggaaatgatgagtcagaagattcagcagctcacagccctgggggcagctcaggctactgctaaggcctgagagtttttgcagaaatggggcagagggacaccctttgggcgtggcttcctggtgatgggaagggtcttgtgttttaatgccaataaatgtgccagctgggca

SEQ ID NO: 420261 - DNA, 230 bp, Homo sapiens
gcggccgactactactactactgctcgaattcaagcttctaacgatgtacggggacatggaaatgatgagtcagaagattcagcagctcacagccctgggggcagctcaggctactgctaaggcctgagagtttttgcagaaatggggcagagggacaccctttgggcgtggcttcctggtgatgggaagggtcttgtgttttaatgccaataaatgtgccagctgggca

SEQ ID NO: 420262 - DNA, 844 bp, Homo sapiens
atatcgtggttgtgtcgtgagaactttaagattttgcagttccttgtaggcaggagtcctgtttgctgctactttacaatactaggcttaagacattttatgaaatgaactcacacaacagtctctgagaggctcaagcccctccttcccttccgggacggaggatcatagagctgtctggcgcagcgaggcctcccggcgccaccgagacgcgcagaggacggctagagcgttgctcgccgagagacttcctcttcgttaagtcggccttcccaacatggcgcagtctattaacatcacggagctgaatctgccgcagctagaaatgctcaagaaccagctggaccaggaagtggagttcttgtccacgtccattgctcagctcaaagtggtacagaccaagtatgtggaagccaaggactgtctgaacgtgctgaacaagagcaacgaggggaaagaattactcgtcccactgacgagttctatgtatgtccctgggaagctgcatgatgtggaacacgtgctcatcgatgtgggaactgggtactatgtagagaagacagctgaggatgccaaggacttcttcaagaggaagatagattttctaaccaagcagatggagaaaatccaaccagctcttcaggagaagcacgccatgaaacaggccgtcatggaaatgatgagtcagaagattcagcagctcacagccctgggggcagctcaggctactgctaaggcctgagagtttttgcagaaatggggcagagggacaccctttgggcgtggcttcctggtgatgggaagggtcttgtgttttaatgccaataaatgtgccagctgggca

SEQ ID NO: 420263 - DNA, 603 bp, Homo sapiens
aggctagtagaggcgggtgtgaatcggccgaggcacatggcgcagtctattaacatcacggagctgaatctgccgcagctagaaatgctcaagaaccagctggaccaggaagtggagttcttgtccacgtccattgctcagctcaaagtggtacagaccaagtatgtggaagccaaggactgtctgaacgtgctgaacaagagcaacgaggggaaagaattactcgtcccactgacgagttctatgtatgtccctgggaagctgcatgatgtggaacacgtgctcatcgatgtgggaactgggtactatgtagagaagacagctgaggatgccaaggacttcttcaagaggaagatagattttctaaccaagcagatggagaaaatccaaccagctcttcaggagaagcacgccatgaaacaggccgtcatggaaatgatgagtcagaagattcagcagctcacagccctgggggcagctcaggctactgctaaggcctgagagtttttgcagaaatggggcagagggacaccctttgggcgtggcttcctggtgatgggaagggtcttgtgttttaatgccaataaatgtgccagctgggca

SEQ ID NO: 420264 - DNA, 487 bp, Homo sapiens
ccctattttccttctttattgcaagtatgtggaagccaaggactgtctgaacgtgctgaacaagagcaacgaggggaaagaattactcgtcccactgacgagttctatgtatgtccctgggaagctgcatgatgtggaacacgtgctcatcgatgtgggaactgggtactatgtagagaagacagctgaggatgccaaggacttcttcaagaggaagatagattttctaaccaagcagatggagaaaatccaaccagctcttcaggagaagcacgccatgaaacaggccgtcatggaaatgatgagtcagaagattcagcagctcacagccctgggggcagctcaggctactgctaaggcctgagagtttttgcagaaatggggcagagggacaccctttgggcgtggcttcctggtgatgggaagggtcttgtgttttaatgccaataaatgtgccagctgggcagaaggaataaggtaccgctta

SEQ ID NO: 420265 - DNA, 256 bp, Homo sapiens
ctctagacatcccgtcacggtagatttagatggagaaatccaaccagctcttcaggagaagcacgccatgaaacaggccgtcatggaaatgatgagtcagaagattcagcagctcacagccctgggggcagctcaggctactgctaaggcctgagagtttttgcagaaatggggcagagggacaccctttgggcgtggcttcctggtgatgggaagggtcttgtgttttaatgccaataaatgtgccagctgggca

SEQ ID NO: 420266 - DNA, 801 bp, Homo sapiens
  misc_feature (653)..(653): n is a, c, g, or t
  misc_feature (659)..(659): n is a, c, g, or t
  misc_feature (688)..(688): n is a, c, g, or t
  misc_feature (693)..(693): n is a, c, g, or t
  misc_feature (698)..(698): n is a, c, g, or t
  misc_feature (703)..(703): n is a, c, g, or t
  misc_feature (705)..(705): n is a, c, g, or t
  misc_feature (707)..(708): n is a, c, g, or t
  misc_feature (710)..(712): n is a, c, g, or t
  misc_feature (714)..(714): n is a, c, g, or t
  misc_feature (717)..(718): n is a, c, g, or t
  misc_feature (743)..(743): n is a, c, g, or t
  misc_feature (750)..(750): n is a, c, g, or t
tactactaaattcgcggccgcgtcgacgctcttcgttaagtcggccttcccaacatggcgcagtctattaacatcacggagctgaatctgccgcagctagaaatgctcaagaaccagctggaccaggaagtggagttcttgtccacgtccattgctcagctcaaagtggtacagaccaagtatgtggaagccaaggactgtctgaacgtgctgaacaagagcaacgaggggaaagaattactcgtcccactgacgagttctatgtatgtccctgggaagctgcatgatgtggaacacgtgctcatcgatgtgggaactgggtactatgtagagaagacagctgaggatgccaaggacttcttcaagaggaagatagattttctaaccaagcagatggagaaaatccaaccagctcttcaggagaagcacgccatgaaacaggccgtcatggaaatgatgagtcagaagattcagcagctcacagccctgggggcagctcaggctactgctaaggcctgagagtttttgcagaaatggggcagagggacaccctttgggcgtggcttcctggtgatgggaagggtcttgtgttttaatgccaataaatgtgccagctgggcagaaaaaaaaaaaaaaaaaaaaaaaaaaaatcngggggntttttgggggggggggaaaaaggggtttntaaangggcnggggncntnntnnntncgnncccttttttgtacaaggggggaatnggggggncccaaaaagggggggggaataattggaaagacgggtaccgtaattgaaaac

SEQ ID NO: 420267 - DNA, 1031 bp, Homo sapiens
tactactaaattcgcggccgcgtcgacgctcttcgttaagtcggccttcccaacatggcgcagtctattaacatcacggagctgaatctgccgcagctagaaatgctcaagaaccagctggaccaggaagtggagttcttgtccacgtccattgctcagctcaaagtggtacagaccaagtatgtggaagccaaggactgtctgaacgtgctgaacaagagcaacgaggggaaagaattactcgtcccactgacgagttctatgtatgtccctgggaagctgcatgatgtggaacacgtgctcatcgatgtgggaactgggtactatgtagagaagacagctgaggatgccaaggacttcttcaagaggaagatagattttctaaccaagcagatggagaaaatccaaccagctcttcaggagaagcacgccatgaaacaggccgtcatggaaatgatgagtcagaagattcagcagctcacagccctgggggcagctcaggctactgctaaggcctgagagtttttgcagaaatggggcagagggacaccctttgggcgtggcttcctggtgatgggaagggtcttgtgttttaatgccaataaatgtgccagctgggcagaaaaaaaaaaaaaaaaaaaaaaaaaaaaaaaaaaaaaaaaaaaaaaaaaaaaaaaaaaaaaaaaagcgggggttttttttgggggggggaaaaaaagggtaaaagagggctgtgaatattgggaacccacttctttgacagaggagaaaaggcggggacccccaaagagagggggttaaaacacaagcggggtcatcggtaatgagcgccgcgcagaaaggcaggaaccagcaagaggaaggagcgacgagacgcaaagacgaggcgaaaacacagagcgagaagacgaaggctacgaaaacgaacaacaaacagcaggaaaagaaaaggaggaccaagcacagcagcagagaaacgcaggagagaagacacacgcacagagcaacaaagaagagagagacgagcacag

SEQ ID NO: 420268 - DNA, 893 bp, Homo sapiens
tactactaaattcgcggccgcgtcgacgctcttcgttaagtcggccttcccaacatggcgcagtctattaacatcacggagctgaatctgccgcagctagaaatgctcaagaaccagctggaccaggaagtggagttcttgtccacgtccattgctcagctcaaagtggtacagaccaagtatgtggaagccaaggactgtctgaacgtgctgaacaagagcaacgaggggaaagaattactcgtcccactgacgagttctatgtatgtccctgggaagctgcatgatgtggaacacgtgctcatcgatgtgggaactgggtactatgtagagaagacagctgaggatgccaaggacttcttcaagaggaagatagattttctaaccaagcagatggagaaaatccaaccagctcttcaggagaagcacgccatgaaacaggccgtcatggaaatgatgagtcagaagattcagcagctcacagccctgggggcagctcaggctactgctaaggcctgagagtttttgcagaaatggggcagagggacaccctttgggcgtggcttcctggtgatgggaagggtcttgtgttttaatgccaataaatgtgccagctgggcagaaaaaaaaaaaaaaaaaaaaaaaaactggagactagttctctctctccgtgactccagtcagtggtcctggtcccactgtcccagtgtaggttagtattccttcacatcctgtccatggcttaagaatgtcccacttcctaacgtgactccaaactgcatctctacatttaggaacagagacccgccttaagagactggatcgcacacctttgcaacagatgtgttctgattctctgaacctactagttatacatagtggaatgaaggtcc

SEQ ID NO: 420269 - DNA, 1277 bp, Homo sapiens
tactactaaattcgcggccgcgtcgacgctcttcgttaagtcggccttcccaacatggcgcagtctattaacatcacggagctgaatctgccgcagctagaaatgctcaagaaccagctggaccaggaagtggagttcttgtccacgtccattgctcagctcaaagtggtacagaccaagtatgtggaagccaaggactgtctgaacgtgctgaacaagagcaacgaggggaaagaattactcgtcccactgacgagttctatgtatgtccctgggaagctgcatgatgtggaacacgtgctcatcgatgtgggaactgggtactatgtagagaagacagctgaggatgccaaggacttcttcaagaggaagatagattttctaaccaagcagatggagaaaatccaaccagctcttcaggagaagcacgccatgaaacaggccgtcatggaaatgatgagtcagaagattcagcagctcacagccctgggggcagctcaggctactgctaaggcctgagagtttttgcagaaatggggcagagggacaccctttgggcgtggcttcctggtgatgggaagggtcttgtgttttaatgccaataaatgtgccagctgggcagaaaaaaaaaaaaaaaaaaaaaaaaaaaaaaaaaaaaaaaaaaaaaaaaaaaaaaaaaaaaaaaaaagggggcgggcctctactaaatatattatctctcctcgaggggggcgccatatgtgtactgctactcccggtttttttgttgcaacagagggggcccctactatgaggagggtgtatatttaacaacccggtagcgcactgcggcgcggtgtttttaaaacgacgcgtcgtgagtggggaacaaacatgtgtgattcccggtgaggagatctctctttgagggaggacaaagagcacaacgctatatatgactcgggggggggggggggaaaacaactaatggtgtgtgggaacaaaaaaacttatcacgatcagaaaagaatagatatatatatataaaggcagttctttatggagggaggggaaactatttatttaaatacattgttttagaaagggatggtggtcttatcaaatggtgtgtgtgtcaaacaaaaccataggcgagtgtaatatattatcgtcgagtggggagtgtgagttagagagaaagacgtttttgtcggtaacctaaaggaggagggtaatttatatgtcttattttgatgtagaaagactatctttttatttaatatcaacagaggaaggta

SEQ ID NO: 420270 - DNA, 1325 bp, Homo sapiens
cactggaattcgggcccctcttccacttcccttcacactatctcttttgcctaataaatacggaaggctgtgtacaaggtcaggtcccttgtccactagaggcaaggtgcttggcgtcaggaagcaattgccctcagcaaaccttctggggcaggcacagtcatgagtttgcccacattctgtattcatgataaacagtttgctgtttgatcgtatagactcagtggaatgttggtcacgtcccatgggcctttggctctctgtatatcctcctttctgtttatgtattaattgaaggagtgtaaggccagggtgggcagctctcattttcccattgatggtccatccaactttacagactgtccctggtgctccagtagtttctcagcctcctgtgtggttttcttgagttgtccccaggttatgggggttgatgtcatgactgtagtcggccttcccaacatggcgcagtctattaacatcacggagctgaatctgccgcagctagaaatgctcaagaaccagctggaccaggaagtggagttcttgtccacgtccattgctcagctcaaagtggtacagaccaagtatgtggaagccaaggactgtctgaacgtgctgaacaagagcaacgaggggaaagaattactcgtcccactgacgagttctatgtatgtccctgggaagctgcatgatgtggaacacgtgctcatcgatgtgggaactgggtactatgtagagaagacagctgaggatgccaaggacttcttcaagaggaagatagattttctaaccaagcagatggagaaaatccaaccagctcttcaggagaagcacgccatgaaacaggccgtcatggaaatgatgagtcagaagattcagcagctcacagccctgggggcagctcaggctactgctaaggcctgagagtttttgcagaaatggggcagagggacaccctttgggcgtggcttcctggtgatgggaagggtcttgtgttttaatgccaataaatgtgccagctgggcaaaaaaaaaaaaaaaaaaaaaaaaaaaaaaaaaaaaaaaaaaaaaaacctccgagagggtctcttttgtcgcgggtgtgcgcggaaaaagagagaggttagagtgaaaagtggcacacctgtgtggctcaatatgaggcggtgtttctccggtagccccacaggcttctttgtgtgttcaacaaagtgtggcgtaaaaatttgcgcggggtatctcccccttattagaggaggggcgcggttattataatttgcgaaattaggccccgggtgttttacccgtgtgatattaaaggaa

SEQ ID NO: 420271 - DNA, 1000 bp, Homo sapiens
  misc_feature (12)..(12): n is a, c, g, or t
  misc_feature (27)..(27): n is a, c, g, or t
  misc_feature (37)..(37): n is a, c, g, or t
  misc_feature (50)..(50): n is a, c, g, or t
ttgatttgactncctttgtgaagtccnactctatttnggctaaacttccngcggatctgccgcagctagaaatgctcaagaaccagctggaccaggaagtggagttcttgtccacgtccattgctcagctcaaagtggtacagaccaagtatgtggaagccaaggactgtctgaacgtgctgaacaagagcaacgaggggaaagaattactcgtcccactgacgagttctatgtatgtccctgggaagctgcatgatgtggaacacgtgctcatcgatgtgggaactgggtactatgtagagaagacagctgaggatgccaaggacttcttcaagaggaagatagattttctaaccaagcagatggagaaaatccaaccagctcttcaggagaagcacgccatgaaacaggccgtcatggaaatgatgagtcagaagattcagcagctcacagccctgggggcagctcaggctactgctaaggcctgagagtttttgcagaaatggggcagagggacaccctttgggcgtggcttcctggtgatgggaagggtcttgtgttttaatgccaataaatgtgccagctgggcagaaaaaaaaaaaaaaaaaaaaaaaaaaaaaaaaaaaaaaaaaaaaaaaaaaaaaaaaaaaaaaaaagcgggggttttttttgggggggggaaaaaaagggtaaaagagggctgtgaatattgggaacccacttctttgacagaggagaaaaggcggggacccccaaagagagggggttaaaacacaagcggggtcatcggtaatgagcgccgcgcagaaaggcaggaaccagcaagaggaaggagcgacgagacgcaaagacgaggcgaaaacacagagcgagaagacgaaggctacgaaaacgaacaacaaacagcaggaaaagaaaaggaggaccaagcacagcagcagagaaacgcaggagagaagacacacgcacagagcaacaaagaagagagagacgagcacag

SEQ ID NO: 420272 - DNA, 713 bp, Homo sapiens
tactactaaattcgcggccgcgtcgacgctcttcgttaagtcggccttcccaacatggcgcagtctattaacatcacggagctgaatctgccgcagctagaaatgctcaagaaccagctggaccaggaagtggagttcttgtccacgtccattgctcagctcaaagtggtacagaccaagtatgtggaagccaaggactgtctgaacgtgctgaacaagagcaacgaggggaaagaattactcgtcccactgacgagttctatgtatgtccctgggaagctgcatgatgtggaacacgtgctcatcgatgtgggaactgggtactatgtagagaagacagctgaggatgccaaggacttcttcaagaggaagatagattttctaaccaagcagatggagaaaatccaaccagctcttcaggagaagcacgccatgaaacaggccgtcatggaaatgatgagtcagaagattcagcagctcacagccctgggggcagctcaggctactgctaaggcctgagagtttttgcagaaatggggcagagggacaccctttgggcgtggcttcctggtgatgggaagggtcttgtgttttaatgccaataaatgtgccagctgggcataaaatccaataaagaaaatcaagggggccggttccaatttgccataggaggcgataaaattacatggcgtttactcttttgcctgggttcc

SEQ ID NO: 420273 - DNA, 659 bp, Homo sapiens
tactactaaattcgcggccgcgtcgacgctcttcgttaagtcggccttcccaacatggcgcagtctattaacatcacggagctgaatctgccgcagctagaaatgctcaagaaccagctggaccaggaagtggagttcttgtccacgtccattgctcagctcaaagtggtacagaccaagtatgtggaagccaaggactgtctgaacgtgctgaacaagagcaacgaggggaaagaattactcgtcccactgacgagttctatgtatgtccctgggaagctgcatgatgtggaacacgtgctcatcgatgtgggaactgggtactatgtagagaagacagctgaggatgccaaggacttcttcaagaggaagatagattttctaaccaagcagatggagaaaatccaaccagctcttcaggagaagcacgccatgaaacaggccgtcatggaaatgatgagtcagaagattcagcagctcacagccctgggggcagctcaggctactgctaaggcctgagagtttttgcagaaatggggcagagggacaccctttgggcgtggcttcctggtgatgggaagggtcttgtgttttaatgccaataaatgtgccagctgggcatgggccaattggccttttaggggaggggtttataaatt

SEQ ID NO: 420274 - DNA, 592 bp, Homo sapiens
tactactaaattcgcggccgcgtcgacgctcttcgttaagtcggccttcccaacatggcgcagtctattaacatcacggagctgaatctgccgcagctagaaatgctcaagaaccagctggaccaggaagtggagttcttgtccacgtccattgctcagctcaaagtggtacagaccaagtatgtggaagccaaggactgtctgaacgtgctgaacaagagcaacgaggggaaagaattactcgtcccactgacgagttctatgtatgtccctgggaagctgcatgatgtggaacacgtgctcatcgatgtgggaactgggtactatgtagagaagacagctgaggatgccaaggacttcttcaagaggaagatagattttctaaccaagcagatggagaaaatccaaccagctcttcaggagaagcacgccatgaaacaggccgtcatggaaatgatgagtcagaagattcagcagctcacagccctgggggcagctcaggctactgctaaggcctgagagtttttgcagaaatggggcagagggacacccttttacgtgcttcctgtgttggtaccgtcgatcaggatcc

SEQ ID NO: 420275 - DNA, 959 bp, Homo sapiens
cactggaattcgggcccctcttccacttcccttcacactatctcttttgcctaataaatacggaaggctgtgtacaaggtcaggtcccttgtccactagaggcaaggtgcttggcgtcaggaagcaattgccctcagcaaaccttctggggcaggcacagtcatgagtttgcccacattctgtattcatgataaacagtttgctgtttgatcgtatagactcagtggaatgttggtcacgtcccatgggcctttggctctctgtatatcctcctttctgtttatgtattaattgaaggagtgtaaggccagggtgggcagctctcattttcccattgatggtccatccaactttacagactgtccctggtgctccagtagtttctcagcctcctgtgtggttttcttgagttgtccccaggttatgggggttgatgtcatgactgtagtcggccttcccaacatggcgcagtctattaacatcacggagctgaatctgccgcagctagaaatgctcaagaaccagctggaccaggaagtggagttcttgtccacgtccattgctcagctcaaagtggtacagaccaagtatgtggaagccaaggactgtctgaacgtgctgaacaagagcaacgaggggaaagaattactcgtcccactgacgagttctatgtatgtccctgggaagctgcatgatgtggaacacgtgctcatcgatgtgggaactgggtactatgtagagaagacagctgaggatgccaaggacttcttcaagaggaagatagattttctaaccaagcagatggagaaaatccaaccagctcttcaggagaagcacgccatgaaacaggccgtcatggaaatgatgagtcagaagattcagcagctcacagccctgggggcagctcaggctactgctaaggcctgaacgtgttccgagtcatggcatggaccgagcta

SEQ ID NO: 420276 - DNA, 1603 bp, Homo sapiens
cactggaattcgggcccctcttccacttcccttcacactatctcttttgcctaataaatacggaaggctgtgtacaaggtcaggtcccttgtccactagaggcaaggtgcttggcgtcaggaagcaattgccctcagcaaaccttctggggcaggcacagtcatgagtttgcccacattctgtattcatgataaacagtttgctgtttgatcgtatagactcagtggaatgttggtcacgtcccatgggcctttggctctctgtatatcctcctttctgtttatgtattaattgaaggagtgtaaggccagggtgggcagctctcattttcccattgatggtccatccaactttacagactgtccctggtgctccagtagtttctcagcctcctgtgtggttttcttgagttgtccccaggttatgggggttgatgtcatgactgtagtcggccttcccaacatggcgcagtctattaacatcacggagctgaatctgccgcagctagaaatgctcaagaaccagctggaccaggaagtggagttcttgtccacgtccattgctcagctcaaagtggtacagaccaagtatgtggaagccaaggactgtctgaacgtgctgaacaagagcaacgagggtatggggtaggcgggtgagggtaacctaaagtggcgaacctgcttctctcgtcccacctcctaacccagtttttcttacctgaaacgagaaaatccattacatatcgtataccgcttcatgaaccctttgcatgttgcctgcctagaattgaaaagtacaggacattcctctgctcctattgcccctgtttccgttcttttcacactgtctgtgggtgctgtgccctgttggaactctctttaacgtcttacgttggagccgctaaccttccccaggtgtttgtcttcattgctttcacagggaaagaattactcgtcccactgacgagttctatgtatgtccctgggaagctgcatgatgtggaacacgtgctcatcgatgtgggaactgggtactatgtagagaagacagctgaggatgccaaggacttcttcaagaggaagatagattttctaaccaagcagatggagaaaatccaaccagctcttcaggagaagcacgccatgaaacaggccgtcatggaaatgatgagtcagaagattcagcagctcacagccctgggggcagctcaggctactgctaaggcctgagagtttttgcagaaatggggcagagggacaccctttgggcgtggcttcctggtgatgggaagggtcttgtgttttaatgccaataaatgtgccagctgggcagaaaaaaaaaaaaaaaaaaaaaaaaactggagactagttctctctctccgtgactccagtcagtggtcctggtcccactgtcccagtgtaggttagtattccttcacatcctgtccatggcttaagaatgtcccacttcctaacgtgactccaaactgcatctctacatttaggaacagagacccgccttaagagactggatcgcacacctttgcaacagatgtgttctgattctctgaacctactagttatacatagtggaatgaaggtcc

SEQ ID NO: 420277 - DNA, 1331 bp, Homo sapiens
cactggaattcgggcccctcttccacttcccttcacactatctcttttgcctaataaatacggaaggctgtgtacaaggtcaggtcccttgtccactagaggcaaggtgcttggcgtcaggaagcaattgccctcagcaaaccttctggggcaggcacagtcatgagtttgcccacattctgtattcatgataaacagtttgctgtttgatcgtatagactcagtggaatgttggtcacgtcccatgggcctttggctctctgtatatcctcctttctgtttatgtattaattgaaggagtgtaaggccagggtgggcagctctcattttcccattgatggtccatccaactttacagactgtccctggtgctccagtagtttctcagcctcctgtgtggttttcttgagttgtccccaggttatgggggttgatgtcatgactgtagtcggccttcccaacatggcgcagtctattaacatcacggagctgaatctgccgcagctagaaatgctcaagaaccagctggaccaggaagtggagttcttgtccacgtccattgctcagctcaaagtggtacagaccaagtatgtggaagccaaggactgtctgaacgtgctgaacaagagcaacgagggtatggggtaggcgggtgagggtaacctaaagtggcgaacctgcttctctcgtcccacctcctaacccagtttttcttacctgaaacgagaaaatccattacatatcgtataccgcttcatgaaccctttgcatgttgcctgcctagaattgaaaagtacaggacattcctctgctcctattgcccctgtttccgttcttttcacactgtctgtgggtgctgtgccctgttggaactctctttaacgtcttacgttggagccgctaaccttccccaggtgtttgtcttcattgctttcacagggaaagaattactcgtcccactgacgagttctatgtatgtccctgggaagctgcatgatgtggaacacgtgctcatcgatgtgggaactgggtactatgtagagaagacagctgaggatgccaaggacttcttcaagaggaagatagattttctaaccaagcagatggagaaaatccaaccagctcttcaggagaagcacgccatgaaacaggccgtcatggaaatgatgagtcagaagattcagcagctcacagccctgggggcagctcaggctactgctaaggcctgagagtttttgcagaaatggggcagagggacaccctttgggcgtggcttcctggtgatgggaagggtcttgtgttttaatgccaataaatgtgccagctgggca

SEQ ID NO: 420278 - DNA, 1198 bp, Homo sapiens
cactggaattcgggcccctcttccacttcccttcacactatctcttttgcctaataaatacggaaggctgtgtacaaggtcaggtcccttgtccactagaggcaaggtgcttggcgtcaggaagcaattgccctcagcaaaccttctggggcaggcacagtcatgagtttgcccacattctgtattcatgataaacagtttgctgtttgatcgtatagactcagtggaatgttggtcacgtcccatgggcctttggctctctgtatatcctcctttctgtttatgtattaattgaaggagtgtaaggccagggtgggcagctctcattttcccattgatggtccatccaactttacagactgtccctggtgctccagtagtttctcagcctcctgtgtggttttcttgagttgtccccaggttatgggggttgatgtcatgactgtagtcggccttcccaacatggcgcagtctattaacatcacggagctgaatctgccgcagctagaaatgctcaagaaccagctggaccagggaaagaattactcgtcccactgacgagttctatgtatgtccctgggaagctgcatgatgtggaacacgtgctcatcgatgtgggaactgggtactatgtagagaagacagctgaggatgccaaggacttcttcaagaggaagatagattttctaaccaagcagatggagaaaatccaaccagctcttcaggagaagcacgccatgaaacaggccgtcatggaaatgatgagtcagaagattcagcagctcacagccctgggggcagctcaggctactgctaaggcctgagagtttttgcagaaatggggcagagggacaccctttgggcgtggcttcctggtgatgggaagggtcttgtgttttaatgccaataaatgtgccagctgggcagaaaaaaaaaaaaaaaaaaaaaaaaactggagactagttctctctctccgtgactccagtcagtggtcctggtcccactgtcccagtgtaggttagtattccttcacatcctgtccatggcttaagaatgtcccacttcctaacgtgactccaaactgcatctctacatttaggaacagagacccgccttaagagactggatcgcacacctttgcaacagatgtgttctgattctctgaacctactagttatacatagtggaatgaaggtcc

SEQ ID NO: 420279 - DNA, 997 bp, Homo sapiens
cactggaattcgggcccctcttccacttcccttcacactatctcttttgcctaataaatacggaaggctgtgtacaaggtcaggtcccttgtccactagaggcaaggtgcttggcgtcaggaagcaattgccctcagcaaaccttctggggcaggcacagtcatgagtttgcccacattctgtattcatgataaacagtttgctgtttgatcgtatagactcagtggaatgttggtcacgtcccatgggcctttggctctctgtatatcctcctttctgtttatgtattaattgaaggagtgtaaggccagggtgggcagctctcattttcccattgatggtccatccaactttacagactgtccctggtgctccagtagtttctcagcctcctgtgtggttttcttgagttgtccccaggttatgggggttgatgtcatgactgtagtcggccttcccaacatggcgcagtctattaacatcacggagctgaatctgccgcagctagaaatgctcaagaaccagctggaccaggaagtggagttcttgtccacgtccattgctcagctcaaagtggtacagaccaagtatgtggaagccaaggactgtctgaacgtgctgaacaagagcaacgaggatgtatgtccctgggaagctgcatgatgtggaacacgtgctcatcgatgtgggaactgggtactatgtagagaagacagctgaggatgccaaggacttcttcaagaggaagatagattttctaaccaagcagatggagaaaatccaaccagctcttcaggagaagcacgccatgaaacaggccgtcatggaaatgatgagtcagaagattcagcagctcacagccctgggggcagctcaggctactgctaaggcctgagagtttttgcagaaatggggcagagggacaccctttgggcgtggcttcctggtgatgggaagggtcttgtgttttaatgccaataaatgtgccagctgggca

SEQ ID NO: 420280 - DNA, 2907 bp, Homo sapiens
cactggaattcgggcccctcttccacttcccttcacactatctcttttgcctaataaatacggaaggctgtgtacaaggtcaggtcccttgtccactagaggcaaggtgcttggcgtcaggaagcaattgccctcagcaaaccttctggggcaggcacagtcatgagtttgcccacattctgtattcatgataaacagtttgctgtttgatcgtatagactcagtggaatgttggtcacgtcccatgggcctttggctctctgtatatcctcctttctgtttatgtattaattgaaggagtgtaaggccagggtgggcagctctcattttcccattgatggtccatccaactttacagactgtccctggtgctccagtagtttctcagcctcctgtgtggttttcttgagttgtccccaggttatgggggttgatgtcatgactgtagtcggccttcccaacatggcgcagtctattaacatcacggagctgaatctgccgcagctagaaatgctcaagaaccagctggaccaggaagtggagttcttgtccacgtccattgctcagctcaaagtggtacagaccaagtatgtggaagccaaggactgtctgaacgtgctgaacaagagcaacgagggtatggggtaggcgggtgagggtaacctaaagtggcgaacctgcttctctcgtcccacctcctaacccagtttttcttacctgaaacgagaaaatccattacatatcgtataccgcttcatgaaccctttgcatgttgcctgcctagaattgaaaagtacaggacattcctctgctcctattgcccctgtttccgttcttttcacactgtctgtgggtgctgtgccctgttggaactctctttaacgtcttacgttggagccgctaaccttccccaggtgtttgtcttcattgctttcacagggaaagaattactcgtcccactgacgagttctgtatcctttccacaggaacggctacctgctgccttctccctttctccttcactcccccaaaaagcggggagggggattgttttgattacttcagattaccctctcctcacaatgattttgaggataccctttttttttttctttcttttttgaacggaatttcgctctgtcgcccaggctggagcgcaatggtgagatcttggcttactgcaacctccgcctcccgagttcaagagattcttctgcctcagtctcccgagtagctgggactttaggtacgcgccaccacgaccggctaatttttgtattaatagtggagttgggggtttcaccatgttggccaggctagtctcgaactcctgacctcgtgatccgcctgcctcggcctcccaaagtgctaggattacattacaggcgtgagccactgcccccggccaagaatactcttattacacactttgtagctcttttatctgacttcacaccaacatccagctaatgtcttgtgaacaccaaggagtatgtatagttgagatgtaatatttccctttgctgtttgagaacattaatatggagataaagctggtggtttacactttgctaatatcttagaagatacaggcaatagacaaaaataggaggatatagaaacagggagcttggctctgttaatcttcaacttcagcttaattgtggctcatttctaaactgtcactaagaaacctggattgtgttcacttgttcagtgttttatttgaatgagcaagttatggcagtagggcatctttaatctgtagtctcagaactgacaggctaaaaggaacacaggaatagtagtgtgtagtagggaatggtttaaaaaaaaaaattagccaggcacagtggttcacgcctgtaatcccagcactttgggaggccaaggctggcagatcacctgaggtcaggagttagagatcggtctggccaacatggtgaaaccccgtctttactaaatatacaaaaattagccaggcgtggtggcacatgcttgtaatcccagctactccggcgactgagacaggagaattgctttaacccgagaggcagaggttgcagtgagccgatagcgggcaattgcactccaacctgggcgatagagcgagactctgtctcagaaagcaaaaaacaaacaaaacattgactttgtcaggaattagctacttcatgattgagggcattaagggaaatgaggctggctttttacttgtagtactctacaacagtaggaaaacattatgtctagtctttctggaggggctaatgggaagaattgcaagaactgcttagagagtgagagatgggatgaggcaggacaagagggtgttccagcatacatcattttctccttaaagaaccaacttctctgtcttctttccatttggagttataggtattgttctaaggcctccagattattcagtccttatgccttgtagctttttggaaaaagagggtctttggaggccaagcaggctggctggcggaatcatggctcatgctgggctggctagtttttcccttaattcttgcttctcagatgtatgtccctgggaagctgcatgatgtggaacacgtgctcatcgatgtgggaactgggtactatgtagagaagacagctgaggatgccaaggacttcttcaagaggaagatagattttctaaccaagcagatggagaaaatccaaccagctcttcaggagaagcacgccatgaaacaggccgtcatggaaatgatgagtcagaagattcagcagctcacagccctgggggcagctcaggctactgctaaggcctgagagtttttgcagaaatggggcagagggacaccctttgggcgtggcttcctggtgatgggaagggtcttgtgttttaatgccaataaatgtgccagctgggca

SEQ ID NO: 420281 - DNA, 3179 bp, Homo sapiens
cactggaattcgggcccctcttccacttcccttcacactatctcttttgcctaataaatacggaaggctgtgtacaaggtcaggtcccttgtccactagaggcaaggtgcttggcgtcaggaagcaattgccctcagcaaaccttctggggcaggcacagtcatgagtttgcccacattctgtattcatgataaacagtttgctgtttgatcgtatagactcagtggaatgttggtcacgtcccatgggcctttggctctctgtatatcctcctttctgtttatgtattaattgaaggagtgtaaggccagggtgggcagctctcattttcccattgatggtccatccaactttacagactgtccctggtgctccagtagtttctcagcctcctgtgtggttttcttgagttgtccccaggttatgggggttgatgtcatgactgtagtcggccttcccaacatggcgcagtctattaacatcacggagctgaatctgccgcagctagaaatgctcaagaaccagctggaccaggaagtggagttcttgtccacgtccattgctcagctcaaagtggtacagaccaagtatgtggaagccaaggactgtctgaacgtgctgaacaagagcaacgagggtatggggtaggcgggtgagggtaacctaaagtggcgaacctgcttctctcgtcccacctcctaacccagtttttcttacctgaaacgagaaaatccattacatatcgtataccgcttcatgaaccctttgcatgttgcctgcctagaattgaaaagtacaggacattcctctgctcctattgcccctgtttccgttcttttcacactgtctgtgggtgctgtgccctgttggaactctctttaacgtcttacgttggagccgctaaccttccccaggtgtttgtcttcattgctttcacagggaaagaattactcgtcccactgacgagttctgtatcctttccacaggaacggctacctgctgccttctccctttctccttcactcccccaaaaagcggggagggggattgttttgattacttcagattaccctctcctcacaatgattttgaggataccctttttttttttctttcttttttgaacggaatttcgctctgtcgcccaggctggagcgcaatggtgagatcttggcttactgcaacctccgcctcccgagttcaagagattcttctgcctcagtctcccgagtagctgggactttaggtacgcgccaccacgaccggctaatttttgtattaatagtggagttgggggtttcaccatgttggccaggctagtctcgaactcctgacctcgtgatccgcctgcctcggcctcccaaagtgctaggattacattacaggcgtgagccactgcccccggccaagaatactcttattacacactttgtagctcttttatctgacttcacaccaacatccagctaatgtcttgtgaacaccaaggagtatgtatagttgagatgtaatatttccctttgctgtttgagaacattaatatggagataaagctggtggtttacactttgctaatatcttagaagatacaggcaatagacaaaaataggaggatatagaaacagggagcttggctctgttaatcttcaacttcagcttaattgtggctcatttctaaactgtcactaagaaacctggattgtgttcacttgttcagtgttttatttgaatgagcaagttatggcagtagggcatctttaatctgtagtctcagaactgacaggctaaaaggaacacaggaatagtagtgtgtagtagggaatggtttaaaaaaaaaaattagccaggcacagtggttcacgcctgtaatcccagcactttgggaggccaaggctggcagatcacctgaggtcaggagttagagatcggtctggccaacatggtgaaaccccgtctttactaaatatacaaaaattagccaggcgtggtggcacatgcttgtaatcccagctactccggcgactgagacaggagaattgctttaacccgagaggcagaggttgcagtgagccgatagcgggcaattgcactccaacctgggcgatagagcgagactctgtctcagaaagcaaaaaacaaacaaaacattgactttgtcaggaattagctacttcatgattgagggcattaagggaaatgaggctggctttttacttgtagtactctacaacagtaggaaaacattatgtctagtctttctggaggggctaatgggaagaattgcaagaactgcttagagagtgagagatgggatgaggcaggacaagagggtgttccagcatacatcattttctccttaaagaaccaacttctctgtcttctttccatttggagttataggtattgttctaaggcctccagattattcagtccttatgccttgtagctttttggaaaaagagggtctttggaggccaagcaggctggctggcggaatcatggctcatgctgggctggctagtttttcccttaattcttgcttctcagatgtatgtccctgggaagctgcatgatgtggaacacgtgctcatcgatgtgggaactgggtactatgtagagaagacagctgaggatgccaaggacttcttcaagaggaagatagattttctaaccaagcagatggagaaaatccaaccagctcttcaggagaagcacgccatgaaacaggccgtcatggaaatgatgagtcagaagattcagcagctcacagccctgggggcagctcaggctactgctaaggcctgagagtttttgcagaaatggggcagagggacaccctttgggcgtggcttcctggtgatgggaagggtcttgtgttttaatgccaataaatgtgccagctgggcagaaaaaaaaaaaaaaaaaaaaaaaaactggagactagttctctctctccgtgactccagtcagtggtcctggtcccactgtcccagtgtaggttagtattccttcacatcctgtccatggcttaagaatgtcccacttcctaacgtgactccaaactgcatctctacatttaggaacagagacccgccttaagagactggatcgcacacctttgcaacagatgtgttctgattctctgaacctactagttatacatagtggaatgaaggtcc

SEQ ID NO: 420282 - DNA, 2317 bp, Homo sapiens
cactggaattcgggcccctcttccacttcccttcacactatctcttttgcctaataaatacggaaggctgtgtacaaggtcaggtcccttgtccactagaggcaaggtgcttggcgtcaggaagcaattgccctcagcaaaccttctggggcaggcacagtcatgagtttgcccacattctgtattcatgataaacagtttgctgtttgatcgtatagactcagtggaatgttggtcacgtcccatgggcctttggctctctgtatatcctcctttctgtttatgtattaattgaaggagtgtaaggccagggtgggcagctctcattttcccattgatggtccatccaactttacagactgtccctggtgctccagtagtttctcagcctcctgtgtggttttcttgagttgtccccaggttatgggggttgatgtcatgactgtagtcggccttcccaacatggcgcagtctattaacatcacggagctgaatctgccgcagctagaaatgctcaagaaccagctggaccagacggaatttcgctctgtcgcccaggctggagcgcaatggtgagatcttggcttactgcaacctccgcctcccgagttcaagagattcttctgcctcagtctcccgagtagctgggactttaggtacgcgccaccacgaccggctaatttttgtattaatagtggagttgggggtttcaccatgttggccaggctagtctcgaactcctgacctcgtgatccgcctgcctcggcctcccaaagtgctaggattacattacaggcgtgagccactgcccccggccaagaatactcttattacacactttgtagctcttttatctgacttcacaccaacatccagctaatgtcttgtgaacaccaaggagtatgtatagttgagatgtaatatttccctttgctgtttgagaacattaatatggagataaagctggtggtttacactttgctaatatcttagaagatacaggcaatagacaaaaataggaggatatagaaacagggagcttggctctgttaatcttcaacttcagcttaattgtggctcatttctaaactgtcactaagaaacctggattgtgttcacttgttcagtgttttatttgaatgagcaagttatggcagtagggcatctttaatctgtagtctcagaactgacaggctaaaaggaacacaggaatagtagtgtgtagtagggaatggtttaaaaaaaaaaattagccaggcacagtggttcacgcctgtaatcccagcactttgggaggccaaggctggcagatcacctgaggtcaggagttagagatcggtctggccaacatggtgaaaccccgtctttactaaatatacaaaaattagccaggcgtggtggcacatgcttgtaatcccagctactccggcgactgagacaggagaattgctttaacccgagaggcagaggttgcagtgagccgatagcgggcaattgcactccaacctgggcgatagagcgagactctgtctcagaaagcaaaaaacaaacaaaacattgactttgtcaggaattagctacttcatgattgagggcattaagggaaatgaggctggctttttacttgtagtactctacaacagtaggaaaacattatgtctagtctttctggaggggctaatgggaagaattgcaagaactgcttagagagtgagagatgggatgaggcaggacaagagggtgttccagcatacatcattttctccttaaagaaccaacttctctgtcttctttccatttggagttataggtattgttctaaggcctccagattattcagtccttatgccttgtagctttttggaaaaagagggtctttggaggccaagcaggctggctggcggaatcatggctcatgctgggctggctagtttttcccttaattcttgcttctcagatgtatgtccctgggaagctgcatgatgtggaacacgtgctcatcgatgtgggaactgggtactatgtagagaagacagctgaggatgccaaggacttcttcaagaggaagatagattttctaaccaagcagatggagaaaatccaaccagctcttcaggagaagcacgccatgaaacaggccgtcatggaaatgatgagtcagaagattcagcagctcacagccctgggggcagctcaggctactgctaaggcctgagagtttttgcagaaatggggcagagggacaccctttgggcgtggcttcctggtgatgggaagggtcttgtgttttaatgccaataaatgtgccagctgggca

SEQ ID NO: 420283 - DNA, 1988 bp, Homo sapiens
cactggaattcgggcccctcttccacttcccttcacactatctcttttgcctaataaatacggaaggctgtgtacaaggtcaggtcccttgtccactagaggcaaggtgcttggcgtcaggaagcaattgccctcagcaaaccttctggggcaggcacagtcatgagtttgcccacattctgtattcatgataaacagtttgctgtttgatcgtatagactcagtggaatgttggtcacgtcccatgggcctttggctctctgtatatcctcctttctgtttatgtattaattgaaggagtgtaaggccagggtgggcagctctcattttcccattgatggtccatccaactttacagactgtccctggtgctccagtagtttctcagcctcctgtgtggttttcttgagttgtccccaggttatgggggttgatgtcatgactgtagtcggccttcccaacatggcgcagtctattaacatcacggagctgaatctgccgcagctagaaatgctcaagaaccagctggaccaggaagtggagttcttgtccacgtccattgctcagctcaaagtggtacagaccaagtatgtggaagccaaggactgtctgaacgtgctgaacaagagcaacgagggtatggggtaggcgggtgagggtaacctaaagtggcgaacctgcttctctcgtcccacctcctaacccagtttttcttacctgaaacgagaaaatccattacatatcgtataccgcttcatgaaccctttgcatgttgcctgcctagaattgaaaagtacaggacattcctctgctcctattgcccctgtttccgttcttttcacactgtctgtgggtgctgtgccctgttggaactctctttaacgtcttacgttggagccgctaaccttccccaggtgtttgtcttcattgctttcacagggaaagaattactcgtcccactgacgagttctgtatcctttccacaggaacggctacctgctgccttctccctttctccttcactcccccaaaaagcggggagggggattgttttgattacttcagattaccctctcctcacaatgattttgaggataccctttttttttttctttcttttttgaacggaatttcgctctgtcgccagtgagccgatagcgggcaattgcactccaacctgggcgatagagcgagactctgtctcagaaagcaaaaaacaaacaaaacattgactttgtcaggaattagctacttcatgattgagggcattaagggaaatgaggctggctttttacttgtagtactctacaacagtaggaaaacattatgtctagtctttctggaggggctaatgggaagaattgcaagaactgcttagagagtgagagatgggatgaggcaggacaagagggtgttccagcatacatcattttctccttaaagaaccaacttctctgtcttctttccatttggagttataggtattgttctaaggcctccagattattcagtccttatgccttgtagctttttggaaaaagagggtctttggaggccaagcaggctggctggcggaatcatggctcatgctgggctggctagtttttcccttaattcttgcttctcagatgtatgtccctgggaagctgcatgatgtggaacacgtgctcatcgatgtgggaactgggtactatgtagagaagacagctgaggatgccaaggacttcttcaagaggaagatagattttctaaccaagcagatggagaaaatccaaccagctcttcaggagaagcacgccatgaaacaggccgtcatggaaatgatgagtcagaagattcagcagctcacagccctgggggcagctcaggctactgctaaggcctgagagtttttgcagaaatggggcagagggacaccctttgggcgtggcttcctggtgatgggaagggtcttgtgttttaatgccaataaatgtgccagctgggca

SEQ ID NO: 420284 - DNA, 1166 bp, Homo sapiens
cactggaattcgggcccctcttccacttcccttcacactatctcttttgcctaataaatacggaaggctgtgtacaaggtcaggtcccttgtccactagaggcaaggtgcttggcgtcaggaagcaattgccctcagcaaaccttctggggcaggcacagtcatgagtttgcccacattctgtattcatgataaacagtttgctgtttgatcgtatagactcagtggaatgttggtcacgtcccatgggcctttggctctctgtatatcctcctttctgtttatgtattaattgaaggagtgtaaggccagggtgggcagctctcattttcccattgatggtccatccaactttacagactgtccctggtgctccagtagtttctcagcctcctgtgtggttttcttgagttgtccccaggttatgggggttgatgtcatgactgtagtcggccttcccaacatggcgcagtctattaacatcacggagctgaatctgccgcagctagaaatgctcaagaaccagctggaccagatgtatgtccctgggaagctgcatgatgtggaacacgtgctcatcgatgtgggaactgggtactatgtagagaagacagctgaggatgccaaggacttcttcaagaggaagatagattttctaaccaagcagatggagaaaatccaaccagctcttcaggagaagcacgccatgaaacaggccgtcatggaaatgatgagtcagaagattcagcagctcacagccctgggggcagctcaggctactgctaaggcctgagagtttttgcagaaatggggcagagggacaccctttgggcgtggcttcctggtgatgggaagggtcttgtgttttaatgccaataaatgtgccagctgggcagaaaaaaaaaaaaaaaaaaaaaaaaactggagactagttctctctctccgtgactccagtcagtggtcctggtcccactgtcccagtgtaggttagtattccttcacatcctgtccatggcttaagaatgtcccacttcctaacgtgactccaaactgcatctctacatttaggaacagagacccgccttaagagactggatcgcacacctttgcaacagatgtgttctgattctctgaacctactagttatacatagtggaatgaaggtcc

SEQ ID NO: 420285 - DNA, 1016 bp, Homo sapiens
cactggaattcgggcccctcttccacttcccttcacactatctcttttgcctaataaatacggaaggctgtgtacaaggtcaggtcccttgtccactagaggcaaggtgcttggcgtcaggaagcaattgccctcagcaaaccttctggggcaggcacagtcatgagtttgcccacattctgtattcatgataaacagtttgctgtttgatcgtatagactcagtggaatgttggtcacgtcccatgggcctttggctctctgtatatcctcctttctgtttatgtattaattgaaggagtgtaaggccagggtgggcagctctcattttcccattgatggtccatccaactttacagactgtccctggtgctccagtagtttctcagcctcctgtgtggttttcttgagttgtccccaggttatgggggttgatgtcatgactgtagtcggccttcccaacatggcgcagtctattaacatcacggagctgaatctgccgcagctagaaatgctcaagaaccagctggaccagacggaatttcgctctgtcgcccaggctggagcgcaatggtgagatcttggcttactgcaacctccgcctcccgagttcaagagattcttctgcctcagtctcccgagtagctgggactttagatgtatgtccctgggaagctgcatgatgtggaacacgtgctcatcgatgtgggaactgggtactatgtagagaagacagctgaggatgccaaggacttcttcaagaggaagatagattttctaaccaagcagatggagaaaatccaaccagctcttcaggagaagcacgccatgaaacaggccgtcatggaaatgatgagtcagaagattcagcagctcacagccctgggggcagctcaggctactgctaaggcctgagagtttttgcagaaatggggcagagggacaccctttgggcgtggcttcctggtgatgggaagggtcttgtgttttaatgccaataaatgtgccagctgggca

SEQ ID NO: 420286 - DNA, 996 bp, Homo sapiens
cactggaattcgggcccctcttccacttcccttcacactatctcttttgcctaataaatacggaaggctgtgtacaaggtcaggtcccttgtccactagaggcaaggtgcttggcgtcaggaagcaattgccctcagcaaaccttctggggcaggcacagtcatgagtttgcccacattctgtattcatgataaacagtttgctgtttgatcgtatagactcagtggaatgttggtcacgtcccatgggcctttggctctctgtatatcctcctttctgtttatgtattaattgaaggagtgtaaggccagggtgggcagctctcattttcccattgatggtccatccaactttacagactgtccctggtgctccagtagtttctcagcctcctgtgtggttttcttgagttgtccccaggttatgggggttgatgtcatgactgtagtcggccttcccaacatggcgcagtctattaacatcacggagctgaatctgccgcagctagaaatgctcaagaaccagctggaccagccaggctggagcgcaatggtgagatcttggcttactgcaacctccgcctcccgagttcaagagattcttctgcctcagtctcccgagtagctgggactttagatgtatgtccctgggaagctgcatgatgtggaacacgtgctcatcgatgtgggaactgggtactatgtagagaagacagctgaggatgccaaggacttcttcaagaggaagatagattttctaaccaagcagatggagaaaatccaaccagctcttcaggagaagcacgccatgaaacaggccgtcatggaaatgatgagtcagaagattcagcagctcacagccctgggggcagctcaggctactgctaaggcctgagagtttttgcagaaatggggcagagggacaccctttgggcgtggcttcctggtgatgggaagggtcttgtgttttaatgccaataaatgtgccagctgggca

SEQ ID NO: 420287 - DNA, 1631 bp, Homo sapiens
cactggaattcgggcccctcttccacttcccttcacactatctcttttgcctaataaatacggaaggctgtgtacaaggtcaggtcccttgtccactagaggcaaggtgcttggcgtcaggaagcaattgccctcagcaaaccttctggggcaggcacagtcatgagtttgcccacattctgtattcatgataaacagtttgctgtttgatcgtatagactcagtggaatgttggtcacgtcccatgggcctttggctctctgtatatcctcctttctgtttatgtattaattgaaggagtgtaaggccagggtgggcagctctcattttcccattgatggtccatccaactttacagactgtccctggtgctccagtagtttctcagcctcctgtgtggttttcttgagttgtccccaggttatgggggttgatgtcatgactgtagtcggccttcccaacatggcgcagtctattaacatcacggagctgaatctgccgcagctagaaatgctcaagaaccagctggaccaggaagtggagttcttgtccacgtccattgctcagctcaaagtggtacagaccaagtatgtggaagccaaggactgtctgaacgtgctgaacaagagcaacgaggggaaagaattactcgtcccactgacgagttctatgtatgtccctgggaagctgcatgatgtggaacacgtgctcatcgatgtgggaactgggtactatgtagagaagacagctgaggatgccaaggacttcttcaagaggaagatagattttctaaccaagcagatggagatgatgagtcagaagattcagcagctcacagccctgggggcagctcaggctactgctaaggcctgagagtttttgcagaaatggggcagagggacaccctttgggcgtggcttcctggtgatgggaagggtcttgtgttttaatgccaataaatgtgccagctgggcagaaaaaaaaaaaaaaaaaaaaaaaaaaaaaaaaaaaaaaaaaaaaaaaaaaaaaaaaaaaaaaaaaagggggcgggcctctactaaatatattatctctcctcgaggggggcgccatatgtgtactgctactcccggtttttttgttgcaacagagggggcccctactatgaggagggtgtatatttaacaacccggtagcgcactgcggcgcggtgtttttaaaacgacgcgtcgtgagtggggaacaaacatgtgtgattcccggtgaggagatctctctttgagggaggacaaagagcacaacgctatatatgactcgggggggggggggggaaaacaactaatggtgtgtgggaacaaaaaaacttatcacgatcagaaaagaatagatatatatatataaaggcagttctttatggagggaggggaaactatttatttaaatacattgttttagaaagggatggtggtcttatcaaatggtgtgtgtgtcaaacaaaaccataggcgagtgtaatatattatcgtcgagtggggagtgtgagttagagagaaagacgtttttgtcggtaacctaaaggaggagggtaatttatatgtcttattttgatgtagaaagactatctttttatttaatatcaacagaggaaggta

SEQ ID NO: 420288 - DNA, 1275 bp, Homo sapiens
cactggaattcgggcccctcttccacttcccttcacactatctcttttgcctaataaatacggaaggctgtgtacaaggtcaggtcccttgtccactagaggcaaggtgcttggcgtcaggaagcaattgccctcagcaaaccttctggggcaggcacagtcatgagtttgcccacattctgtattcatgataaacagtttgctgtttgatcgtatagactcagtggaatgttggtcacgtcccatgggcctttggctctctgtatatcctcctttctgtttatgtattaattgaaggagtgtaaggccagggtgggcagctctcattttcccattgatggtccatccaactttacagactgtccctggtgctccagtagtttctcagcctcctgtgtggttttcttgagttgtccccaggttatgggggttgatgtcatgactgtagtcggccttcccaacatggcgcagtctattaacatcacggagctgaatctgccgcagctagaaatgctcaagaaccagctggaccaggaagtggagttcttgtccacgtccattgctcagctcaaagtggtacagaccaagtatgtggaagccaaggactgtctgaacgtgctgaacaagagcaacgagggtatggggtaggcgggtgagggtaacctaaagtggcgaacctgcttctctcgtcccacctcctaacccagtttttcttacctgaaacgagaaaatccattacatatcgtataccgcttcatgaaccctttgcatgttgcctgcctagaattgaaaagtacaggacattcctctgctcctattgcccctgtttccgttcttttcacactgtctgtgggtgctgtgccctgttggaactctctttaacgtcttacgttggagccgctaaccttccccaggtgtttgtcttcattgctttcacaggatgtggaacacgtgctcatcgatgtgggaactgggtactatgtagagaagacagctgaggatgccaaggacttcttcaagaggaagatagattttctaaccaagcagatggagaaaatccaaccagctcttcaggagaagcacgccatgaaacaggccgtcatggaaatgatgagtcagaagattcagcagctcacagccctgggggcagctcaggctactgctaaggcctgagagtttttgcagaaatggggcagagggacaccctttgggcgtggcttcctggtgatgggaagggtcttgtgttttaatgccaataaatgtgccagctgggca

SEQ ID NO: 420289 - DNA, 1292 bp, Homo sapiens
cactggaattcgggcccctcttccacttcccttcacactatctcttttgcctaataaatacggaaggctgtgtacaaggtcaggtcccttgtccactagaggcaaggtgcttggcgtcaggaagcaattgccctcagcaaaccttctggggcaggcacagtcatgagtttgcccacattctgtattcatgataaacagtttgctgtttgatcgtatagactcagtggaatgttggtcacgtcccatgggcctttggctctctgtatatcctcctttctgtttatgtattaattgaaggagtgtaaggccagggtgggcagctctcattttcccattgatggtccatccaactttacagactgtccctggtgctccagtagtttctcagcctcctgtgtggttttcttgagttgtccccaggttatgggggttgatgtcatgactgtagtcggccttcccaacatggcgcagtctattaacatcacggagctgaatctgccgcagctagaaatgctcaagaaccagctggaccagccaggctggagcgcaatggtgagatcttggcttactgcaacctccgcctcccgagttcaagagattcttctgcctcagtctcccgagtagctgggactttagatgtatgtccctgggaagctgcatgatgtggaacacgtgctcatcgatgtgggaactgggtactatgtagagaagacagctgaggatgccaaggacttcttcaagaggaagatagattttctaaccaagcagatggagaaaatccaaccagctcttcaggagaagcacgccatgaaacaggccgtcatggaaatgatgagtcagaagattcagcagctcacagccctgggggcagctcaggctactgctaaggcctgagagtttttgcagaaatggggcagagggacaccctttgggcgtggcttcctggtgatgggaagggtcttgtgttttaatgccaataaatgtgccagctgggcaaaaaaaaaaaaaaaaaaaaaaaaaaaaaaaaaaaaaaaaaaaaaaacctccgagagggtctcttttgtcgcgggtgtgcgcggaaaaagagagaggttagagtgaaaagtggcacacctgtgtggctcaatatgaggcggtgtttctccggtagccccacaggcttctttgtgtgttcaacaaagtgtggcgtaaaaatttgcgcggggtatctcccccttattagaggaggggcgcggttattataatttgcgaaattaggccccgggtgttttacccgtgtgatattaaaggaa

SEQ ID NO: 420290 - DNA, 1163 bp, Homo sapiens
cactggaattcgggcccctcttccacttcccttcacactatctcttttgcctaataaatacggaaggctgtgtacaaggtcaggtcccttgtccactagaggcaaggtgcttggcgtcaggaagcaattgccctcagcaaaccttctggggcaggcacagtcatgagtttgcccacattctgtattcatgataaacagtttgctgtttgatcgtatagactcagtggaatgttggtcacgtcccatgggcctttggctctctgtatatcctcctttctgtttatgtattaattgaaggagtgtaaggccagggtgggcagctctcattttcccattgatggtccatccaactttacagactgtccctggtgctccagtagtttctcagcctcctgtgtggttttcttgagttgtccccaggttatgggggttgatgtcatgactgtagtcggccttcccaacatggcgcagtctattaacatcacggagctgaatctgccgcagctagaaatgctcaagaaccagctggaccagatgtatgtccctgggaagctgcatgatgtggaacacgtgctcatcgatgtgggaactgggtactatgtagagaagacagctgaggatgccaaggacttcttcaagaggaagatagattttctaaccaagcagatggagaaaatccaaccagctcttcaggagaagcacgccatgaaacaggccgtcatggaaatgatgagtcagaagattcagcagctcacagccctgggggcagctcaggctactgctaaggcctgagagtttttgcagaaatggggcagagggacaccctttgggcgtggcttcctggtgatgggaagggtcttgtgttttaatgccaataaatgtgccagctgggcaaaaaaaaaaaaaaaaaaaaaaaaaaaaaaaaaaaaaaaaaaaaaaaaaaaaaaaaaaaaaaagggggggggaccacaaagaaaacacagagaggggcaccaaatacagagagaacgccacacgatatagagaaacgagggggaccacaaaaagaggaggacaaataaaaaacagaagaggagaagcgagagaggagaaaaaaaacgagggagagaggaaaaaaagagaaaagagagagaaataggaggaagagaaagaaaacaagggag

SEQ ID NO: 420291 - DNA, 3027 bp, Homo sapiens
cactggaattcgggcccctcttccacttcccttcacactatctcttttgcctaataaatacggaaggctgtgtacaaggtcaggtcccttgtccactagaggcaaggtgcttggcgtcaggaagcaattgccctcagcaaaccttctggggcaggcacagtcatgagtttgcccacattctgtattcatgataaacagtttgctgtttgatcgtatagactcagtggaatgttggtcacgtcccatgggcctttggctctctgtatatcctcctttctgtttatgtattaattgaaggagtgtaaggccagggtgggcagctctcattttcccattgatggtccatccaactttacagactgtccctggtgctccagtagtttctcagcctcctgtgtggttttcttgagttgtccccaggttatgggggttgatgtcatgactgtagtcggccttcccaacatggcgcagtctattaacatcacggagctgaatctgccgcagctagaaatgctcaagaaccagctggaccaggaagtggagttcttgtccacgtccattgctcagctcaaagtggtacagaccaagtatgtggaagccaaggactgtctgaacgtgctgaacaagagcaacgagggtatggggtaggcgggtgagggtaacctaaagtggcgaacctgcttctctcgtcccacctcctaacccagtttttcttacctgaaacgagaaaatccattacatatcgtataccgcttcatgaaccctttgcatgttgcctgcctagaattgaaaagtacaggacattcctctgctcctattgcccctgtttccgttcttttcacactgtctgtgggtgctgtgccctgttggaactctctttaacgtcttacgttggagccgctaaccttccccaggtgtttgtcttcattgctttcacagggaaagaattactcgtcccactgacgagttctgtatcctttccacaggaacggctacctgctgccttctccctttctccttcactcccccaaaaagcggggagggggattgttttgattacttcagattaccctctcctcacaatgattttgaggataccctttttttttttctttcttttttgaacggaatttcgctctgtcgcccaggctggagcgcaatggtgagatcttggcttactgcaacctccgcctcccgagttcaagagattcttctgcctcagtctcccgagtagctgggactttaggtacgcgccaccacgaccggctaatttttgtattaatagtggagttgggggtttcaccatgttggccaggctagtctcgaactcctgacctcgtgatccgcctgcctcggcctcccaaagtgctaggattacattacaggcgtgagccactgcccccggccaagaatactcttattacacactttgtagctcttttatctgacttcacaccaacatccagctaatgtcttgtgaacaccaaggagtatgtatagttgagatgtaatatttccctttgctgtttgagaacattaatatggagataaagctggtggtttacactttgctaatatcttagaagatacaggcaatagacaaaaataggaggatatagaaacagggagcttggctctgttaatcttcaacttcagcttaattgtggctcatttctaaactgtcactaagaaacctggattgtgttcacttgttcagtgttttatttgaatgagcaagttatggcagtagggcatctttaatctgtagtctcagaactgacaggctaaaaggaacacaggaatagtagtgtgtagtagggaatggtttaaaaaaaaaaattagccaggcacagtggttcacgcctgtaatcccagcactttgggaggccaaggctggcagatcacctgaggtcaggagttagagatcggtctggccaacatggtgaaaccccgtctttactaaatatacaaaaattagccaggcgtggtggcacatgcttgtaatcccagctactccggcgactgagacaggagaattgctttaacccgagaggcagaggttgcagtgagccgatagcgggcaattgcactccaacctgggcgatagagcgagactctgtctcagaaagcaaaaaacaaacaaaacattgactttgtcaggaattagctacttcatgattgagggcattaagggaaatgaggctggctttttacttgtagtactctacaacagtaggaaaacattatgtctagtctttctggaggggctaatgggaagaattgcaagaactgcttagagagtgagagatgggatgaggcaggacaagagggtgttccagcatacatcattttctccttaaagaaccaacttctctgtcttctttccatttggagttataggtattgttctaaggcctccagattattcagtccttatgccttgtagctttttggaaaaagagggtctttggaggccaagcaggctggctggcggaatcatggctcatgctgggctggctagtttttcccttaattcttgcttctcagatgtatgtccctgggaagctgcatgatgtggaacacgtgctcatcgatgtgggaactgggtactatgtagagaaggtgagtgagagcatgtggatgcccctctaaacagggaagggaaattcaggggaagctctagagcgcagcatggccagagggagtctccttttagccccttattcacctctgatcttgtagacagctgaggatgccaaggacttcttcaagaggaagatagattttctaaccaagcagatggagaaaatccaaccagctcttcaggagaagcacgccatgaaacaggccgtcatggaaatgatgagtcagaagattcagcagctcacagccctgggggcagctcaggctactgctaaggcctgagagtttttgcagaaatggggcagagggacaccctttgggcgtggcttcctggtgatgggaagggtcttgtgttttaatgccaataaatgtgccagctgggca

SEQ ID NO: 420292 - DNA, 382 bp, Homo sapiens
  misc_feature (12)..(12): n is a, c, g, or t
  misc_feature (27)..(27): n is a, c, g, or t
  misc_feature (37)..(37): n is a, c, g, or t
  misc_feature (50)..(50): n is a, c, g, or t
ttgatttgactncctttgtgaagtccnactctatttnggctaaacttccngcggatctgccgcagctagaaatgctcaagaaccagctggaccagagacagctgaggatgccaaggacttcttcaagaggaagatagattttctaaccaagcagatggagaaaatccaaccagctcttcaggagaagcacgccatgaaacaggccgtcatggaaatgatgagtcagaagattcagcagctcacagccctgggggcagctcaggctactgctaaggcctgagagtttttgcagaaatggggcagagggacaccctttgggcgtggcttcctggtgatgggaagggtcttgtgttttaatgccaataaatgtgccagctgggca

SEQ ID NO: 420293 - DNA, 1407 bp, Homo sapiens
cactggaattcgggcccctcttccacttcccttcacactatctcttttgcctaataaatacggaaggctgtgtacaaggtcaggtcccttgtccactagaggcaaggtgcttggcgtcaggaagcaattgccctcagcaaaccttctggggcaggcacagtcatgagtttgcccacattctgtattcatgataaacagtttgctgtttgatcgtatagactcagtggaatgttggtcacgtcccatgggcctttggctctctgtatatcctcctttctgtttatgtattaattgaaggagtgtaaggccagggtgggcagctctcattttcccattgatggtccatccaactttacagactgtccctggtgctccagtagtttctcagcctcctgtgtggttttcttgagttgtccccaggttatgggggttgatgtcatgactgtagtcggccttcccaacatggcgcagtctattaacatcacggagctgaatctgccgcagctagaaatgctcaagaaccagctggaccagccaggctggagcgcaatggtgagatcttggcttactgcaacctccgcctcccgagttcaagagattcttctgcctcagtctcccgagtagctgggactttagatgtatgtccctgggaagctgcatgatgtggaacacgtgctcatcgatgtgggaactgggtactatgtagagaccccttattcacctctgatcttgtagacagctgaggatgccaaggacttcttcaagaggaagatagattttctaaccaagcagatggagaaaatccaaccagctcttcaggagaagcacgccatgaaacaggccgtcatggaaatgatgagtcagaagattcagcagctcacagccctgggggcagctcaggctactgctaaggcctgagagtttttgcagaaatggggcagagggacaccctttgggcgtggcttcctggtgatgggaagggtcttgtgttttaatgccaataaatgtgccagctgggcaaaaaaaaaaaaaaaaaaaaaaaaaaaaaaaaaaaaaaaaaaaaaaactttttgggccgcttgggcccctggaaaaagtttttaaacccttgcgcgggtggggcgcgcgggggccccagttgggttaggtggaacacgtgggtccagaagcgtggtttcccgagaggaagaatcgcggggcctggaaaatagggggctgtggggttctcctcccactattaaaaaaagcgcgccgcggggggggaacacgcggggcggtgtctctgagacaaacactctccgagaatgggggaggctgcagaaagggggacaattacgcgggcgatctcttactcaacacgagggggtctccaaagggagagctccgagtttctaataatttaacgcc

SEQ ID NO: 420294 - DNA, 981 bp, Homo sapiens
atatcgtggttgtgtcgtgagaactttaagattttgcagttccttgtaggcaggagtcctgtttgctgctactttacaatactaggcttaagacattttatgaaatgaactcacacaacagtctctgagaggctcaagcccctccttcccttccgggacggaggatcatagagctgtctggcgcagcgaggcctcccggcgccaccgagacgcgcagaggacggctagagcgttgctcgccgagagacttcctcttcgttaagtcggccttcccaacatggcgcagtctattaacatcacggagctgaatctgccgcagctagaaatgctcaagaaccagctggaccagatgtatgtccctgggaagctgcatgatgtggaacacgtgctcatcgatgtgggaactgggtactatgtagagaagacagctgaggatgccaaggacttcttcaagaggaagatagattttctaaccaagcagatggagaaaatccaaccagctcttcaggagaagcacgccatgaaacaggccgtcatggaaatgatgagtcagaagattcagcagctcacagccctgggggcagctcaggctactgctaaggcctgagagtttttgcagaaatggggcagagggacaccctttgggcgtggcttcctggtgatgggaagggtcttgtgttttaatgccaataaatgtgccagctgggcagaaaaaaaaaaaaaaaaaaaaaaaaactggagactagttctctctctccgtgactccagtcagtggtcctggtcccactgtcccagtgtaggttagtattccttcacatcctgtccatggcttaagaatgtcccacttcctaacgtgactccaaactgcatctctacatttaggaacagagacccgccttaagagactggatcgcacacctttgcaacagatgtgttctgattctctgaacctactagttatacatagtggaatgaaggtcc

SEQ ID NO: 420295 - DNA, 709 bp, Homo sapiens
atatcgtggttgtgtcgtgagaactttaagattttgcagttccttgtaggcaggagtcctgtttgctgctactttacaatactaggcttaagacattttatgaaatgaactcacacaacagtctctgagaggctcaagcccctccttcccttccgggacggaggatcatagagctgtctggcgcagcgaggcctcccggcgccaccgagacgcgcagaggacggctagagcgttgctcgccgagagacttcctcttcgttaagtcggccttcccaacatggcgcagtctattaacatcacggagctgaatctgccgcagctagaaatgctcaagaaccagctggaccagatgtatgtccctgggaagctgcatgatgtggaacacgtgctcatcgatgtgggaactgggtactatgtagagaagacagctgaggatgccaaggacttcttcaagaggaagatagattttctaaccaagcagatggagaaaatccaaccagctcttcaggagaagcacgccatgaaacaggccgtcatggaaatgatgagtcagaagattcagcagctcacagccctgggggcagctcaggctactgctaaggcctgagagtttttgcagaaatggggcagagggacaccctttgggcgtggcttcctggtgatgggaagggtcttgtgttttaatgccaataaatgtgccagctgggca

SEQ ID NO: 420296 - DNA, 534 bp, Homo sapiens
tggtttgaaaaccatggcgtgggtaccagcggagtccgcatagatctgccgcagctagaaatgctcaagaaccagctggaccaggaagtggagttcttgtccacgtccattgctcagctcaaagtggtacagaccaagtatgtggaagccaaggactgtctgaacgtgctgaacaagagcaacgaggggaatagatcactcgagccgctgacgaagcaaagtgtgaatatttctctttcaggatgccaacccgcccctgaaggctattccccaacacgttactggctacagcaacaacgggcacagtttctaacctgtccacaggatgtgaacaaacatagaagtcactggaaattacaacaggtggatagtaatgtgacaatggcaaaatcttgagatgaagaaggctggaagaaatttttgctggggaaaaagtatgtgctgaccgggctgttggaccagccacaaatgaaaagccctggaataaaatatgttcaaagaagaaggccttaagctttattggcttgtgcttga

SEQ ID NO: 420297 - DNA, 1209 bp, Homo sapiens
  misc_feature (1061)..(1061): n is a, c, g, or t
  misc_feature (1067)..(1067): n is a, c, g, or t
  misc_feature (1096)..(1096): n is a, c, g, or t
  misc_feature (1101)..(1101): n is a, c, g, or t
  misc_feature (1106)..(1106): n is a, c, g, or t
  misc_feature (1111)..(1111): n is a, c, g, or t
  misc_feature (1113)..(1113): n is a, c, g, or t
  misc_feature (1115)..(1116): n is a, c, g, or t
  misc_feature (1118)..(1120): n is a, c, g, or t
  misc_feature (1122)..(1122): n is a, c, g, or t
  misc_feature (1125)..(1126): n is a, c, g, or t
  misc_feature (1151)..(1151): n is a, c, g, or t
  misc_feature (1158)..(1158): n is a, c, g, or t
cactggaattcgggcccctcttccacttcccttcacactatctcttttgcctaataaatacggaaggctgtgtacaaggtcaggtcccttgtccactagaggcaaggtgcttggcgtcaggaagcaattgccctcagcaaaccttctggggcaggcacagtcatgagtttgcccacattctgtattcatgataaacagtttgctgtttgatcgtatagactcagtggaatgttggtcacgtcccatgggcctttggctctctgtatatcctcctttctgtttatgtattaattgaaggagtgtaaggccagggtgggcagctctcattttcccattgatggtccatccaactttacagactgtccctggtgctccagtagtttctcagcctcctgtgtggttttcttgagttgtccccaggttatgggggttgatgtcatgactgtagtcggccttcccaacatggcgcagtctattaacatcacggagctgaatctgccgcagctagaaatgctcaagaaccagctggaccaggaagtggagttcttgtccacgtccattgctcagctcaaagtggtacagaccaagtatgtggaagccaaggactgtctgaacgtgctgaacaagagcaacgaggggaaagaattactcgtcccactgacgagttctatgtatgtccctgggaagctgcatgatgtggaacacgtgctcatcgatgtgggaactgggtactatgtagagaagacagctgaggatgccaaggacttcttcaagaggaagatagattttctaaccaagcagatggagaaaatccaaccagctcttcaggagaagcacgccatgaaacaggccgtcatggaaatgatgagtcagaagattcagcagctcacagccctgggggcagctcaggctactgctaaggcctgagagtttttgcagaaatggggcagagggacaccctttgggcgtggcttcctggtgatgggaagggtcttgtgttttaatgccaataaatgtgccagctgggcagaaaaaaaaaaaaaaaaaaaaaaaaaaaatcngggggntttttgggggggggggaaaaaggggtttntaaangggcnggggncntnntnnntncgnncccttttttgtacaaggggggaatnggggggncccaaaaagggggggggaataattggaaagacgggtaccgtaattgaaaac

SEQ ID NO: 420298 - DNA, 738 bp, Homo sapiens
tactactaaattcgcggccgcgtcgacgctcttcgttaagtcggccttcccaacatggcgcagtctattaacatcacggagctgaatctgccgcagctagaaatgctcaagaaccagctggaccaggaagtggagttcttgtccacgtccattgctcagctcaaagtggtacagaccaagtatgtggaagccaaggactgtctgaacgtgctgaacaagagcaacgaggggaaagaattactcgtcccactgacgagttctatgtatgtccctgggaagctgcatgatgtggaacacgtgctcatcgatgtgggaactgggtactatgtagagaagacagctgaggatgccaaggacttcttcaagaggaagatagattttctaaccaagcagatggagaaaatccaaccagctcttcaggagaagcacgccatgaaacaggccgtcatggaaatgatgagtcagaagattcagcagctcacagccctgggggcagctcaggctactgctaaggcctgagagtttttgcagaaatggggcagagggacaccctttgggcgtggcttcctggtgatgggaagggtcttgtgttttaatgccaataaatgtgccagctgggcagaaaaaaaaaaaaaaaaaaattttttttttaatttaaatatttcgtatcattatataaaataattacctttgggggggggcgcggggccccaatatcccctatatggggggtgattt

SEQ ID NO: 420299 - DNA, 1235 bp, Homo sapiens
  misc_feature (1087)..(1087): n is a, c, g, or t
  misc_feature (1093)..(1093): n is a, c, g, or t
  misc_feature (1122)..(1122): n is a, c, g, or t
  misc_feature (1127)..(1127): n is a, c, g, or t
  misc_feature (1132)..(1132): n is a, c, g, or t
  misc_feature (1137)..(1137): n is a, c, g, or t
  misc_feature (1139)..(1139): n is a, c, g, or t
  misc_feature (1141)..(1142): n is a, c, g, or t
  misc_feature (1144)..(1146): n is a, c, g, or t
  misc_feature (1148)..(1148): n is a, c, g, or t
  misc_feature (1151)..(1152): n is a, c, g, or t
  misc_feature (1177)..(1177): n is a, c, g, or t
  misc_feature (1184)..(1184): n is a, c, g, or t
cactggaattcgggcccctcttccacttcccttcacactatctcttttgcctaataaatacggaaggctgtgtacaaggtcaggtcccttgtccactagaggcaaggtgcttggcgtcaggaagcaattgccctcagcaaaccttctggggcaggcacagtcatgagtttgcccacattctgtattcatgataaacagtttgctgtttgatcgtatagactcagtggaatgttggtcacgtcccatgggcctttggctctctgtatatcctcctttctgtttatgtattaattgaaggagtgtaaggccagggtgggcagctctcattttcccattgatggtccatccaactttacagactgtccctggtgctccagtagtttctcagcctcctgtgtggttttcttgagttgtccccaggttatgggggttgatgtcatgactgtagtcggccttcccaacatggcgcagtctattaacatcacggagctgaatctgccgcagctagaaatgctcaagaaccagctggaccaggaagtggagttcttgtccacgtccattgctcagctcaaagtggtacagaccaagtatgtggaagccaaggactgtctgaacgtgctgaacaagagcaacgaggggaaagaattactcgtcccactgacgagttctatgtatgtccctgggaagctgcatgatgtggaacacgtgctcatcgatgtgggaactgggtactatgtagagaagacagctgaggatgccaaggacttcttcaagaggaagatagattttctaaccaagcagatggagaaaatccaaccagctcttcaggagaagcacgccatgaaacaggccgtcatggaaatgatgagtcagaagattcagcagctcacagccctgggggcagctcaggctactgctaaggcctgagagtttttgcagaaatggggcagagggacaccctttgggcgtggcttcctggtgatgggaagggtcttgtgttttaatgccaataaatgtgccagctgggcaaaaaaaaaaaaaaaaaaaaaaaaaaaaaaaaaaaaaaaaaaaaaaaaaaaaaaaatcngggggntttttgggggggggggaaaaaggggtttntaaangggcnggggncntnntnnntncgnncccttttttgtacaaggggggaatnggggggncccaaaaagggggggggaataattggaaagacgggtaccgtaattgaaaac

SEQ ID NO: 420300 - DNA, 1416 bp, Homo sapiens
cactggaattcgggcccctcttccacttcccttcacactatctcttttgcctaataaatacggaaggctgtgtacaaggtcaggtcccttgtccactagaggcaaggtgcttggcgtcaggaagcaattgccctcagcaaaccttctggggcaggcacagtcatgagtttgcccacattctgtattcatgataaacagtttgctgtttgatcgtatagactcagtggaatgttggtcacgtcccatgggcctttggctctctgtatatcctcctttctgtttatgtattaattgaaggagtgtaaggccagggtgggcagctctcattttcccattgatggtccatccaactttacagactgtccctggtgctccagtagtttctcagcctcctgtgtggttttcttgagttgtccccaggttatgggggttgatgtcatgactgtagtcggccttcccaacatggcgcagtctattaacatcacggagctgaatctgccgcagctagaaatgctcaagaaccagctggaccaggaagtggagttcttgtccacgtccattgctcagctcaaagtggtacagaccaagtatgtggaagccaaggactgtctgaacgtgctgaacaagagcaacgaggggaaagaattactcgtcccactgacgagttctatgtatgtccctgggaagctgcatgatgtggaacacgtgctcatcgatgtgggaactgggtactatgtagagaagacagctgaggatgccaaggacttcttcaagaggaagatagattttctaaccaagcagatggagaaaatccaaccagctcttcaggagaagcacgccatgaaacaggccgtcatggaaatgatgagtcagaagattcagcagctcacagccctgggggcagctcaggctactgctaaggcctgagagtttttgcagaaatggggcagagggacaccctttgggcgtggcttcctggtgatgggaagggtcttgtgttttaatgccaataaatgtgccagctgggcaaaaaaaaaaaaaaaaaaaaaaaaaaaaaaaaaaaaaaaaaaaaaaactttttgggccgcttgggcccctggaaaaagtttttaaacccttgcgcgggtggggcgcgcgggggccccagttgggttaggtggaacacgtgggtccagaagcgtggtttcccgagaggaagaatcgcggggcctggaaaatagggggctgtggggttctcctcccactattaaaaaaagcgcgccgcggggggggaacacgcggggcggtgtctctgagacaaacactctccgagaatgggggaggctgcagaaagggggacaattacgcgggcgatctcttactcaacacgagggggtctccaaagggagagctccgagtttctaataatttaacgcc

SEQ ID NO: 420301 - DNA, 585 bp, Homo sapiens
tactactaaattcgcggccgcgtcgacgctcttcgttaagtcggccttcccaacatggcgcagtctattaacatcacggagctgaatctgccgcagctagaaatgctcaagaaccagctggaccaggaagtggagttcttgtccacgtccattgctcagctcaaagtggtacagaccaagtatgtggaagccaaggactgtctgaacgtgctgaacaagagcaacgaggggaaagaattactcgtcccactgacgagttctatgtatgtccctgggaagctgcatgatgtggaacacgtgctcatcgatgtgggaactgggtactatgtagagaagacagctgaggatgccaaggacttcttcaagaggaagatagattttctaaccaagcagatggagaaaatccaaccagctcttcaggagaagcacgccatgaaacaggccgtcatggaaatgatgagtcagaagattcagcagctcacagccctgggggcagctcaggctactgctaaggcctgagagtttttgcagaaatggggcagagggacaccctttcaggtacaagctgattgtatcatgtaactg

SEQ ID NO: 420302 - DNA, 703 bp, Homo sapiens
gcctactactactatacggctgcgatatgacgacagaagggaaagaattactcgtcccactgacgagttctatgtatgtccctgggaagctgcatgatgtggaacacgtgctcatcgatgtgggaactgggtactatgtagagaagacagctgaggatgccaaggacttcttcaagaggaagatagattttctaaccaagcagatggagaaaatccaaccagctcttcaggagaagcacgccatgaaacaggccgtcatggaaatgatgagtcagaagattcagcagctcacagccctgggggcagctcaggctactgctaaggcctgagagtttttgcagaaatggggcagagggacaccctttgggcgtggcttcctggtgatgggaagggtcttgtgttttaatgccaataaatgtgccagctgggcagaaaaaaaaaaaaaaaaaaaaaaaaactggagactagttctctctctccgtgactccagtcagtggtcctggtcccactgtcccagtgtaggttagtattccttcacatcctgtccatggcttaagaatgtcccacttcctaacgtgactccaaactgcatctctacatttaggaacagagacccgccttaagagactggatcgcacacctttgcaacagatgtgttctgattctctgaacctactagttatacatagtggaatgaaggtcc

SEQ ID NO: 420303 - DNA, 894 bp, Homo sapiens
cactggaattcgggcccctcttccacttcccttcacactatctcttttgcctaataaatacggaaggctgtgtacaaggtcaggtcccttgtccactagaggcaaggtgcttggcgtcaggaagcaattgccctcagcaaaccttctggggcaggcacagtcatgagtttgcccacattctgtattcatgataaacagtttgctgtttgatcgtatagactcagtggaatgttggtcacgtcccatgggcctttggctctctgtatatcctcctttctgtttatgtattaattgaaggagtgtaaggccagggtgggcagctctcattttcccattgatggtccatccaactttacagactgtccctggtgctccagtagtttctcagcctcctgtgtggttttcttgagttgtccccaggttatgggggttgatgtcatgactgtagtcggccttcccaacatggcgcagtctattaacatcacggagctgaatctgccgcagctagaaatgctcaagaaccagctggaccagatgtatgtccctgggaagctgcatgatgtggaacacgtgctcatcgatgtgggaactgggtactatgtagagaagacagctgaggatgccaaggacttcttcaagaggaagatagattttctaaccaagcagatggagaaaatccaaccagctcttcaggagaagcacgccatgaaacaggccgtcatggaaatgatgagtcagaagattcagcagctcacagccctgggggcagctcaggctactgctaaggcctgagagtttttgcagaaatggggcagagggacaccctttgggcgtggcttcctggtgatgggaagggtcttgtgttttaatgccaataaatgtgccagctgggca

SEQ ID NO: 420304 - DNA, 596 bp, Homo sapiens
cccgcggttattccctcagctggaaaaagagggtctttggaggccaagcaggctggctggcggaatcatggctcatgctgggctggctagtttttcccttaattcttgcttctcagatgtatgtccctgggaagctgcatgatgtggaacacgtgctcatcgatgtgggaactgggtactatgtagagaaggtgagtgagagcatgtggatgcccctctaaacagggaagggaaattcaggggaagctctagagcgcagcatggccagagggagtctccttttagccccttattcacctctgatcttgtagacagctgaggatgccaaggacttcttcaagaggaagatagattttctaaccaagcagatggagaaaatccaaccagctcttcaggagaagcacgccatgaaacaggccgtcatggaaatgatgagtcagaagattcagcagctcacagccctgggggcagctcaggctactgctaaggcctgagagtttttgcagaaatggggcagagggacaccctttgggcgtggcttcctggtgatgggaagggtcttgtgttttaatgccaataaatgtgccagctgggca

SEQ ID NO: 420305 - DNA, 769 bp, Homo sapiens
  misc_feature (12)..(12): n is a, c, g, or t
  misc_feature (27)..(27): n is a, c, g, or t
  misc_feature (37)..(37): n is a, c, g, or t
  misc_feature (50)..(50): n is a, c, g, or t
ttgatttgactncctttgtgaagtccnactctatttnggctaaacttccngcggatctgccgcagctagaaatgctcaagaaccagctggaccagagacagctgaggatgccaaggacttcttcaagaggaagatagattttctaaccaagcagatggagaaaatccaaccagctcttcaggagaagcacgccatgaaacaggccgtcatggaaatgatgagtcagaagattcagcagctcacagccctgggggcagctcaggctactgctaaggcctgagagtttttgcagaaatggggcagagggacaccctttgggcgtggcttcctggtgatgggaagggtcttgtgttttaatgccaataaatgtgccagctgggcaaaaaaaaaaaaaaaaaaaaaaaaaaaaaaaaaaaaaaaaaaaaaaactttttgggccgcttgggcccctggaaaaagtttttaaacccttgcgcgggtggggcgcgcgggggccccagttgggttaggtggaacacgtgggtccagaagcgtggtttcccgagaggaagaatcgcggggcctggaaaatagggggctgtggggttctcctcccactattaaaaaaagcgcgccgcggggggggaacacgcggggcggtgtctctgagacaaacactctccgagaatgggggaggctgcagaaagggggacaattacgcgggcgatctcttactcaacacgagggggtctccaaagggagagctccgagtttctaataatttaacgcc

SEQ ID NO: 420306 - DNA, 677 bp, Homo sapiens
tttcactaacatcatttgaatcaagtttgaaagaattagtgaagtggcattgtgttataacctctactctgtttccacaataaaattattttcgtcactttacacaactttgttgcttcagagtgtataattctgtttcatgaattagttcacacactatgggaaaataggtaaatgttgtctgtatatatagtgtgtcagtataatgtggaagctgcattgactttattgtacacagttctccagtaagtgtgcaccagagagtaccagtaactgaatgtagagtgctggcacagtggaatgcagccagctgcgggggatgtggtacatgaggaatgtgctcatctgctcttttggccacgtgctccatcttagaggtgcttattgtgtggctttatccagtctttatgccccctcctctttttgctcaagtctgcattatagcagttgtgacctttccttatccctgttttctaatatgctactgttactgttccctgttcgttactggtttttttgtttttgtttttgcattgttctatagttactattgtatattggaaattagagatgctttctgtacactagtactcttattttgattattaattatgtttgttaacactaattacaaagttgcataagtattaagtagtctgcaccaaactgtttttgcg

SEQ ID NO: 420307 - DNA, 1354 bp, Homo sapiens
gatgacgaagttgacgagggtgtcggcatgagggggtggagcaaggagcgcgtggcgcggtgcgcagtgggtggctccacctcgactgcgaattactgtttagaggatgctggtggtggaggtggcgaacggccgctccctggtgtggggagccgaggcgcccctggactggcgtgtccagtctaaagactggccccacgccggccgccctgcccacgagctgcgctacagtatctacagagacctgtgggagcgaggcttcttcctcagtgcggctggcaagttcggaggtgacttcctggtctatcctggtgaccccctccgcttccacgcccattatatcgctcagtgctgggcccctgaggacaccatcccactccaagacctggttgctgctgggcgccttggaaccagcgtcagaaagaccctgctcctctgttctccgcagcctgatggtaaggtggtctacacctccctgcaatgggccagcctgcagtgaactccagagacctaggggatgtggctgtgtcggcagcaagagcctttctggatgttccccagctcttctctgggagtctagaacatcctcctacctttctccgcggttagtttttgattccaggttttcgaacactacatcttttttatgttcttccttgtttcaaagcacttattggctgtgtttttgtagttacctattttcacactgtgagcttcccgagaatggggcctgggtttgattcatctgttttctacagggtttaagtctcaggaggtctcaataaacttggtatataaatgttaaaaaaaaaaaaaaaaaaaaaaaaaaaaaaaaaaaaaaaaaaaagggggggcgccccaaaaccccccgggggcgcaaacaacatagccgagcaccccccgcctatatttgagaagacagcgagggcaccccactaagagggggctcttataaaaataacagagcaaaggcgcggcgcgggcgcgtataaaaacaacaccggggcataggcgggaaaaacaaacgaccgcacgagcgaagactacttgtggggagaaaaagacaacccacccactgcgtggggggggaggcaacaaaaatagtggcgggcacccaccctaccaccaaaagatattataaacacgccccctcggtggtgagacataacaaatactattttgcgtcgtcgctataagttggtgaacaaacccaaccagggataactgatatctgcgtcgcaggagaaataaatatttgttctcgcagaggacatttgtttactaaacaaaaatattccccacgcaggttcttatctgttcactcgggagaacaggaaagagaggagaaaaagga

SEQ ID NO: 420308 - DNA, 1556 bp, Homo sapiens
  misc_feature (3)..(4): n is a, c, g, or t
  misc_feature (8)..(8): n is a, c, g, or t
ggnngagncgaggacgcccgaacgccgaacttcctgtgctcgggagggggcagggttttgtactgtgggagtctgagagcgaggaggtccgaaagccgaatcacagtcgttcggaaagaggaggagcgaaggctcgagcgtccggaagagggtgtggcctcggcggtgccttagcctccagagcttctgaccgctgacgggaacacccgaagggggacgcccactttgcaagagggtggtgccaaaatggacctttgtaagggggcgtgtcgccgcgcttgcggaggtttgtttttcacgctccaaggcgcaatggaggatgctggtggtggaggtggcgaacggccgctccctggtgtggggagccgaggcggtgcaggccctccgggagcgcctgggtgtggggggccgcacggtaggcgccctgccccgcgggccccgccagaactcgcgcctgggcctcccgctgctgctgatgcccgaagaggcgcggctcttggccgagatcggcgccgtgactctggtcagcgccccgcgtccagactctcggcaccacagcctggccctgacatccttcaagcgccagcaagaggagagcttccaggagcagagcgccttggcagctgaggcccgggagacccgtcgtcaggagctcctggagaagattacggagggccaggctgctaagaagcagaaactagaacaggcttcaggggccagctcaagccaggaggccggctcgagccaggctgccaaagaggatgagaccagtgatggccaggcttcgggagagcaggaggaagctggcccctcgtcttcccaagcaggaccctcaaatggggtagcccccttgcccagatctgctctccttgtccagctggccactgccaggcctcgaccggtcaaggccaggcccctggactggcgtgtccagtctaaagactggccccacgccggccgccctgcccacgagctgcgctacagtatctacagagacctgtgggagcgaggcttcttcctcagtgcggctggcaagttcggaggtgacttcctggtctatcctggtgaccccctccgcttccacgcccattatatcgctcagtgctgggcccctgaggacaccatcccactccaagacctggttgctgctgggcgccttggaaccagcgtcagaaagaccctgctcctctgttctccgcagcctgatggtaaggtggtctacacctccctgcaatgggccagcctgcagtgaactccagagacctaggggatgtggctgtgtcggcagcaagagcctttctggatgttccccagctcttctctgggagtctagaacatcctcctacctttctccgcggttagtttttgattccaggttttcgaacactacatcttttttatgttcttccttgtttcaaagcacttattggctgtgtttttgtagttacctattttcacactgtgagcttcccgagaatggggcctgggtttgattcatctgttttctacagggtttaagtctcaggaggtctcaataaacttggtatataaatgtt

SEQ ID NO: 420309 - DNA, 928 bp, Homo sapiens
gatgacgaagttgacgagggtgtcggcatgagggggtggagcaaggagcgcgtggcgcggtgcgcagtgggtggctccacctcgactgcgaattactgtttagaggatgctggtggtggaggtggcgaacggccgctccctggtgtggggagccgaggcggtgcaggccctccgggagcgcctgggtgtggggggccgcacggtaggcgccctgccccgcgggccccgccagaactcgcgcctgggcctcccgctgctgctgatgcccgaagaggcgcggctcttggccgagatcggcgccgtgactctggtcagcgccccgcgtccagactctcggcaccacagcctggccctgacatccttcaagcgccagcaagaggagagcttccaggagcagagcgccttggcagctgaggcccgggagacccgtcgtcaggagctcctggagaagattacggagggccaggctgctaagaagcagaaactagaacaggcttcaggggccagctcaagccaggaggccggctcgagccaggctgccaaagaggatgagaccagtgatggccaggcttcgggagagcaggaggaagctggcccctcgtcttcccaagcaggaccctcaaatggggtagcccccttgcccagatctgctctccttgtccagctggccactgccaggcctcgaccggtcaaggccaggcccctggactggcgtgtccagtctaaagactggccccacgccggccgccctgcccacgagctgcgctacagtatctacagagacctgtgggagcgaggcttcttcctcagtgcggctggcaagttcggaggtgacttcctggtctatcctgcccctcggttcacgcccatatattgttagtgctggcccctgaggcattccatccccggttgtgtggggcttggccgg

SEQ ID NO: 420310 - DNA, 1901 bp, Homo sapiens
tgaggcctaggggcggggcttcgccgagaccccggaggctttgggtgcgctgcagcggtctgcggcgcgcagctgtttcggtaactgctttgcctcccggctcccgcaggaggatgctggtggtggaggtggcgaacggccgctccctggtgtggggagccgaggcggtgcaggccctccgggagcgcctgggtgtggggggccgcacggtaggcgccctgccccgcgggccccgccagaactcgcgcctgggcctcccgctgctgctgatgcccgaagaggcgcggctcttggccgagatcggcgccgtgactctggtcagcgccccgcgtccagactctcggcaccacagcctggccctgacatccttcaagcgccagcaagaggagagcttccaggagcagagcgccttggcagctgaggcccgggagacccgtcgtcaggagctcctggagaagattacggagggccaggctgctaagaagcagaaactagaacaggcttcaggggccagctcaagccaggaggccggctcgagccaggctgccaaagaggatgagaccagtgatggccaggcttcgggagagcaggaggaagctggcccctcgtcttcccaagcaggaccctcaaatggggtagcccccttgcccagatctgctctccttgtccagctggccactgccaggcctcgaccggtcaaggccaggcccctggactggcgtgtccagtctaaagactggccccacgccggccgccctgcccacgagctgcgctacagtatctacagagacctgtgggagcgaggcttcttcctcagtgcggctggcaagttcggaggtgacttcctggtctatcctggtgaccccctccgcttccacgcccattatatcgctcagtgctgggcccctgaggacaccatcccactccaagacctggttgctgctgggcgccttggaaccagcgtcagaaagaccctgctcctctgttctccgcagcctgatggtaaggtggtctacacctccctgcaatgggccagcctgcagtgaactccagagacctaggggatgtggctgtgtcggcagcaagagcctttctggatgttccccagctcttctctgggagtctagaacatcctcctacctttctccgcggttagtttttgattccaggttttcgaacactacatcttttttatgttcttccttgtttcaaagcacttattggctgtgtttttgtagttacctattttcacactgtgagcttcccgagaatggggcctgggtttgattcatctgttttctacagggtttaagtctcaggaggtctcaataaacttggtatataaatgttaaaaaaaaaaaaaaaaaaaaaaaaaaaaaaaaaaaaaaaaaaaagggggggcgccccaaaaccccccgggggcgcaaacaacatagccgagcaccccccgcctatatttgagaagacagcgagggcaccccactaagagggggctcttataaaaataacagagcaaaggcgcggcgcgggcgcgtataaaaacaacaccggggcataggcgggaaaaacaaacgaccgcacgagcgaagactacttgtggggagaaaaagacaacccacccactgcgtggggggggaggcaacaaaaatagtggcgggcacccaccctaccaccaaaagatattataaacacgccccctcggtggtgagacataacaaatactattttgcgtcgtcgctataagttggtgaacaaacccaaccagggataactgatatctgcgtcgcaggagaaataaatatttgttctcgcagaggacatttgtttactaaacaaaaatattccccacgcaggttcttatctgttcactcgggagaacaggaaagagaggagaaaaagga

SEQ ID NO: 420311 - DNA, 1947 bp, Homo sapiens
tgaggcctaggggcggggcttcgccgagaccccggaggctttgggtgcgctgcagcggtctgcggcgcgcagctgtttcggtaactgctttgcctcccggctcccgcaggaggatgctggtggtggaggtggcgaacggccgctccctggtgtggggagccgaggcggtgcaggccctccgggagcgcctgggtgtggggggccgcacggtaggcgccctgccccgcgggccccgccagaactcgcgcctgggcctcccgctgctgctgatgcccgaagaggcgcggctcttggccgagatcggcgccgtgactctggtcagcgccccgcgtccagactctcggcaccacagcctggccctgacatccttcaagcgccagcaagaggagagcttccaggagcagagcgccttggcagctgaggcccgggagacccgtcgtcaggagctcctggagaagattacggagggccaggctgctaagaagcagaaactagaacaggcttcaggggccagctcaagccaggaggccggctcgagccaggctgccaaagaggatgagaccagtgatggccaggcttcgggagagcaggaggaagctggcccctcgtcttcccaagcaggaccctcaaatggggtagcccccttgcccagatctgctctccttgtccagctggccactgccaggcctcgaccggtcaaggccaggcccctggactggcgtgtccagtctaaagactggccccacgccggccgccctgcccacgagctgcgctacagtatctacagagacctgtgggagcgaggcttcttcctcagtgcggctggcaagttcggaggtgacttcctggtctatcctggtgaccccctccgcttccacgcccattatatcgctcagtgctgggcccctgaggacaccatcccactccaagacctggttgctgctgggcgccttggaaccagcgtcagaaagaccctgctcctctgttctccgcagcctgatggtaaggtggtctacacctccctgcaatgggccagcctgcagtgaactccagagacctaggggatgtggctgtgtcggcagcaagagcctttctggatgttccccagctcttctctgggagtctagaacatcctcctacctttctccgcggttagtttttgattccaggttttcgaacactacatcttttttatgttcttccttgtttcaaagcacttattggctgtgtttttgtagttacctattttcacactgtgagcttcccgagaatggggcctgggtttgattcatctgttttctacagggtttaagtctcaggaggtctcaataaacttggtatataaatgttaaaaaaaaaaaaaaaaaaaaaaaaaaaaaaaaaaaaaaaaaaaaaaaaaaaaaaaaaaaaaaaaaaaaaaaaaaaaaaaaaaaaaaaaaagggggggcgccccaaaaccccccgggggcgcaaacaacatagccgagcaccccccgcctatatttgagaagacagcgagggcaccccactaagagggggctcttataaaaataacagagcaaaggcgcggcgcgggcgcgtataaaaacaacaccggggcataggcgggaaaaacaaacgaccgcacgagcgaagactacttgtggggagaaaaagacaacccacccactgcgtggggggggaggcaacaaaaatagtggcgggcacccaccctaccaccaaaagatattataaacacgccccctcggtggtgagacataacaaatactattttgcgtcgtcgctataagttggtgaacaaacccaaccagggataactgatatctgcgtcgcaggagaaataaatatttgttctcgcagaggacatttgtttactaaacaaaaatattccccacgcaggttcttatctgttcactcgggagaacaggaaagagaggagaaaaagga

SEQ ID NO: 420312 - DNA, 1836 bp, Homo sapiens
gatcctcaagttcccaagtagaggagaggaagcggcagagggaggaggatgctggtggtggaggtggcgaacggccgctccctggtgtggggagccgaggcggtgcaggccctccgggagcgcctgggtgtggggggccgcacggtaggcgccctgccccgcgggccccgccagaactcgcgcctgggcctcccgctgctgctgatgcccgaagaggcgcggctcttggccgagatcggcgccgtgactctggtcagcgccccgcgtccagactctcggcaccacagcctggccctgacatccttcaagcgccagcaagaggagagcttccaggagcagagcgccttggcagctgaggcccgggagacccgtcgtcaggagctcctggagaagattacggagggccaggctgctaagaagcagaaactagaacaggcttcaggggccagctcaagccaggaggccggctcgagccaggctgccaaagaggatgagaccagtgatggccaggcttcgggagagcaggaggaagctggcccctcgtcttcccaagcaggaccctcaaatggggtagcccccttgcccagatctgctctccttgtccagctggccactgccaggcctcgaccggtcaaggccaggcccctggactggcgtgtccagtctaaagactggccccacgccggccgccctgcccacgagctgcgctacagtatctacagagacctgtgggagcgaggcttcttcctcagtgcggctggcaagttcggaggtgacttcctggtctatcctggtgaccccctccgcttccacgcccattatatcgctcagtgctgggcccctgaggacaccatcccactccaagacctggttgctgctgggcgccttggaaccagcgtcagaaagaccctgctcctctgttctccgcagcctgatggtaaggtggtctacacctccctgcaatgggccagcctgcagtgaactccagagacctaggggatgtggctgtgtcggcagcaagagcctttctggatgttccccagctcttctctgggagtctagaacatcctcctacctttctccgcggttagtttttgattccaggttttcgaacactacatcttttttatgttcttccttgtttcaaagcacttattggctgtgtttttgtagttacctattttcacactgtgagcttcccgagaatggggcctgggtttgattcatctgttttctacagggtttaagtctcaggaggtctcaataaacttggtatataaatgttaaaaaaaaaaaaaaaaaaaaaaaaaaaaaaaaaaaaaaaaaaaagggggggcgccccaaaaccccccgggggcgcaaacaacatagccgagcaccccccgcctatatttgagaagacagcgagggcaccccactaagagggggctcttataaaaataacagagcaaaggcgcggcgcgggcgcgtataaaaacaacaccggggcataggcgggaaaaacaaacgaccgcacgagcgaagactacttgtggggagaaaaagacaacccacccactgcgtggggggggaggcaacaaaaatagtggcgggcacccaccctaccaccaaaagatattataaacacgccccctcggtggtgagacataacaaatactattttgcgtcgtcgctataagttggtgaacaaacccaaccagggataactgatatctgcgtcgcaggagaaataaatatttgttctcgcagaggacatttgtttactaaacaaaaatattccccacgcaggttcttatctgttcactcgggagaacaggaaagagaggagaaaaagga

SEQ ID NO: 420313 - DNA, 935 bp, Homo sapiens
tgaggcctaggggcggggcttcgccgagaccccggaggctttgggtgcgctgcagcggtctgcggcgcgcagctgtttcggtaactgctttgcctcccggctcccgcaggaggatgctggtggtggaggtggcgaacggccgctccctggtgtggggagccgaggcggtgcaggccctccgggagcgcctgggtgtggggggccgcacggtaggcgccctgccccgcgggccccgccagaactcgcgcctgggcctcccgctgctgctgatgcccgaagaggcgcggctcttggccgagatcggcgccgtgactctggtcagcgccccgcgtccagactctcggcaccacagcctggccctgacatccttcaagcgccagcaagaggagagcttccaggagcagagcgccttggcagctgaggcccgggagacccgtcgtcaggagctcctggagaagattacggagggccaggctgctaagaagcagaaactagaacaggcttcaggggccagctcaagccaggaggccggctcgagccaggctgccaaagaggatgagaccagtgatggccaggcttcgggagagcaggaggaagctggcccctcgtcttcccaagcaggaccctcaaatggggtagcccccttgcccagatctgctctccttgtccagctggccactgccaggcctcgaccggtcaaggccaggcccctggactggcgtgtccagtctaaagactggccccacgccggccgccctgcccacgagctgcgctacagtatctacagagacctgtgggagcgaggcttcttcctcagtgcggctggcaagttcggaggtgacttcctggtctatcctgcccctcggttcacgcccatatattgttagtgctggcccctgaggcattccatccccggttgtgtggggcttggccgg

SEQ ID NO: 420314 - DNA, 1426 bp, Homo sapiens
gatgacgaagttgacgagggtgtcggcatgagggggtggagcaaggagcgcgtggcgcggtgcgcagtgggtggctccacctcgactgcgaattactgtttatgaggtgactcgctggttctatcggtggacagtgggacattctgaagggaggcaaggaggcggactgagcgctcccaattggggaggatgctggtggtggaggtggcgaacggccgctccctggtgtggggagccgaggcggtgcaggccctccgggagcgcctgggtgtggggggccgcacggtaggcgccctgccccgcgggccccgccagaactcgcgcctgggcctcccgctgctgctgatgcccgaagaggcgcggctcttggccgagatcggcgccgtgactctggtcagcgccccgcgtccagactctcggcaccacagcctggccctgacatccttcaagcgccagcaagaggagagcttccaggagcagagcgccttggcagctgaggcccgggagacccgtcgtcaggagctcctggagaagattacggagggccaggctgctaagaagcagaaactagaacaggcttcaggggccagctcaagccaggaggccggctcgagccaggctgccaaagaggatgagaccagtgatggccaggcttcgggagagcaggaggaagctggcccctcgtcttcccaagcaggaccctcaaatggggtagcccccttgcccagatctgctctccttgtccagctggccactgccaggcctcgaccggtcaaggccaggcccctggactggcgtgtccagtctaaagactggccccacgccggccgccctgcccacgagctgcgctacagtatctacagagacctgtgggagcgaggcttcttcctcagtgcggctggcaagttcggaggtgacttcctggtctatcctggtgaccccctccgcttccacgcccattatatcgctcagtgctgggcccctgaggacaccatcccactccaagacctggttgctgctgggcgccttggaaccagcgtcagaaagaccctgctcctctgttctccgcagcctgatggtaaggtggtctacacctccctgcaatgggccagcctgcagtgaactccagagacctaggggatgtggctgtgtcggcagcaagagcctttctggatgttccccagctcttctctgggagtctagaacatcctcctacctttctccgcggttagtttttgattccaggttttcgaacactacatcttttttatgttcttccttgtttcaaagcacttattggctgtgtttttgtagttacctattttcacactgtgagcttcccgagaatggggcctgggtttgattcatctgttttctacagggtttaagtctcaggaggtctcaataaacttggtatataaatgtt

SEQ ID NO: 420315 - DNA, 1008 bp, Homo sapiens
  misc_feature (860)..(860): n is a, c, g, or t
  misc_feature (865)..(865): n is a, c, g, or t
  misc_feature (869)..(869): n is a, c, g, or t
  misc_feature (888)..(888): n is a, c, g, or t
  misc_feature (891)..(891): n is a, c, g, or t
  misc_feature (895)..(895): n is a, c, g, or t
tgaggcctaggggcggggcttcgccgagaccccggaggctttgggtgcgctgcagcggtctgcggcgcgcagctgtttcggtaactgctttgcctcccggctcccgcaggaggatgctggtggtggaggtggcgaacggccgctccctggtgtggggagccgaggcggtgcaggccctccgggagcgcctgggtgtggggggccgcacggtaggcgccctgccccgcgggccccgccagaactcgcgcctgggcctcccgctgctgctgatgcccgaagaggcgcggctcttggccgagatcggcgccgtgactctggtcagcgccccgcgtccagactctcggcaccacagcctggccctgacatccttcaagcgccagcaagaggagagcttccaggagcagagcgccttggcagctgaggcccgggagacccgtcgtcaggagctcctggagaagattacggagggccaggctgctaagaagcagaaactagaacaggcttcaggggccagctcaagccaggaggccggctcgagccaggctgccaaagaggatgagaccagtgatggccaggcttcgggagagcaggaggaagctggcccctcgtcttcccaagcaggaccctcaaatggggtagcccccttgcccagatctgctctccttgtccagctggccactgccaggcctcgaccggtcaaggccaggcccctggactggcgtgtccagtctaaagactggccccacgccggccgccctgcccacgagctgcgctacagtatctacagagacctgtgggagcgaggcttcttcctcagtgcggctggcaagttcggaggtgacttcctggtctatcctgcnggtanctgnacctcgttagctattgcantgnggcnggaactcctcagactgtgttggctgccggaaactgcctttcacgtgaggtacccaagcgggccagccggggtggctggccttggacctcgggggctctcgcctcggttcctta

SEQ ID NO: 420316 - DNA, 1881 bp, Homo sapiens
gcctcgtgccgattcggcacgagggtgcgctgcagcggtctgcggcgcgcagctgtttcggtaactgctttgcctcccggctcccgcaggaggatgctggtggtggaggtggcgaacggccgctccctggtgtggggagccgaggcggtgcaggccctccgggagcgcctgggtgtggggggccgcacggtaggcgccctgccccgcgggccccgccagaactcgcgcctgggcctcccgctgctgctgatgcccgaagaggcgcggctcttggccgagatcggcgccgtgactctggtcagcgccccgcgtccagactctcggcaccacagcctggccctgacatccttcaagcgccagcaagaggagagcttccaggagcagagcgccttggcagctgaggcccgggagacccgtcgtcaggagctcctggagaagattacggagggccaggctgctaagaagcagaaactagaacaggcttcaggggccagctcaagccaggaggccggctcgagccaggctgccaaagaggatgagaccagtgatggccaggcttcgggagagcaggaggaagctggcccctcgtcttcccaagcaggaccctcaaatggggtagcccccttgcccagatctgctctccttgtccagctggccactgccaggcctcgaccggtcaaggccaggcccctggactggcgtgtccagtctaaagactggccccacgccggccgccctgcccacgagctgcgctacagtatctacagagacctgtgggagcgaggcttcttcctcagtgcggctggcaagttcggaggtgacttcctggtctatcctggtgaccccctccgcttccacgcccattatatcgctcagtgctgggcccctgaggacaccatcccactccaagacctggttgctgctgggcgccttggaaccagcgtcagaaagaccctgctcctctgttctccgcagcctgatggtaaggtggtctacacctccctgcaatgggccagcctgcagtgaactccagagacctaggggatgtggctgtgtcggcagcaagagcctttctggatgttccccagctcttctctgggagtctagaacatcctcctacctttctccgcggttagtttttgattccaggttttcgaacactacatcttttttatgttcttccttgtttcaaagcacttattggctgtgtttttgtagttacctattttcacactgtgagcttcccgagaatggggcctgggtttgattcatctgttttctacagggtttaagtctcaggaggtctcaataaacttggtatataaatgttaaaaaaaaaaaaaaaaaaaaaaaaaaaaaaaaaaaaaaaaaaaagggggggcgccccaaaaccccccgggggcgcaaacaacatagccgagcaccccccgcctatatttgagaagacagcgagggcaccccactaagagggggctcttataaaaataacagagcaaaggcgcggcgcgggcgcgtataaaaacaacaccggggcataggcgggaaaaacaaacgaccgcacgagcgaagactacttgtggggagaaaaagacaacccacccactgcgtggggggggaggcaacaaaaatagtggcgggcacccaccctaccaccaaaagatattataaacacgccccctcggtggtgagacataacaaatactattttgcgtcgtcgctataagttggtgaacaaacccaaccagggataactgatatctgcgtcgcaggagaaataaatatttgttctcgcagaggacatttgtttactaaacaaaaatattccccacgcaggttcttatctgttcactcgggagaacaggaaagagaggagaaaaagga

SEQ ID NO: 420317 - DNA, 1894 bp, Homo sapiens
gatgacgaagttgacgagggtgtcggcatgagggggtggagcaaggagcgcgtggcgcggtgcgcagtgggtggctccacctcgactgcgaattactgtttagaggatgctggtggtggaggtggcgaacggccgctccctggtgtggggagccgaggcggtgcaggccctccgggagcgcctgggtgtggggggccgcacggtaggcgccctgccccgcgggccccgccagaactcgcgcctgggcctcccgctgctgctgatgcccgaagaggcgcggctcttggccgagatcggcgccgtgactctggtcagcgccccgcgtccagactctcggcaccacagcctggccctgacatccttcaagcgccagcaagaggagagcttccaggagcagagcgccttggcagctgaggcccgggagacccgtcgtcaggagctcctggagaagattacggagggccaggctgctaagaagcagaaactagaacaggcttcaggggccagctcaagccaggaggccggctcgagccaggctgccaaagaggatgagaccagtgatggccaggcttcgggagagcaggaggaagctggcccctcgtcttcccaagcaggaccctcaaatggggtagcccccttgcccagatctgctctccttgtccagctggccactgccaggcctcgaccggtcaaggccaggcccctggactggcgtgtccagtctaaagactggccccacgccggccgccctgcccacgagctgcgctacagtatctacagagacctgtgggagcgaggcttcttcctcagtgcggctggcaagttcggaggtgacttcctggtctatcctggtgaccccctccgcttccacgcccattatatcgctcagtgctgggcccctgaggacaccatcccactccaagacctggttgctgctgggcgccttggaaccagcgtcagaaagaccctgctcctctgttctccgcagcctgatggtaaggtggtctacacctccctgcaatgggccagcctgcagtgaactccagagacctaggggatgtggctgtgtcggcagcaagagcctttctggatgttccccagctcttctctgggagtctagaacatcctcctacctttctccgcggttagtttttgattccaggttttcgaacactacatcttttttatgttcttccttgtttcaaagcacttattggctgtgtttttgtagttacctattttcacactgtgagcttcccgagaatggggcctgggtttgattcatctgttttctacagggtttaagtctcaggaggtctcaataaacttggtatataaatgttaaaaaaaaaaaaaaaaaaaaaaaaaaaaaaaaaaaaaaaaaaaagggggggcgccccaaaaccccccgggggcgcaaacaacatagccgagcaccccccgcctatatttgagaagacagcgagggcaccccactaagagggggctcttataaaaataacagagcaaaggcgcggcgcgggcgcgtataaaaacaacaccggggcataggcgggaaaaacaaacgaccgcacgagcgaagactacttgtggggagaaaaagacaacccacccactgcgtggggggggaggcaacaaaaatagtggcgggcacccaccctaccaccaaaagatattataaacacgccccctcggtggtgagacataacaaatactattttgcgtcgtcgctataagttggtgaacaaacccaaccagggataactgatatctgcgtcgcaggagaaataaatatttgttctcgcagaggacatttgtttactaaacaaaaatattccccacgcaggttcttatctgttcactcgggagaacaggaaagagaggagaaaaagga

SEQ ID NO: 420318 - DNA, 1894 bp, Homo sapiens
gatgacgaagttgacgagggtgtcggcatgagggggtggagcaaggagcgcgtggcgcggtgcgcagtgggtggctccacctcgactgcgaattactgtttatgaggtgactcgctggttctatcggtggacagtgggacattctgaagggaggcaaggaggcggactgagcgctcccaattggggaggatgctggtggtggaggtggcgaacggccgctccctggtgtggggagccgaggcggtgcaggccctccgggagcgcctgggtgtggggggccgcacggtaggcgccctgccccgcgggccccgccagaactcgcgcctgggcctcccgctgctgctgatgcccgaagaggcgcggctcttggccgagatcggcgccgtgactctggtcagcgccccgcgtccagactctcggcaccacagcctggccctgacatccttcaagcgccagcaagaggagagcttccaggagcagaaaactagaacaggcttcaggggccagctcaagccaggaggccggctcgagccaggctgccaaagaggatgagaccagtgatggccaggcttcgggagagcaggaggaagctggcccctcgtcttcccaagcaggaccctcaaatggggtagcccccttgcccagatctgctctccttgtccagctggccactgccaggcctcgaccggtcaaggccaggcccctggactggcgtgtccagtctaaagactggccccacgccggccgccctgcccacgagctgcgctacagtatctacagagacctgtgggagcgaggcttcttcctcagtgcggctggcaagttcggaggtgacttcctggtctatcctggtgaccccctccgcttccacgcccattatatcgctcagtgctgggcccctgaggacaccatcccactccaagacctggttgctgctgggcgccttggaaccagcgtcagaaagaccctgctcctctgttctccgcagcctgatggtaaggtggtctacacctccctgcaatgggccagcctgcagtgaactccagagacctaggggatgtggctgtgtcggcagcaagagcctttctggatgttccccagctcttctctgggagtctagaacatcctcctacctttctccgcggttagtttttgattccaggttttcgaacactacatcttttttatgttcttccttgtttcaaagcacttattggctgtgtttttgtagttacctattttcacactgtgagcttcccgagaatggggcctgggtttgattcatctgttttctacagggtttaagtctcaggaggtctcaataaacttggtatataaatgttaaaaaaaaaaaaaaaaaaaaaaaaaaaaaaaaaaaaaaaaaaaagggggggcgccccaaaaccccccgggggcgcaaacaacatagccgagcaccccccgcctatatttgagaagacagcgagggcaccccactaagagggggctcttataaaaataacagagcaaaggcgcggcgcgggcgcgtataaaaacaacaccggggcataggcgggaaaaacaaacgaccgcacgagcgaagactacttgtggggagaaaaagacaacccacccactgcgtggggggggaggcaacaaaaatagtggcgggcacccaccctaccaccaaaagatattataaacacgccccctcggtggtgagacataacaaatactattttgcgtcgtcgctataagttggtgaacaaacccaaccagggataactgatatctgcgtcgcaggagaaataaatatttgttctcgcagaggacatttgtttactaaacaaaaatattccccacgcaggttcttatctgttcactcgggagaacaggaaagagaggagaaaaagga

SEQ ID NO: 420319 - DNA, 1844 bp, Homo sapiens
tgaggcctaggggcggggcttcgccgagaccccggaggctttgggtgcgctgcagcggtctgcggcgcgcagctgtttcggtaactgctttgcctcccggctcccgcaggaggatgctggtggtggaggtggcgaacggccgctccctggtgtggggagccgaggcggtgcaggccctccgggagcgcctgggtgtggggggccgcacggtaggcgccctgccccgcgggccccgccagaactcgcgcctgggcctcccgctgctgctgatgcccgaagaggcgcggctcttggccgagatcggcgccgtgactctggtcagcgccccgcgtccagactctcggcaccacagcctggccctgacatccttcaagcgccagcaagaggagagcttccaggagcagagcgccttggcagctgaggcccgggagacccgtcgtcaggagctcctggagaagattacggagggccaggctgctaagaagcagaaactagaacaggcttcaggggccagctcaagccaggaggccggctcgagccagggcccctcgtcttcccaagcaggaccctcaaatggggtagcccccttgcccagatctgctctccttgtccagctggccactgccaggcctcgaccggtcaaggccaggcccctggactggcgtgtccagtctaaagactggccccacgccggccgccctgcccacgagctgcgctacagtatctacagagacctgtgggagcgaggcttcttcctcagtgcggctggcaagttcggaggtgacttcctggtctatcctggtgaccccctccgcttccacgcccattatatcgctcagtgctgggcccctgaggacaccatcccactccaagacctggttgctgctgggcgccttggaaccagcgtcagaaagaccctgctcctctgttctccgcagcctgatggtaaggtggtctacacctccctgcaatgggccagcctgcagtgaactccagagacctaggggatgtggctgtgtcggcagcaagagcctttctggatgttccccagctcttctctgggagtctagaacatcctcctacctttctccgcggttagtttttgattccaggttttcgaacactacatcttttttatgttcttccttgtttcaaagcacttattggctgtgtttttgtagttacctattttcacactgtgagcttcccgagaatggggcctgggtttgattcatctgttttctacagggtttaagtctcaggaggtctcaataaacttggtatataaatgttaaaaaaaaaaaaaaaaaaaaaaaaaaaaaaaaaaaaaaaaaaaagggggggcgccccaaaaccccccgggggcgcaaacaacatagccgagcaccccccgcctatatttgagaagacagcgagggcaccccactaagagggggctcttataaaaataacagagcaaaggcgcggcgcgggcgcgtataaaaacaacaccggggcataggcgggaaaaacaaacgaccgcacgagcgaagactacttgtggggagaaaaagacaacccacccactgcgtggggggggaggcaacaaaaatagtggcgggcacccaccctaccaccaaaagatattataaacacgccccctcggtggtgagacataacaaatactattttgcgtcgtcgctataagttggtgaacaaacccaaccagggataactgatatctgcgtcgcaggagaaataaatatttgttctcgcagaggacatttgtttactaaacaaaaatattccccacgcaggttcttatctgttcactcgggagaacaggaaagagaggagaaaaagga
